United States Patent Application Publication US 2026/0375159 A1 - sequence listing, part 2

SEQ ID NO: 1666 - protein, 1390 aa, synthetic construct
MASCPKPGPPVSAGAMSLESGLTTHSVLAIERGPNSLANSGSDFGGGGLGLPLRLLRVSVGTQTSRSDWVDLVSWSHPGPTSKSQQVDLVSLFPKHRVDLLSKNDQVDLVAQFLPSKFPPNLAENDLALLVNLEFYRSDLHVYECVHKAAHWEGLSGLPEVYEQLAPQPCVGETLHSSLPRDSELFVPEEGSSEKESEDAPKTSPPTPGKHGLEQTGEEKVMVTVPDKNPPCPCCGTRVNSVLNLIEHLKVSHGKRGVCFRCAKCGKENSNYHSVVCHFKKCRGPETEKAPAGEWICEVCNRDFTTKIGLGQHKRLAHPAVRNQERIVASQPKETSNRGAHKRCWTKEEEELLIRLEAQFEGNKNINKLIAEHITTKTAKQISDKRRLLSRKPAEEPRMEPGTCHHTRRAAASLRTEPEMSHHAQAEDRDNGPGRRPLPGRAAAGGRTMDEIRRHPDKGNGQQRPTKQKSEEQLQAYYKKTLEERLSAGALNTFPRAFKQVMEGRDIKLVINQTAQDCFGCLESISQIRTATRDKKDTVTREKHPKKPFQKWMKKRAIKKGNYLRFQRLFYLDRGKLAKIILDDIECLSCDIPLSEIYSVFKTRWETTGSFKSLGDFKTYGKADNTAFRELITAKEIEKNVQEMSKGSAPGPDGITLGDVVKMDPEFSRTMEIFNLWLTTGKIPDMVRGCRTVLIPKSSKPDRLKDINNWRPITIGSILLRLFSRIVTARLSKACPLNPRQRGFIRAAGCSENLKLLQTIIWSAKREHRPLGVVFVDIAKAFDTVSHQHIIHALQQREVDPHIVGLVSNMYENISTYITTKRNTHTDKIQIRVGVKQGDPMSPLLFNLAMDPLLCKLEESGKGYHRGQSSITAMAFADDLVLLSDSWENMNTNISILETFCNLTGLKTQGQKCHGFYIKPTKKSYTINDCAAWTINGTPLNMIDPGESEKYLGLQFDPWIGIARSGLSTKLDFWLQRIDQAPLKPLQKTDILKTYTIPRLIYIADHSEVKSARLETLDQKIRTAVKEWLHLPPCTCDAILYSSTRDGGLGITKLAGLIPSVQARRLHRIAQSSDDTMKCFMEKEKMEQLHKKLWIQAGGDRENIPSIWEAPPSSEPPNNVSTNSEWEAPTQKDKFPKPCNWRKNEFKKWTKLASQGRGIVNFERDKISNHWIQYYRRIPHRKLLTALQLRANVYPTREFLARGRQDQYIKACRHCDADNESCAHIIGNCPVTQDARIKRHNYICELLLEEAKKKDWVVFKEPHIRDSNKELYKPDLIFVKDGRALVVDVTVRYEAAKSSLEEAAAEKVRKYKHLETEVRHLTNAKDVTFVGFPLGARGKWHQDNFKLLTELGLSKSRQVKMAETFSTVALFSSVDIVHMFASRARKSMVM

SEQ ID NO: 1667 - protein, 1390 aa, synthetic construct
MASCPKPGPPVSAGAMSLESGLTTHSVLAIERGPNSLANSGSDFGGGGLGLPLRLLRVSVGTQTSRSDWVDLVSWSHPGPTSKSQQVDLVSLFPKHRVDLLSKNDQVDLVAQFLPSKFPPNLAENDLALLVNLEFYRSDLHVYECVHKAAHWEGLSGLPEVYEQLAPQPCVGETLHSSLPRDSELFVPEEGSSEKESEDAPKTSPPTPGKHGLEQTGEEKVMVTVPDKNPPCPCCGTRVNSVLNLIEHLKVSHGKRGVCFRCAKCGKENSNYHSVVCHFKKCRGPETEKAPAGEWICEVCNRDFTTKIGLGQHKRLAHPAVRNQERIVASQPKETSNRGAHKRCWTKEEEELLIRLEAQFEGNKNINKLIAEHITTKTAKQISDKRRLLSRKPAEEPRMEPGTCHHTRRAAASLRTEPEMSHHAQAEDRDNGPGRRPLPGRAAAGGRTMDEIRRHPDKGNGQQRPTKQKSEEQLQAYYKKTLEERLSAGALNTFPRAFKQVMEGRDIKLVINQTAQDCFGCLESISQIRTATRDKKDTVTRKKHPKKPFQKWMKKRAIKKGNYLRFQRLFYLDRGKLAKIILDDIECLSCDIPLSEIYSVFKTRWETTGSFKSLGDFKTYGKADNTAFRELITAKEIEKNVQEMSKGSAPGPDGITLGDVVKMDPEFSRTMEIFNLWLTTGKIPDMVRGCRTVLIPKSSKPDRLKDINNWRPITIGSILLRLFSRIVTARLSKACPLNPRQRGFIRAAGCSENLKLLQTIIWSAKREHRPLGVVFVDIAKAFDTVSHQHIIHALQQREVDPHIVGLVSNMYENISTYITTKRNTHTDKIQIRVGVKQGDPMSPLLFNLAMDPLLCKLEESGKGYHRGQSSITAMAFADDLVLLSDSWENMNTNISILETFCNLTGLKTQGQKCHGFYIKPTKKSYTINDCAAWTINGTPLNMIDPGESEKYLGLQFDPWIGIARSGLSTKLDFWLQRIDQAPLKPLQKTDILKTYTIPRLIYIADHSEVKSALLETLDQKIRTAVKEWLHLPPCTCDAILYSSTRDGGLGITKLAGLIPSVQARRLHRIAQSSDDTMKCFMEKEKMEQLHKKLWIQAGGDRENIPSIWEAPPSSEPPNNVSTNSEWEAPTQKDKFPKPCNWRKNEFKKWTKLASQGRGIVNFERDKISNHWIQYYRRIPHRKLLTALQLRANVYPTREFLARGRQDQYIKACRHCDADNESCAHIIGNCPVTQDARIKRHNYICELLLEEAKKKDWVVFKEPHIRDSNKELYKPDLIFVKDGRALVVDVTVRYEAAKSSLEEAAAEKVRKYKHLETEVRHLTNAKDVTFVGFPLGARGKWHQDNFKLLTELGLSKSRQVKMAETFSTVALFSSVDIVHMFASRARKSMVM

SEQ ID NO: 1668 - protein, 1390 aa, synthetic construct
MASCPKPGPPVSAGAMSLESGLTTHSVLAIERGPNSLANSGSDFGGGGLGLPLRLLRVSVGTQTSRSDWVDLVSWSHPGPTSKSQQVDLVSLFPKHRVDLLSKNDQVDLVAQFLPSKFPPNLAENDLALLVNLEFYRSDLHVYEGVHFAAHWEGLSGLPEVYEQLAPQPCVGETLHSSLPRDSELFVPEEGSSEKESEDAPKTSPPTPGKHGKRQTGEEKVMVTVPDKNPPCPCCGTRVNSVLNLIEHLKVSHGKRRVCFRCAKCGKENSNYHSVVCHFPKCRGPETEKAPAGEWICEVCNRDFTTKIGLGQHKRLAHPAVRNQERIVASQPKETSNRGAHKRCWTKEEEELLIRLEAQFEGNKNINKLIAEHITTKTAKQISDKRRLLSRKPAEEPREEPGTCHHTRRAAASLRTEPEMSHHAQAEDRDNGPGRRPLPGRAAAGGRTMDEIRRHPDKGNGQQRPTKQKSEEQLQAYYKKTLEERLSAGALNTFPRAFKQVMEGRDIKLVINQTAQDCFGCLESISQIRTATRDKKDTVTREKHPKKPFQKWMKKRAIKKGNYLRFQRLFYLDRGKLAKIILDDIECLSCDIPLSEIYSVFKTRWETTGSFKSLGDFKTYGKADNTAFRELITAKEIEKNVQEMSKGSAPGPDGITLGDVVKMDPEFSRTMEIFNLWLTTGKIPDMVRGCRTVLIPKSSKPDRLKDINNWRPITIGSILLRLFSRIVTARLSKACPLNPRQRGFIRAAGCSENLKLLQTIIWSAKREHRPLGVVFVDIAKAFDTVSHQHIIHALQQREVDPHIVGLVSNMYENISTYITTKRNTHTDKIQIRVGVKQGDPMSPLLFNLAMDPLLCKLEESGKGYHRGQSSITAMAFADDLVLLSDSWENMNTNISILETFCNLTGLKTQGQKCHGFYIKPTKDSYTINDCAAWTINGTPLNMIDPGESEKYLGLQFDPWIGIARSGLSTKLDFWLQRIDQAPLKPLQKTDILKTYTIPRLIYIADHSEVKTALLETLDQKIRTAVKEWLHLPPCTCDAILYSSTRDGGLGITKLAGLIPSVQARRLHRIAQSSDDTMKCFMEKEKMEQLHKKLWIQAGGDRENIPSIWEAPPSSEPPNNVSTNSEWEAPTQKDKFPKPCNWRKNEFKKWTKLASQGRGIVNFERDKISNHWIQYYRRIPHRKLLTALQLRANVYPTREFLARGRQDQYIKACRHCDADIESCAHIIGNCPVTQDARIKRHNYICELLLEEAKKKDWVVFKEPHIRDSNKELYKPDLIFVKDARALVVDVTVRYEAAKSSLEEAAAEKVRKYKHLETEVRHLTNAKDVTFVGFPLGARGKWHQDNFKLLTELGLSKSRQVKMAETFSTVALFSSVDIVHMFASRARKSMVM

SEQ ID NO: 1669 - protein, 1390 aa, synthetic construct; identical to SEQ ID NO: 231

SEQ ID NO: 1670 - protein, 1390 aa, synthetic construct; identical to SEQ ID NO: 232

SEQ ID NO: 1671 - protein, 1390 aa, synthetic construct; identical to SEQ ID NO: 235

SEQ ID NO: 1672 - protein, 1390 aa, synthetic construct; identical to SEQ ID NO: 236

SEQ ID NO: 1673 - protein, 1390 aa, synthetic construct
MASCPKPGPPVSAGAMSLESGLTTHSVLAIERGPNSLANSGSDFGGGGLGLPLRLLRVSVGTQTSRSDWVDLVSWSHPGPTSKSQQVDLVSLFPKHRVDLLSKNDQVDLVAQFLPSKFPPNLAENDLALLVNLEFYRSDLHVYECVHFAAHWEGLSGLPEVYEQLAPQPCVGETLHSSLPRDSELFVPEEGSSEKESEDAPKTSPPTPGKHGLEQTGEEKVMVTVPDKNPPCPCCGTRVNSVLNLIEHLKVSHGKRGVCFRCAKCGKENSNYHSVVCHFKKCRGPETEKAPAGEWICEVCNRDFTTKIGLGQHKRLAHPAVRNQERIVASQPKETSNRGAHKRCWTKEEEELLIRLEAQFEGNKNINKLIAEHITTKTAKQISDKRRLLSRKPAEEPREEPGTCHHTRRAAASLRTEPEMSHHAQAEDRDNGPGRRPLPGRAAAGGRTMDEIRRHPDKGNGQQRPTKQKSEEQLQAYYKKTLEERLSAGALNTFPRAFKQVMEGRDIKLVINQTAQDYFGCLESISQIRTATRDKKDTVTRKKHPKKPFQKWMKKRAIKKGNYLRFQRLFYLDRGKLAKIILDDIECLSCDIPLSEIYSVFKTRWETTGSFKSLGDFKTYGKADNTAFRELITAKEIEKNVQEMSKGSAPGPDGITLGDVVKMDPEGSRTMEIFNLWLTTGKIPDMVRGCRTVLIPKSSDPDRLKDINNWRPITIGSILLRLFSRIVTARLSKACPLNPRQRGFIRAAGCSENLKLLQTIIWSAKREHRPLGVVFVDIAKAFDTVSHQHIIHALQQREVDPHIVGLVSNMYENISTYITTKRNTHTDKIQIRVGVKQGDPMSPLLFNLAMDPLLCKLEESGKGYHRGQSSITAMAFADDLVLLSDSWEGMNTNISILETFCNLTGLKTQGQKCHGFYIKPTKDSYTINDCAAWTINGTPLNMIDPGESEKYLGLQFDPWIGIARSGLSTKLDFWLQRIDQAPLKPLQKLDILKTYTIPRLIYIADHSEVKTALLETLDQKIRTAVKEWLHLPPCTCDAILYSSTRDGGLGITKLAGLIPSVQARRLHRIAQSSDDTMKCFMEKEKMEQLHKKLWIQAGGDRENIPSIWEAPPSSEPPNNVSTNSEWEAPTQKDKFPKPCNWRKNEFKKWTKLASQGRGIVNFERDKISNHWIQYYRRIPHRKLLTALQLRANVYPTREFLARGRQDQYIKACRHCDADIESCAHIIGNCPVTQDARIKRHNYICELLLEEAKKKDWVVFKEPHIRDSNKELYKPDLIFVKDARALVVDVTVRYEAAKSSLEEAAAEKVRKYKHLETEVRHLTNAKDVTFVGFPLGARGKWHQDNFKLLTELGLSKSRQVKMAETFSTVALFSSVDIVHMFASRARKSMVM

SEQ ID NO: 1674 - protein, 1390 aa, synthetic construct
MASCPKPGPPVSAGAMSLESGLTTHSVLAIERGPNSLANSGSDFGGGGLGLPLRLLRVSVGTQTSRSDWVDLVSWSHPGPTSKSQQVDLVSLFPKHRVDLLSKNDQVDLVAQFLPSKFPPNLAENDLALLVNLEFYRSDLHVYECVHFAAHWEGLSGLPEVYEQLAPQPCVGETLHSSLPRDSELFVPEEGSSEKESEDAPKTSPPTPGKHGLEQTGEEKVMVTVPDKNPPCPCCGTRVNSVLNLIEHLKVSHGKRGVCFRCAKCGKENSNYHSVVCHFKKCRGPETEKAPAGEWICEVCNRDFTTKIGLGQHKRLAHPAVRNQERIVASQPKETSNRGAHKRCWTKEEEELLIRLEAQFEGNKNINKLIAEHITTKTAKQISDKRRLLSRKPAEEPREEPGTCHHTRRAAASLRTEPEMSHHAQAEDRDNGPGRRPLPGRAAAGGRTMDEIRRHPDKGNGQQRPTKQKSEEQLQAYYKKTLEERLSAGALNTFPRAFKQVMEGRDIKLVINQTAQDYFGCLESISQIRTATRDKKDTVTREKHPKKPFQKWMKKRAIKKGNYLRFQRLFYLDRGKLAKIILDDIECLSCDIPLSEIYSVFKTRWETTGSFKSLGDFKTYGKADNTAFRELITAKEIEKNVQEMSKGSAPGPDGITLGDVVKMDPEGSRTMEIFNLWLTTGKIPDMVRGCRTVLIPKSSDPDRLKDINNWRPITIGSILLRLFSRIVTARLSKACPLNPRQRGFIRAAGCSENLKLLQTIIWSAKREHRPLGVVFVDIAKAFDTVSHQHIIHALQQREVDPHIVGLVSNMYENISTYITTKRNTHTDKIQIRVGVKQGDPMSPLLFNLAMDPLLCKLEESGKGYHRGQSSITAMAFADDLVLLSDSWEGMNTNISILETFCNLTGLKTQGQKCHGFYIKPTKKSYTINDCAAWTINGTPLNMIDPGESEKYLGLQFDPWIGIARSGLSTKLDFWLQRIDQAPLKPLQKLDILKTYTIPRLIYIADHSEVKTALLETLDQKIRTAVKEWLHLPPCTCDAILYSSTRDGGLGITKLAGLIPSVQARRLHRIAQSSDDTMKCFMEKEKMEQLHKKLWIQAGGDRENIPSIWEAPPSSEPPNNVSTNSEWEAPTQKDKFPKPCNWRKNEFKKWTKLASQGRGIVNFERDKISNHWIQYYRRIPHRKLLTALQLRANVYPTREFLARGRQDQYIKACRHCDADIESCAHIIGNCPVTQDARIKRHNYICELLLEEAKKKDWVVFKEPHIRDSNKELYKPDLIFVKDARALVVDVTVRYEAAKSSLEEAAAEKVRKYKHLETEVRHLTNAKDVTFVGFPLGARGKWHQDNFKLLTELGLSKSRQVKMAETFSTVALFSSVDIVHMFASRARKSMVM

SEQ ID NO: 1675 - protein, 1390 aa, synthetic construct
MASCPKPGPPVSAGAMSLESGLTTHSVLAIERGPNSLANSGSDFGGGGLGLPLRLLRVSVGTQTSRSDWVDLVSWSHPGPTSKSQQVDLVSLFPKHRVDLLSKNDQVDLVAQFLPSKFPPNLAENDLALLVNLEFYRSDLHVYECVHFAAHWEGLSGLPEVYEQLAPQPCVGETLHSSLPRDSELFVPEEGSSEKESEDAPKTSPPTPGKHGLEQTGEEKVMVTVPDKNPPCPCCGTRVNSVLNLIEHLKVSHGKRGVCFRCAKCGKENSNYHSVVCHFKKCRGPETEKAPAGEWICEVCNRDFTTKIGLGQHKRLAHPAVRNQERIVASQPKETSNRGAHKRCWTKEEEELLIRLEAQFEGNKNINKLIAEHITTKTAKQISDKRRLLSRKPAEEPREEPGTCHHTRRAAASLRTEPEMSHHAQAEDRDNGPGRRPLPGRAAAGGRTMDEIRRHPDKGNGQQRPTKQKSEEQLQAYYKKTLEERLSAGALNTFPRAFKQVMEGRDIKLVINQTAQDYFGCLESISQIRTATRDKKDTVTRKKHPKKPFQKWMKKRAIKKGNYLRFQRLFYLDRGKLAKIILDDIECLSCDIPLSEIYSVFKTRWETTGSFKSLGDFKTYGKADNTAFRELITAKEIEKNVQEMSKGSAPGPDGITLGDVVKMDPEGSRTMEIFNLWLTTGKIPDMVRGCRTVLIPKSSDPDRLKDINNWRPITIGSILLRLFSRIVTARLSKACPLNPRQRGFIRAAGCSENLKLLQTIIWSAKREHRPLGVVFVDIAKAFDTVSHQHIIHALQQREVDPHIVGLVSNMYENISTYITTKRNTHTDKIQIRVGVKQGDPMSPLLFNLAMDPLLCKLEESGKGYHRGQSSITAMAFADDLVLLSDSWEGMNTNISILETFCNLTGLKTQGQKCHGFYIKPTKDSYTINDCAAWTINGTPLNMIDPGESEKYLGLQFDPWIGIARSGLSTKLDFWLQRIDQAPLKPLQKLDILKTYTIPRLIYIADHSEVKTALLETLDQKIRTAVKEWLHLPPCTCDAILYSSTRDGGLGITKLAGLIPSVQARRLHRIAQSSDDTMKCFMEKEKMEQLHKKLWIQAGGDRENIPSIWEAPPSSEPPNNVSTNSEWEAPTQKDKFPKPCNWRKNEFKKWTKLASQGRGIVNFERDKISNHWIQYYRRIPHRKLLTALQLRANVYPTREFLARGRQDQYIKACRHCDADIESCAHIIGNCPVTQDARIKRHNKICELLLEEAKKKDWVVFKEPHIRDSNKELYKPDLIFVKDARALVVDVTVRYEAAKSSLEEAAAEKVRKYKHLETEVRHLTNAKDVTFVGFPLGARGKWHQDNFKLLTELGLSKSRQVKMAETFSTVALFSSVDIVHMFASRARKSMVM

SEQ ID NO: 1676 - protein, 1390 aa, synthetic construct
MASCPKPGPPVSAGAMSLESGLTTHSVLAIERGPNSLANSGSDFGGGGLGLPLRLLRVSVGTQTSRSDWVDLVSWSHPGPTSKSQQVDLVSLFPKHRVDLLSKNDQVDLVAQFLPSKFPPNLAENDLALLVNLEFYRSDLHVYECVHFAAHWEGLSGLPEVYEQLAPQPCVGETLHSSLPRDSELFVPEEGSSEKESEDAPKTSPPTPGKHGLEQTGEEKVMVTVPDKNPPCPCCGTRVNSVLNLIEHLKVSHGKRGVCFRCAKCGKENSNYHSVVCHFKKCRGPETEKAPAGEWICEVCNRDFTTKIGLGQHKRLAHPAVRNQERIVASQPKETSNRGAHKRCWTKEEEELLIRLEAQFEGNKNINKLIAEHITTKTAKQISDKRRLLSRKPAEEPREEPGTCHHTRRAAASLRTEPEMSHHAQAEDRDNGPGRRPLPGRAAAGGRTMDEIRRHPDKGNGQQRPTKQKSEEQLQAYYKKTLEERLSAGALNTFPRAFKQVMEGRDIKLVINQTAQDYFGCLESISQIRTATRDKKDTVTREKHPKKPFQKWMKKRAIKKGNYLRFQRLFYLDRGKLAKIILDDIECLSCDIPLSEIYSVFKTRWETTGSFKSLGDFKTYGKADNTAFRELITAKEIEKNVQEMSKGSAPGPDGITLGDVVKMDPEGSRTMEIFNLWLTTGKIPDMVRGCRTVLIPKSSDPDRLKDINNWRPITIGSILLRLFSRIVTARLSKACPLNPRQRGFIRAAGCSENLKLLQTIIWSAKREHRPLGVVFVDIAKAFDTVSHQHIIHALQQREVDPHIVGLVSNMYENISTYITTKRNTHTDKIQIRVGVKQGDPMSPLLFNLAMDPLLCKLEESGKGYHRGQSSITAMAFADDLVLLSDSWEGMNTNISILETFCNLTGLKTQGQKCHGFYIKPTKKSYTINDCAAWTINGTPLNMIDPGESEKYLGLQFDPWIGIARSGLSTKLDFWLQRIDQAPLKPLQKLDILKTYTIPRLIYIADHSEVKTALLETLDQKIRTAVKEWLHLPPCTCDAILYSSTRDGGLGITKLAGLIPSVQARRLHRIAQSSDDTMKCFMEKEKMEQLHKKLWIQAGGDRENIPSIWEAPPSSEPPNNVSTNSEWEAPTQKDKFPKPCNWRKNEFKKWTKLASQGRGIVNFERDKISNHWIQYYRRIPHRKLLTALQLRANVYPTREFLARGRQDQYIKACRHCDADIESCAHIIGNCPVTQDARIKRHNKICELLLEEAKKKDWVVFKEPHIRDSNKELYKPDLIFVKDARALVVDVTVRYEAAKSSLEEAAAEKVRKYKHLETEVRHLTNAKDVTFVGFPLGARGKWHQDNFKLLTELGLSKSRQVKMAETFSTVALFSSVDIVHMFASRARKSMVM

SEQ ID NO: 1677 - protein, 1390 aa, synthetic construct
MASCPKPGPPVSAGAMSLESGLTTHSVLAIERGPNSLANSGSDFGGGGLGLPLRLLRVSVGTQTSRSDWVDLVSWSHPGPTSKSQQVDLVSLFPKHRVDLLSKNDQVDLVAQFLPSKFPPNLAENDLALLVNLEFYRSDLHVYECVHFAAHWEGLSGLPEVYEQLAPQPCVGETLHSSLPRDSELFVPEEGSSEKESEDAPKTSPPTPGKHGLEQTGEEKVMVTVPDKNPPCPCCGTRVNSVLNLIEHLKVSHGKRGVCFRCAKCGKENSNYHSVVCHFKKCRGPETEKAPAGEWICEVCNRDFTTKIGLGQHKRLAHPAVRNQERIVASQPKETSNRGAHKRCWTKEEEELLIRLEAQFEGNKNINKLIAEHITTKTAKQISDKRRLLSRKPAEEPREEPGTCHHTRRAAASLRTEPEMSHHAQAEDRDNGPGRRPLPGRAAAGGRTMDEIRRHPDKGNGQQRPTKQKSEEQLQAYYKKTLEERLSAGALNTFPRAFKQVMEGRDIKLVINQTAQDYFGCLESISQIRTATRDKKDTVTRKKHPKKPFQKWMKKRAIKKGNYLRFQRLFYLDRGKLAKIILDDIECLSCDIPLSEIYSVFKTRWETTGSFKSLGDFKTYGKADNTAFRELITAKEIEKNVQEMSKGSAPGPDGITLGDVVKMDPEFSRTMEIFNLWLTTGKIPDMVRGCRTVLIPKSSDPDRLKDINNWRPITIGSILLRLFSRIVTARLSKACPLNPRQRGFIRAAGCSENLKLLQTIIWSAKREHRPLGVVFVDIAKAFDTVSHQHIIHALQQREVDPHIVGLVSNMYENISTYITTKRNTHTDKIQIRVGVKQGDPMSPLLFNLAMDPLLCKLEESGKGYHRGQSSITAMAFADDLVLLSDSWEGMNTNISILETFCNLTGLKTQGQKCHGFYIKPTKKSYTINDCAAWTINGTPLNMIDPGESEKYLGLQFDPWIGIARSGLSTKLDFWLQRIDQAPLKPLQKLDILKTYTIPRLIYIADHSEVKTALLETLDQKIRTAVKEWLHLPPCTCDAILYSSTRDGGLGITKLAGLIPSVQARRLHRIAQSSDDTMKCFMEKEKMEQLHKKLWIQAGGDRENIPSIWEAPPSSEPPNNVSTNSEWEAPTQKDKFPKPCNWRKNEFKKWTKLASQGRGIVNFERDKISNHWIQYYRRIPHRKLLTALQLRANVYPTREFLARGRQDQYIKACRHCDADIESCAHIIGNCPVTQDARIKRHNKICELLLEEAKKKDWVVFKEPHIRDSNKELYKPDLIFVKDARALVVDVTVRYEAAKSSLEEAAAEKVRKYKHLETEVRHLTNAKDVTFVGFPLGARGKWHQDNFKLLTELGLSKSRQVKMAETFSTVALFSSVDIVHMFASRARKSMVM

SEQ ID NO: 1678 - protein, 1390 aa, synthetic construct
MASCPKPGPPVSAGAMSLESGLTTHSVLAIERGPNSLANSGSDFGGGGLGLPLRLLRVSVGTQTSRSDWVDLVSWSHPGPTSKSQQVDLVSLFPKHRVDLLSKNDQVDLVAQFLPSKFPPNLAENDLALLVNLEFYRSDLHVYECVHFAAHWEGLSGLPEVYEQLAPQPCVGETLHSSLPRDSELFVPEEGSSEKESEDAPKTSPPTPGKHGLEQTGEEKVMVTVPDKNPPCPCCGTRVNSVLNLIEHLKVSHGKRGVCFRCAKCGKENSNYHSVVCHFKKCRGPETEKAPAGEWICEVCNRDFTTKIGLGQHKRLAHPAVRNQERIVASQPKETSNRGAHKRCWTKEEEELLIRLEAQFEGNKNINKLIAEHITTKTAKQISDKRRLLSRKPAEEPREEPGTCHHTRRAAASLRTEPEMSHHAQAEDRDNGPGRRPLPGRAAAGGRTMDEIRRHPDKGNGQQRPTKQKSEEQLQAYYKKTLEERLSAGALNTFPRAFKQVMEGRDIKLVINQTAQDYFGCLESISQIRTATRDKKDTVTRKKHPKKPFQKWMKKRAIKKGNYLRFQRLFYLDRGKLAKIILDDIECLSCDIPLSEIYSVFKTRWETTGSFKSLGDFKTYGKADNTAFRELITAKEIEKNVQEMSKGSAPGPDGITLGDVVKMDPEGSRTMEIFNLWLTTGKIPDMVRGCRTVLIPKSSDPDRLKDINNWRPITIGSILLRLFSRIVTARLSKACPLNPRQRGFIRAAGCSENLKLLQTIIWSAKREHRPLGVVFVDIAKAFDTVSHQHIIHALQQREVDPHIVGLVSNMYENISTYITTKRNTHTDKIQIRVGVKQGDPMSPLLFNLAMDPLLCKLEESGKGYHRGQSSITAMAFADDLVLLSDSWEGMNTNISILETFCNLTGLKTQGQKCHGFYIKPTKKSYTINDCAAWTINGTPLNMIDPGESEKYLGLQFDPWIGIARSGLSTKLDFWLQRIDQAPLKPLQKTDILKTYTIPRLIYIADHSEVKTALLETLDQKIRTAVKEWLHLPPCTCDAILYSSTRDGGLGITKLAGLIPSVQARRLHRIAQSSDDTMKCFMEKEKMEQLHKKLWIQAGGDRENIPSIWEAPPSSEPPNNVSTNSEWEAPTQKDKFPKPCNWRKNEFKKWTKLASQGRGIVNFERDKISNHWIQYYRRIPHRKLLTALQLRANVYPTREFLARGRQDQYIKACRHCDADIESCAHIIGNCPVTQDARIKRHNKICELLLEEAKKKDWVVFKEPHIRDSNKELYKPDLIFVKDARALVVDVTVRYEAAKSSLEEAAAEKVRKYKHLETEVRHLTNAKDVTFVGFPLGARGKWHQDNFKLLTELGLSKSRQVKMAETFSTVALFSSVDIVHMFASRARKSMVM

SEQ ID NO: 1679 - protein, 1390 aa, synthetic construct
MASCPKPGPPVSAGAMSLESGLTTHSVLAIERGPNSLANSGSDFGGGGLGLPLRLLRVSVGTQTSRSDWVDLVSWSHPGPTSKSQQVDLVSLFPKHRVDLLSKNDQVDLVAQFLPSKFPPNLAENDLALLVNLEFYRSDLHVYECVHFAAHWEGLSGLPEVYEQLAPQPCVGETLHSSLPRDSELFVPEEGSSEKESEDAPKTSPPTPGKHGLEQTGEEKVMVTVPDKNPPCPCCGTRVNSVLNLIEHLKVSHGKRGVCFRCAKCGKENSNYHSVVCHFKKCRGPETEKAPAGEWICEVCNRDFTTKIGLGQHKRLAHPAVRNQERIVASQPKETSNRGAHKRCWTKEEEELLIRLEAQFEGNKNINKLIAEHITTKTAKQISDKRRLLSRKPAEEPREEPGTCHHTRRAAASLRTEPEMSHHAQAEDRDNGPGRRPLPGRAAAGGRTMDEIRRHPDKGNGQQRPTKQKSEEQLQAYYKKTLEERLSAGALNTFPRAFKQVMEGRDIKLVINQTAQDYFGCLESISQIRTATRDKKDTVTRKKHPKKPFQKWMKKRAIKKGNYLRFQRLFYLDRGKLAKIILDDIECLSCDIPLSEIYSVFKTRWETTGSFKSLGDFKTYGKADNTAFRELITAKEIEKNVQEMSKGSAPGPDGITLGDVVKMDPEGSRTMEIFNLWLTTGKIPDMVRGCRTVLIPKSSDPDRLKDINNWRPITIGSILLRLFSRIVTARLSKACPLNPRQRGFIRAAGCSENLKLLQTIIWSAKREHRPLGVVFVDIAKAFDTVSHQHIIHALQQREVDPHIVGLVSNMYENISTYITTKRNTHTDKIQIRVGVKQGDPMSPLLFNLAMDPLLCKLEESGKGYHRGQSSITAMAFADDLVLLSDSWENMNTNISILETFCNLTGLKTQGQKCHGFYIKPTKKSYTINDCAAWTINGTPLNMIDPGESEKYLGLQFDPWIGIARSGLSTKLDFWLQRIDQAPLKPLQKLDILKTYTIPRLIYIADHSEVKTALLETLDQKIRTAVKEWLHLPPCTCDAILYSSTRDGGLGITKLAGLIPSVQARRLHRIAQSSDDTMKCFMEKEKMEQLHKKLWIQAGGDRENIPSIWEAPPSSEPPNNVSTNSEWEAPTQKDKFPKPCNWRKNEFKKWTKLASQGRGIVNFERDKISNHWIQYYRRIPHRKLLTALQLRANVYPTREFLARGRQDQYIKACRHCDADIESCAHIIGNCPVTQDARIKRHNKICELLLEEAKKKDWVVFKEPHIRDSNKELYKPDLIFVKDARALVVDVTVRYEAAKSSLEEAAAEKVRKYKHLETEVRHLTNAKDVTFVGFPLGARGKWHQDNFKLLTELGLSKSRQVKMAETFSTVALFSSVDIVHMFASRARKSMVM

SEQ ID NO: 1680 - protein, 1390 aa, synthetic construct
MASCPKPGPPVSAGAMSLESGLTTHSVLAIERGPNSLANSGSDFGGGGLGLPLRLLRVSVGTQTSRSDWVDLVSWSHPGPTSKSQQVDLVSLFPKHRVDLLSKNDQVDLVAQFLPSKFPPNLAENDLALLVNLEFYRSDLHVYECVHFAAHWEGLSGLPEVYEQLAPQPCVGETLHSSLPRDSELFVPEEGSSEKESEDAPKTSPPTPGKHGLEQTGEEKVMVTVPDKNPPCPCCGTRVNSVLNLIEHLKVSHGKRGVCFRCAKCGKENSNYHSVVCHFKKCRGPETEKAPAGEWICEVCNRDFTTKIGLGQHKRLAHPAVRNQERIVASQPKETSNRGAHKRCWTKEEEELLIRLEAQFEGNKNINKLIAEHITTKTAKQISDKRRLLSRKPAEEPREEPGTCHHTRRAAASLRTEPEMSHHAQAEDRDNGPGRRPLPGRAAAGGRTMDEIRRHPDKGNGQQRPTKQKSEEQLQAYYKKTLEERLSAGALNTFPRAFKQVMEGRDIKLVINQTAQDYFGCLESISQIRTATRDKKDTVTRKKHPKKPFQKWMKKRAIKKGNYLRFQRLFYLDRGKLAKIILDDIECLSCDIPLSEIYSVFKTRWETTGSFKSLGDFKTYGKADNTAFRELITAKEIEKNVQEMSKGSAPGPDGITLGDVVKMDPEGSRTMEIFNLWLTTGKIPDMVRGCRTVLIPKSSDPDRLKDINNWRPITIGSILLRLFSRIVTARLSKACPLNPRQRGFIRAAGCSENLKLLQTIIWSAKREHRPLGVVFVDIAKAFDTVSHQHIIHALQQREVDPHIVGLVSNMYENISTYITTKRNTHTDKIQIRVGVKQGDPMSPLLFNLAMDPLLCKLEESGKGYHRGQSSITAMAFADDLVLLSDSWEGMNTNISILETFCNLTGLKTQGQKCHGFYIKPTKKSYTINDCAAWTINGTPLNMIDPGESEKYLGLQFDPWIGIARSGLSTKLDFWLQRIDQAPLKPLQKLDILKTYTIPRLIYIADHSEVKTALLETLDQKIRTAVKEWLHLPPCTCDAILYSSTRDGGLGITKLAGLIPSVQARRLHRIAQSSDDTMKCFMEKEKMEQLHKKLWIQAGGDRENIPSIWEAPPSSEPPNNVSTNSEWEAPTQKDKFPKPCNWRKNEFKKWTKLASQGRGIVNFERDKISNHWIQYYRRIPHRKLLTALQLRANVYPTREFLARGRQDQYIKACRHCDADIESCAHIIGNCPVTQDARIKRHNYICELLLEEAKKKDWVVFKEPHIRDSNKELYKPDLIFVKDARALVVDVTVRYEAAKSSLEEAAAEKVRKYKHLETEVRHLTNAKDVTFVGFPLGARGKWHQDNFKLLTELGLSKSRQVKMAETFSTVALFSSVDIVHMFASRARKSMVM

SEQ ID NO: 1681 - protein, 1390 aa, synthetic construct
MASCPKPGPPVSAGAMSLESGLTTHSVLAIERGPNSLANSGSDFGGGGLGLPLRLLRVSVGTQTSRSDWVDLVSWSHPGPTSKSQQVDLVSLFPKHRVDLLSKNDQVDLVAQFLPSKFPPNLAENDLALLVNLEFYRSDLHVYECVHFAAHWEGLSGLPEVYEQLAPQPCVGETLHSSLPRDSELFVPEEGSSEKESEDAPKTSPPTPGKHGLEQTGEEKVMVTVPDKNPPCPCCGTRVNSVLNLIEHLKVSHGKRGVCFRCAKCGKENSNYHSVVCHFKKCRGPETEKAPAGEWICEVCNRDFTTKIGLGQHKRLWHPAVRNQERIVASQPKETSNRGAHKRCWTKEERELLIRLEAQFEGNKNINKLIAEHITTKTAKQISDKRRLLSRKPAEEPRMMPGTCHHTRRAAASLRTEPEMSHHAQAEDRDNGPGRRPLPGRAAAGGRTMDEIRRHPDKGNGQQRPTKQKSEEQLQAYYKKTLEERLSAGALNTFPRAFKQVMEGRDIKLVINQTAQDCFGCLESISQIRTATRDKKDTVTREKHPKKPFQKWMKKRAIKKGNYLRFQRLFYLDRGKLAKIILDDIECLSCDIPLSEIYSVFKTRWETTGSFKSLGDFKTYGKADNTAFRELITAKEIEKNVQEMSKGSAPGPDGITLGDVVKMDPEGSRTMEIFNLWLTTGKIPDMVRGCRTVLIPKSSDPDRLKDINNWRPITIGSILLRLFSRIVTARLSKACPLNPRQRGFIRAAGCSENLKLLQTIIWSAKREHRPLGVVFVDIAKAFDTVSHQHIIHALQQREVDPHIVGLVSNMYENISTYITTKRNTHTDKIQIRVGVKQGDPMSPLLFNLAMDPLLCKLEESGKGYHRGQSSITAMAFADDLVLLSDSWENMNTNISILETFCNLTGLKTQGQKCHGFYIKPTKKSYTINDCAAWTINGTPLNMIDPGESEKYLGLQFDPWIGIARSGLSTKLDFWLQRIDQAPLKPLQKTDILKTYTIPRLIYIADHSEVKTALLETLDQKIRTAVKEWLHLPPCTCDAILYSSTRDGGLGITKLAGLIPSVQARRLHRIAQSSDDTMKCFMEKEKMEQLHKKLWIQAGGDRENIPSIWEAPPSSEPPNNVSTNSEWEAPTQKDKFPKPCNWRKNEFKKWTKLASQGRGIVNFERDKISNHWIQYYRRIPHRKLLTALQLRANVYPTREFLARGRQDQYIKACRHCDADNESCAHIIGNCPVTQDARIKRHNYICELLLEEAKKKDWVVFKEPHIRDSNKELYKPDLIFVKDARALVVDVTVRYEAAKSSLEEAAAEKVRKYKHLETEVRHLTNAKDVTFVGFPLGARGKWHQDNFKLLTELGLSKSRQVKMAETFSTVALFSSVDIVHMFASRARKSMVM

SEQ ID NO: 1682 - protein, 1390 aa, synthetic construct
MASCPKPGPPVSAGAMSLESGLTTHSVLAIERGPNSLANSGSDFGGGGLGLPLRLLRVSVGTQTSRSDWVDLVSWSHPGPTSKSQQVDLVSLFPKHRVDLLSKNDQVDLVAQFLPSKFPPNLAENDLALLVNLEFYRSDLHVYECVHFAAHWEGLSGLPEVYEQLAPQPCVGETLHSSLPRDSELFVPEEGSSEKESEDAPKTSPPTPGKHGLEQTGEEKVMVTVPDKNPPCPCCGTRVNSVLNLIEHLKVSHGKRGVCFRCAKCGKENSNYHSVVCHFKKCRGPETEKAPAGEWICEVCNRDFTTKIGLGQHKRRWHPAVRNQERIVASQPKETSNRGAHKRCWTKEERELLIRLEAQFEGNKNINKLIAEHITTKTAKQISDKRRLLSRKPAEEPRMMPGTCHHTRRAAASLRTEPEMSHHAQAEDRDNGPGRRPLPGRAAAGGRTMDEIRRHPDKGNGQQRPTKQKSEEQLQAYYKKTLEERLSAGALNTFPRAFKQVMEGRDIKLVINQTAQDCFGCLESISQIRTATRDKKDTVTREKHPKKPFQKWMKKRAIKKGNYLRFQRLFYLDRGKLAKIILDDIECLSCDIPLSEIYSVFKTRWETTGSFKSLGDFKTYGKADNTAFRELITAKEIEKNVQEMSKGSAPGPDGITLGDVVKMDPEGSRTMEIFNLWLTTGKIPDMVRGCRTVLIPKSSKPDRLKDINNWRPITIGSILLRLFSRIVTARLSKACPLNPRQRGFIRAAGCSENLKLLQTIIWSAKREHRPLGVVFVDIAKAFDTVSHQHIIHALQQREVDPHIVGLVSNMYENISTYITTKRNTHTDKIQIRVGVKQGDPMSPLLFNLAMDPLLCKLEESGKGYHRGQSSITAMAFADDLVLLSDSWENMNTNISILETFCNLTGLKTQGQKCHGFYIKPTKKSYTINDCAAWTINGTPLNMIDPGESEKYLGLQFDPWIGIARSGLSTKLDFWLQRIDQAPLKPLQKTDILKTYTIPRLIYIADHSEVKTALLETLDQKIRTAVKEWLHLPPCTCDAILYSSTRDGGLGITKLAGLIPSVQARRLHRIAQSSDDTMKCFMEKEKMEQLHKKLWIQAGGDRENIPSIWEAPPSSEPPNNVSTNSEWEAPTQKDKFPKPCNWRKNEFKKWTKLASQGRGIVNFERDKISNHWIQYYRRIPHRKLLTALQLRANVYPTREFLARGRQDQYIKACRHCDADNESCAHIIGNCPVTQDARIKRHNYICELLLEEAKKKDWVVFKEPHIRDSNKELYKPDLIFVKDARALVVDVTVRYEAAKSSLEEAAAEKVRKYKHLETEVRHLTNAKDVTFVGFPLGARGKWHQDNFKLLTELGLSKSRQVKMAETFSTVALFSSVDIVHMFASRARKSMVM

SEQ ID NO: 1683 - protein, 1390 aa, synthetic construct
MASCPKPGPPVSAGAMSLESGLTTHSVLAIERGPNSLANSGSDFGGGGLGLPLRLLRVSVGTQTSRSDWVDLVSWSHPGPTSKSQQVDLVSLFPKHRVDLLSKNDQVDLVAQFLPSKFPPNLAENDLALLVNLEFYRSDLHVYECVHFAAHWEGLSGLPEVYEQLAPQPCVGETLHSSLPRDSELFVPEEGSSEKESEDAPKTSPPTPGKHGLEQTGEEKVMVTVPDKNPPCPCCGTRVNSVLNLIEHLKVSHGKRGVCFRCAKCGKENSNYHSVVCHFPKCRGPETEKAPAGEWICEVCNRDFTTKIGLGQHKRLAHPAVRNQERIVASQPKETSNRGAHKRCWTKEEEELLIRLEAQFEGNKNINKLIAEHITTKTAKQISDKRRLLSRKPAEEPREEPGTCHHTRRAAASLRTEPEMSHHAQAEDRDNGPGRRPLPGRAAAGGRTMDEIRRHPDKGNGQQRPTKQKSEEQLQAYYKKTLEERLSAGALNTFPRAFKQVMEGRDIKLVINQTAQDCFGCLESISQIRTATRDKKDTVTRKKHPKKPFQKWMKKRAIKKGNYLRFQRLFYLDRGKLAKIILDDIECLSCDIPLSEIYSVFKTRWETTGSFKSLGDFKTYGKADNTAFRELITAKEIEKNVQEMSKGSAPGPDGITLGDVVKMDPEFSRTMEIFNLWLTTGKIPDMVRGCRTVLIPKSSKPDRLKDINNWRPITIGSILLRLFSRIVTARLSKACPLNPRQRGFIRAAGCSENLKLLQTIIWSAKREHRPLGVVFVDIAKAFDTVSHQHIIHALQQREVDPHIVGLVSNMYENISTYITTKRNTHTDKIQIRVGVKQGDPMSPLLFNLAMDPLLCKLEESGKGYHRGQSSITAMAFADDLVLLSDSWEGMNTNISILETFCNLTGLKTQGQKCHGFYIKPTKKSYTINDCAAWTINGTPLNMIDPGESEKYLGLQFDPWIGIARSGLSTKLDFWLQRIDQAPLKPLQKLDILKTYTIPRLIYIADHSEVKTALLETLDQKIRTAVKEWLHLPPCTCDAILYSSTRDGGLGITKLAGLIPSVQARRLHRIAQSSDDTMKCFMEKEKMEQLHKKLWIQAGGDRENIPSIWEAPPSSEPPNNVSTNSEWEAPTQKDKFPKPCNWRKNEFKKWTKLASQGRGIVNFERDKISNHWIQYYRRIPHRKLLTALQLRANVYPTREFLARGRQDQYIKACRHCDADIESCAHIIGNCPVTQDARIKRHNYICELLLEEAKKKDWVVFKEPHIRDSNKELYKPDLIFVKDGRALVVDVTVRYEAAKSSLEEAAAEKVRKYKHLETEVRHLTNAKDVTFVGFPLGARGKWHQDNFKLLTELGLSKSRQVKMAETFSTVALFSSVDIVHMFASRARKSMVM

SEQ ID NO: 1684 - protein, 1390 aa, synthetic construct
MASCPKPGPPVSAGAMSLESGLTTHSVLAIERGPNSLANSGSDFGGGGLGLPLRLLRVSVGTQTSRSDWVDLVSWSHPGPTSKSQQVDLVSLFPKHRVDLLSKNDQVDLVAQFLPSKFPPNLAENDLALLVNLEFYRSDLHVYECVHFAAHWEGLSGLPEVYEQLAPQPCVGETLHSSLPRDSELFVPEEGSSEKESEDAPKTSPPTPGKHGLEQTGEEKVMVTVPDKNPPCPCCGTRVNSVLNLIEHLKVSHGKRGVCFRCAKCGKENSNYHSVVCHFPKCRGPETEKAPAGEWICEVCNRDFTTKIGLGQHKRLAHPAVRNQERIVASQPKETSNRGAHKRCWTKEEEELLIRLEAQFEGNKNINKLIAEHITTKTAKQISDKRRLLSRKPAEEPREEPGTCHHTRRAAASLRTEPEMSHHAQAEDRDNGPGRRPLPGRAAAGGRTMDEIRRHPDKGNGQQRPTKQKSEEQLQAYYKKTLEERLSAGALNTFPRAFKQVMEGRDIKLVINQTAQDCFGCLESISQIRTATRDKKDTVTRKKHPKKPFQKWMKKRAIKKGNYLRFQRLFYLDRGKLAKIILDDIECLSCDIPLSEIYSVFKTRWETTGSFKSLGDFKTYGKADNTAFRELITAKEIEKNVQEMSKGSAPGPDGITLGDVVKMDPEFSRTMEIFNLWLTTGKIPDMVRGCRTVLIPKSSKPDRLKDINNWRPITIGSILLRLFSRIVTARLSKACPLNPRQRGFIRAAGCSENLKLLQTIIWSAKREHRPLGVVFVDIAKAFDTVSHQHIIHALQQREVDPHIVGLVSNMYENISTYITTKRNTHTDKIQIRVGVKQGDPMSPLLFNLAMDPLLCKLEESGKGYHRGQSSITAMAFADDLVLLSDSWEGMNTNISILETFCNLTGLKTQGQKCHGFYIKPTKKSYTINDCAAWTINGTPLNMIDPGESEKYLGLQFDPWIGIARSGLSTKLDFWLQRIDQAPLKPLQKLDILKTYTIPRLIYIADHSEVKTALLETLDQKIRTAVKEWLHLPPCTCDAILYSSTRDGGLGITKLAGLIPSVQARRLHRIAQSSDDTMKCFMEKEKMEQLHKKLWIQAGGDRENIPSIWEAPPSSEPPNNVSTNSEWEAPTQKDKFPKPCNWRKNEFKKWTKLASQGRGIVNFERDKISNHWIQYYRRIPHRKLLTALQLRANVYPTREFLARGRQDQYIKACRHCDADNESCAHIIGNCPVTQDARIKRHNYICELLLEEAKKKDWVVFKEPHIRDSNKELYKPDLIFVKDARALVVDVTVRYEAAKSSLEEAAAEKVRKYKHLETEVRHLTNAKDVTFVGFPLGARGKWHQDNFKLLTELGLSKSRQVKMAETFSTVALFSSVDIVHMFASRARKSMVM

SEQ ID NO: 1685 - protein, 1390 aa, synthetic construct
MASCPKPGPPVSAGAMSLESGLTTHSVLAIERGPNSLANSGSDFGGGGLGLPLRLLRVSVGTQTSRSDWVDLVSWSHPGPTSKSQQVDLVSLFPKHRVDLLSKNDQVDLVAQFLPSKFPPNLAENDLALLVNLEFYRSDLHVYECVHFAAHWEGLSGLPEVYEQLAPQPCVGETLHSSLPRDSELFVPEEGSSEKESEDAPKTSPPTPGKHGLEQTGEEKVMVTVPDKNPPCPCCGTRVNSVLNLIEHLKVSHGKRGVCFRCAKCGKENSNYHSVVCHFPKCRGPETEKAPAGEWICEVCNRDFTTKIGLGQHKRLAHPAVRNQERIVASQPKETSNRGAHKRCWTKEEEELLIRLEAQFEGNKNINKLIAEHITTKTAKQISDKRRLLSRKPAEEPREEPGTCHHTRRAAASLRTEPEMSHHAQAEDRDNGPGRRPLPGRAAAGGRTMDEIRRHPDKGNGQQRPTKQKSEEQLQAYYKKTLEERLSAGALNTFPRAFKQVMEGRDIKLVINQTAQDCFGCLESISQIRTATRDKKDTVTRKKHPKKPFQKWMKKRAIKKGNYLRFQRLFYLDRGKLAKIILDDIECLSCDIPLSEIYSVFKTRWETTGSFKSLGDFKTYGKADNTAFRELITAKEIEKNVQEMSKGSAPGPDGITLGDVVKMDPEFSRTMEIFNLWLTTGKIPDMVRGCRTVLIPKSSKPDRLKDINNWRPITIGSILLRLFSRIVTARLSKACPLNPRQRGFIRAAGCSENLKLLQTIIWSAKREHRPLGVVFVDIAKAFDTVSHQHIIHALQQREVDPHIVGLVSNMYENISTYITTKRNTHTDKIQIRVGVKQGDPMSPLLFNLAMDPLLCKLEESGKGYHRGQSSITAMAFADDLVLLSDSWEGMNTNISILETFCNLTGLKTQGQKCHGFYIKPTKKSYTINDCAAWTINGTPLNMIDPGESEKYLGLQFDPWIGIARSGLSTKLDFWLQRIDQAPLKPLQKLDILKTYTIPRLIYIADHSEVKTALLETLDQKIRTAVKEWLHLPPCTCDAILYSSTRDGGLGITKLAGLIPSVQARRLHRIAQSSDDTMKCFMEKEKMEQLHKKLWIQAGGDRENIPSIWEAPPSSEPPNNVSTNSEWEAPTQKDKFPKPCNWRKNEFKKWTKLASQGRGIVNFERDKISNHWIQYYRRIPHRKLLTALQLRANVYPTREFLARGRQDQYIKACRHCDADIESCAHIIGNCPVTQDARIKRHNKICELLLEEAKKKDWVVFKEPHIRDSNKELYKPDLIFVKDARALVVDVTVRYEAAKSSLEEAAAEKVRKYKHLETEVRHLTNAKDVTFVGFPLGARGKWHQDNFKLLTELGLSKSRQVKMAETFSTVALFSSVDIVHMFASRARKSMVM

SEQ ID NO: 1686 - protein, 1390 aa, synthetic construct
MASCPKPGPPVSAGAMSLESGLTTHSVLAIERGPNSLANSGSDFGGGGLGLPLRLLRVSVGTQTSRSDWVDLVSWSHPGPTSKSQQVDLVSLFPKHRVDLLSKNDQVDLVAQFLPSKFPPNLAENDLALLVNLEFYRSDLHVYEGVHKAAHWEGLSGLPEVYEQLAPQPCVGETLHSSLPRDSELFVPEEGSSEKESEDAPKTSPPTPGKHGLEQTGEEKVMVTVPDKNPPCPCCGTRVNSVLNLIEHLKVSHGKRGVCFRCAKCGKENSNYHSVVCHFKKCRGPETEKAPAGEWICEVCNRDFTTKIGLGQHKRRAHPAVRNQERIVASQPKETSNRGAHKRCWTKEEEELLIRLEAQFEGNKNINKLIAEHITTKTAKQISDKRRLLSRKPAEEPREEPGTCHHTRRAAASLRTEPEMSHHAQAEDRDNGPGRRPLPGRAAAGGRTMDEIRRHPDKGNGQQRPTKQKSEEQLQAYYKKTLEERLSAGALNTFPRAFKQVMEGRDIKLVINQTAQDYFGCLESISQIRTATRDKKDTVTRKKHPKKPFQKWMKKRAIKKGNYLRFQRLFYLDRGKLAKIILDDIECLSCDIPLSEIYSVFKTRWETTGSFKSLGDFKTYGKADNTAFRDLITAKEIEKNVQEMSKGSAPGPDGITLGDVVKMDPEGSRTMEIFNLWLTTGKIPDMVRGCRTVLIPKSSDPDRLKDINNWRPITIGSILLRLFSRIVTARLSKACPLNPRQRGFIRAAGCSENLKLLQTIIWSAKREHRPLGVVFVDIAKAFDTVSHQHIIHALQQREVDPHIVGLVSNMYENISTYITTKRNTHTDKIQIRVGVKQGDPMSPLLFNLAMDPLLCKLEESGKGYHRGQSSITAMAFADDLVLLSDSWEGMNTNISILETFCNLTGLKTQGQKCHGFYIKPTKKSYTINDCAAWTINGTPLNMIDPGESEKYLGLQFDPWIGIARSGLSTKLDFWLQRIDQAPLKPLQKLDILKTYTIPRLIYIADHSEVKTALLETLDQKIRTAVKEWLHLPPCTCDAILYSSTRDGGLGITKLAGLIPSVQARRLHRIAQSSDDTMKCFMEKEKMEQLHKKLWIQAGGDRENIPSIWEAPPSSEPPNNVSTNSEWEAPTQKDKFPKPCNWRKNEFKKWTKLASQGRGIVNFERDKISNHWIQYYRRIPHRKLLTALQLRANVYPTREFLARGRQDQYIKACRHCDADIESCAHIIGNCPVTQDARIKRHNKICELLLEEAKKKDWVVFKEPHIRDSNKELYKPDLIFVKDARALVVDVTVRYEAAKSSLEEAAAEKVRKYKHLETEVRHLTNAKDVTFVGFPLGARGKWHQDNFKLLTELGLSKSRQVKMAETFSTVALFSSVDIVHMFASRARKSMVM

SEQ ID NO: 1687 - protein, 1390 aa, synthetic construct; identical to SEQ ID NO: 234

SEQ ID NO: 1688 - protein, 1390 aa, synthetic construct
MASCPKPGPPVSAGAMSLESGLTTHSVLAIERGPNSLANSGSDFGGGGLGLPLRLLRVSVGTQTSRSDWVDLVSWSHPGPTSKSQQVDLVSLFPKHRVDLLSKNDQVDLVAQFLPSKFPPNLAENDLALLVNLEFYRSDLHVYECVHKAAHWEGLSGLPEVYEQLAPQPCVGETLHSSLPRDSELFVPEEGSSEKESEDAPKTSPPTPGKHGLEQTGEEKVMVTVPDKNPPCPCCGTRVNSVLNLIEHLKVSHGKRGVCFRCAKCGKENSNYHSVVCHFKKCRGPETEKAPAGEWICEVCNRDFTTKIGLGQHKRLAHPAVRNQERIVASQPKETSNRGAHKRCWTKEEEELLIRLEAQFEGNKNINKLIAEHITTKTAKQISDKRRLLSRKPAEEPREEPGTCHHTRRAAASLRTEPEMSHHAQAEDRDNGPGRRPLPGRAAAGGRTMDEIRRHPDKGNGQQRPTKQKSEEQLQAYYKKTLEERLSAGALNTFPRAFKQVMEGRDIKLVINQTAQDCFGCLESISQIRTATRDKKYTVTREKHPKRPFQKWMKKRAIKKGNYLRFQRLFYLDRGKLAKIILDDIECLSCDIPLSEIYSVFKTRWETTGSFKSLGDFKTYGKADNTAFRELITAKEIEKNVQEMSKGSAPGPDGITLGDVVKMDPEFSLTMEIFNLWLTTGKIPDMVRGCRTVLIPKSSKPDRLKDINNWRPITIGSILLRLFSRIVTARLSKACPLNPRQRGFIRAAGCSENLKLLQTIIWSAKREHRPLGVVFVDIAKAFDTVSHQHIIHALQQREVDPHIVGLVSNMYENISTYITTKRNTHTDKIQIRVGVKQGDPMSPLLFNLAMDPLLCKLEESGKGYHRGQSSITAMAFADDLVLLSDSWENMNTNISILETFCNLTGLKTQGQKCHGFYIKPTKDSYTINDCAAWTINGTPLNMIDPGESEKYLGLQFDPWIGIARSGLSTKLDEWLQRIDQAPLKPLQKTDILKTYTIPRLIYIADHSEVKAALLETLDQKIRTAVKEWLHLPPCTCDAILYSSTRDGGLGITKLAGLIPSVQARRLHRIAQSSDDTMKCFMEKERMEQLHKKLWIQAGGDRENIPSIWEAPPSSEPPNNVSTNSEWEAPTQKPKFPKPCNWRKNEFKKWTKLASQGRGIVNFERDKISNHWIQYYRRIPHRKLLTALQLRANVYPTREFLARGRQDQYIKACRHCDADIESCAHIIGNCPVTQDARIKRHNYICELLLEEAKKKDWVVFKEPHIRDSNKELYKPDLIFVKDARALVVDVTVRYEAAKSSLEEAAAEKVRKYKHLETEVRHLTNAKDVTFVGFPLGARGKWHQDNFKLLTELGLSKSRQVKMAETFSTVALFSSVDIVHMFASRARKSMVM

SEQ ID NO: 1689 - protein, 1671 aa, synthetic construct
MGTALTPLLTKFATRYEMGTTPEEVANTLKQTCFKGQVNDSQMVALLIVADQYKLNPFTKELYAFPDKNNGIVPVVGVDGWARIINENPQFDGMEFSMDQQGTECTCKIYRKDRSHAISATEYMAECKRNTQPWQSHPRRMLRHKAMIQCARLAFGFAGIYDQDEAERIVERDVTPAEQYEDVSEAICLIKDSPTMEDLQAAFSNAWKAYKTKGARDQLTAAKDQRKKELLDAPIDVEFEETGDDRAASGGSSGGSSGSETPGTSESATPESSGGSSGGSSMASCPKPGPPVSAGAMSLESGLTTHSVLAIERGPNSLANSGSDFGGGGLGLPLRLLRVSVGTQTSRSDWVDLVSWSHPGPTSKSQQVDLVSLFPKHRVDLLSKNDQVDLVAQFLPSKFPPNLAENDLALLVNLEFYRSDLHVYECVHKAAHWEGLSGLPEVYEQLAPQPCVGETLHSSLPRDSELFVPEEGSSEKESEDAPKTSPPTPGKHGLEQTGEEKVMVTVPDKNPPCPCCGTRVNSVLNLIEHLKVSHGKRGVCFRCAKCGKENSNYHSVVCHFPKCRGPETEKAPAGEWICEVCNRDFTTKIGLGQHKRLAHPAVRNQERIVASQPKETSNRGAHKRCWTKEEEELLIRLEAQFEGHKNINKLIAEHITTKTAKQISDKRRLLSRKPAEEPREEPGTCHHTRRAAASLRTEPEMSHHAQAEDRDNGPGRRPLPGRAAAGGRTMDEIRRHPDKGNGQQRPTKQKSEEQLQAYYKKTLEERLSAGALNTFPRAFKQVMEGRDIKLVINQTAQDCFGCLESISQIRTATRDKKYTVTREKHPKRPFQKWMKDRAIKKGNYLRFQRLFYLDRGKLAKIILDDIECLSCDIPLSEIYSVFKTRWETTGSFKSLGDFKTYGKADNTAFRELITAKEIEKNVQEMSKGSAPGPDGITLGDVVKMDPEFSLTMEIFNLWLTTGKIPDMVRGCRTVLIPKSSKPDRLKDINNWRPITIGSILLRLFSRIVTARLSKACPLNPRQRGFIRAAGCSENLKLLQTIIWSAKREHRPLGVVFVDIAKAFDTVSHQHIIHALQQREVDPHIVGLVSNMYENISTYITTKRNTHTDKIQIRVGVKQGDPMSPLLFNLAMDPLLCKLEESGKGYHRGQSSITAMAFADDLVLLSDSWENMNTNISILETFCNLTGLKTQGQKCHGFYIKPTKDSYTINDCAAWTINGTPLNMIDPGESEKYLGLQFDPWIGIARSGLSTKLDEWLQRIDQAPLKPLQKTDILKTYTIPRLIYIADHSEVKAALLETLDQKIRTAVKEWLHLPPCTCDAILYSSTRDGGLGITKLAGLIPSVQARRLHRIAQSSDDTMKCFMEKERMEQLHKKLWIQAGGDRENIPSIWEAPPSSEPPNNVSTNSEWEAPTQKPKFPKPCNWRKNEFKKWTKLASQGRGIVNFERDKISNHWIQYYRRIPHRKLLTALQLRANVYPTREFLARGRQDQYIKACRHCDADIESCAHIIGNCPVTQDARIKRHNYICELLLEEAKKKDWVVFKEPHIRDSNKELYKPDLIFVKDGRALVVDVTVRYEAAKSSLEEAAAEKVRKYKHLETEVRHLTNAKDVTFVGFPLGARGKWHQDNFKLLTELGLSKSRQVKMAETFSTVALFSSVDIVHMFASRARKSMVM

SEQ ID NO: 1690 - protein, 1550 aa, synthetic construct
MAPKKKRKVNISGSSCGSPNSADTSSDFKDLWTKLKECHDREVQGLQVKVTKLKQERILDAQRLEEFFTKNQQLREQQKVLHETIKVLEDRLRAGLCDRCAVTEEHMRKKQQEFENIRQQNLKLITELMNERNTLQEENKKLSEQLQQKIENDQQHQAAELECEEDVIPDSPITAFSFSGVNRLRRKENPHVRYIEQTHTKLEHSVCANEMRKVSKSSTHPQHNPNENEILVADTYDQSQSPMAKAHGTSSYTPDKSSFNLATVVAETLGLGVQEESETQGPMSPLGDELYHCLEGNHKKQPFESGSETPGTSESATPEGSYEQLAPQPCVGETLHSSLPRDSELFVPEEGSSEKESEDAPKTSPPTPGKHGLEQTGEEKVMVTVPDKNPPCPCCGTRVNSVLNLIEHLKVSHGKRGVCFRCAKCGKENSNYHSVVCHFKKCRGPETEKAPAGEWICEVCNRDFTTKIGLGQHKRLAHPAVRNQERIVASQPKETSNRGAHKRCWTKEEEELLIRLEAQFEGNKNINKLIAEHITTKTAKQISDKRRLLSRKPAEEPRMEPGTCHHTRRAAASLRTEPEMSHHAQAEDRDNGPGRRPLPGRAAAGGRTMDEIRRHPDKGNGQQRPTKQKSEEQLQAYYKKTLEERLSAGALNTFPRAFKQVMEGRDIKLVINQTAQDCFGCLESISQIRTATRDKKDTVTREKHPKKPFQKWMKKRAIKKGNYLRFQRLFYLDRGKLAKIILDDIECLSCDIPLSEIYSVFKTRWETTGSFKSLGDFKTYGKADNTAFRELITAKEIEKNVQEMSKGSAPGPDGITLGDVVKMDPEFSRTMEIFNLWLTTGKIPDMVRGCRTVLIPKSSKPDRLKDINNWRPITIGSILLRLFSRIVTARLSKACPLNPRQRGFIRAAGCSENLKLLQTIIWSAKREHRPLGVVFVDIAKAFDTVSHQHIIHALQQREVDPHIVGLVSNMYENISTYITTKRNTHTDKIQIRVGVKQGDPMSPLLFNLAMDPLLCKLEESGKGYHRGQSSITAMAFADDLVLLSDSWENMNTNISILETFCNLTGLKTQGQKCHGFYIKPTKKSYTINDCAAWTINGTPLNMIDPGESEKYLGLQFDPWIGIARSGLSTKLDFWLQRIDQAPLKPLQKTDILKTYTIPRLIYIADHSEVKSALLETLDQKIRTAVKEWLHLPPCTCDAILYSSTRDGGLGITKLAGLIPSVQARRLHRIAQSSDDTMKCFMEKEKMEQLHKKLWIQAGGDRENIPSIWEAPPSSEPPNNVSTNSEWEAPTQKDKFPKPCNWRKNEFKKWTKLASQGRGIVNFERDKISNHWIQYYRRIPHRKLLTALQLRANVYPTREFLARGRQDQYIKACRHCDADNESCAHIIGNCPVTQDARIKRHNYICELLLEEAKKKDWVVFKEPHIRDSNKELYKPDLIFVKDGRALVVDVTVRYEAAKSSLEEAAAEKVRKYKHLETEVRHLTNAKDVTFVGFPLGARGKWHQDNFKLLTELGLSKSRQVKMAETFSTVALFSSVDIVHMFASRARKSMVM

SEQ ID NO: 1691 - protein, 1390 aa, synthetic construct
MASCPKPGPPVSAGAMSLESGLTTHSVLAIERGPNSLANSGSDFGGGGLGLPLRLLRVSVGTQTSRSDWVDLVSWSHPGPTSKSQQVDLVSLFPKHRVDLLSKNDQVDLVAQFLPSKFPPNLAENDLALLVNLEFYRSDLHVYEGVHKAAHWEGLSGLPEVYEQLAPQPCVGETLHSSLPRDSELFVPEEGSSEKESEDAPKTSPPTPGKHGLEQTGEEKVMVTVPDKNPPCPCCGTRVNSVLNLIEHLKVSHGKRGVCFRCAKCGKENSNYHSVVCHFKKCRGPETEKAPAGEWICEVCNRDFTTKIGLGQHKRLAHPAVRNQERIVASQPKETSNRGAHKRCWTKEEEELLIRLEAQFEGNKNINKLIAEHITTKTAKQISDKRRLLSRKPAEEPRMEPGTCHHTRRAAASLRTEPEMSHHAQAEDRDNGPGRRPLPGRAAAGGRTMDEIRRHPDKGNGQQRPTKQKSEEQLQAYYKKTLEERLSAGALNTFPRAFKQVMEGRDIKLVINQTAQDCFGCLESISQIRTATRDKKDTVTREKHPKKPFQKWMKKRAIKKGNYLRFQRLFYLDRGKLAKIILDDIECLSCDIPLSEIYSVFKTRWETTGSFKSLGDFKTYGKADNTAFRELITAKEIEKNVQEMSKGSAPGPDGITLGDVVKMDPEFSRTMEIFNLWLTTGKIPDMVRGCRTVLIPKSSKPDRLKDINNWRPITIGSILLRLFSRIVTARLSKACPLNPRQRGFIRAAGCSENLKLLQTIIWSAKREHRPLGVVFVDIAKAFDTVSHQHIIHALQQREVDPHIVGLVSNMYENISTYITTKRNTHTDKIQIRVGVKQGDPMSPLLFNLAMDPLLCKLEESGKGYHRGQSSITAMAFADDLVLLSDSWENMNTNISILETFCNLTGLKTQGQKCHGFYIKPTKKSYTINDCAAWTINGTPLNMIDPGESEKYLGLQFDPWIGIARSGLSTKLDFWLQRIDQAPLKPLQKTDILKTYTIPRLIYIADHSEVKSALLETLDQKIRTAVKEWLHLPPCTCDAILYSSTRDGGLGITKLAGLIPSVQARRLHRIAQSSDDTMKCFMEKEKMEQLHKKLWIQAGGDRENIPSIWEAPPSSEPPNNVSTNSEWEAPTQKDKFPKPCNWRKNEFKKWTKLASQGRGIVNFERDKISNHWIQYYRRIPHRKLLTALQLRANVYPTREFLARGRQDQYIKACRHCDADNESCAHIIGNCPVTQDARIKRHNYICELLLEEAKKKDWVVFKEPHIRDSNKELYKPDLIFVKDGRALVVDVTVRYEAAKSSLEEAAAEKVRKYKHLETEVRHLTNAKDVTFVGFPLGARGKWHQDNFKLLTELGLSKSRQVKMAETFSTVALFSSVDIVHMFASRARKSMVM

SEQ ID NO: 1692 - protein, 1834 aa, synthetic construct
MAPKKKRKVNISGSSCGSPNSADTSSDFKDLWTKLKECHDREVQGLQVKVTKLKQERILDAQRLEEFFTKNQQLREQQKVLHETIKVLEDRLRAGLCDRCAVTEEHMRKKQQEFENIRQQNLKLITELMNERNTLQEENKKLSEQLQQKIENDQQHQAAELECEEDVIPDSPITAFSFSGVNRLRRKENPHVRYIEQTHTKLEHSVCANEMRKVSKSSTHPQHNPNENEILVADTYDQSQSPMAKAHGTSSYTPDKSSFNLATVVAETLGLGVQEESETQGPMSPLGDELYHCLEGNHKKQPFESGSETPGTSESATPEGSPKRKVSSAEGAAKEEPKRRSARLSAKPPAKVEAKPKKAAAKDKSSDKKVQTKGKRGAKGKQAEVANQETKEDLPAENGETKTEESPASDEAGEKEAKSDSGSETPGTSESATPESASCPKPGPPVSAGAMSLESGLTTHSVLAIERGPNSLANSGSDFGGGGLGLPLRLLRVSVGTQTSRSDWVDLVSWSHPGPTSKSQQVDLVSLFPKHRVDLLSKNDQVDLVAQFLPSKFPPNLAENDLALLVNLEFYRSDLHVYECVHFAAHWEGLSGLPEVYEQLAPQPCVGETLHSSLPRDSELFVPEEGSSEKESEDAPKTSPPTPGKHGLEQTGEEKVMVTVPDKNPPCPCCGTRVNSVLNLIEHLKVSHGKRGVCFRCAKCGKENSNYHSVVCHFKKCRGPETEKAPAGEWICEVCNRDFTTKIGLGQHKRLAHPAVRNQERIVASQPKETSNRGAHKRCWTKEEEELLIRLEAQFEGNKNINKLIAEHITTKTAKQISDKRRLLSRKPAEEPREEPGTCHHTRRAAASLRTEPEMSHHAQAEDRDNGPGRRPLPGRAAAGGRTMDEIRRHPDKGNGQQRPTKQKSEEQLQAYYKKTLEERLSAGALNTFPRAFKQVMEGRDIKLVINQTAQDCFGCLESISQIRTATRDKKDTVTREKHPKKPFQKWMKKRAIKKGNYLRFQRLFYLDRGKLAKIILDDIECLSCDIPLSEIYSVFKTRWETTGSFKSLGDFKTYGKADNTAFRELITAKEIEKNVQEMSKGSAPGPDGITLGDVVKMDPEFSRTMEIFNLWLTTGKIPDMVRGCRTVLIPKSSKPDRLKDINNWRPITIGSILLRLFSRIVTARLSKACPLNPRQRGFIRAAGCSENLKLLQTIIWSAKREHRPLGVVFVDIAKAFDTVSHQHIIHALQQREVDPHIVGLVSNMYENISTYITTKRNTHTDKIQIRVGVKQGDPMSPLLFNLAMDPLLCKLEESGKGYHRGQSSITAMAFADDLVLLSDSWENMNTNISILETFCNLTGLKTQGQKCHGFYIKPTKDSYTINDCAAWTINGTPLNMIDPGESEKYLGLQFDPWIGIARSGLSTKLDFWLQRIDQAPLKPLQKTDILKTYTIPRLIYIADHSEVKSALLETLDQKIRTAVKEWLHLPPCTCDAILYSSTRDGGLGITKLAGLIPSVQARRLHRIAQSSDDTMKCFMEKEKMEQLHKKLWIQAGGDRENIPSIWEAPPSSEPPNNVSTNSEWEAPTQKDKFPKPCNWRKNEFKKWTKLASQGRGIVNFERDKISNHWIQYYRRIPHRKLLTALQLRANVYPTREFLARGRQDQYIKACRHCDADIESCAHIIGNCPVTQDARIKRHNYICELLLEEAKKKDWVVFKEPHIRDSNKELYKPDLIFVKDARALVVDVTVRYEAAKSSLEEAAAEKVRKYKHLETEVRHLTNAKDVTFVGFPLGARGKWHQDNFKLLTELGLSKSRQVKMAETFSTVALFSSVDIVHMFASRARKSMVMRKKRRQRRR

SEQ ID NO: 1693 - protein, 1390 aa, synthetic construct
MASCPKPGPPVSAGAMSLESGLTTHSVLAIERGPNSLANSGSDFGGGGLGGPLRLLRVSVGTQTSRSDWVDLVSWSHPGPTSKSQQVDLVSLFPKHRVDLLSKNDQVDLVAQFLPSKFPPNLAENDLALLVNLEFYRSDLHVYECVHKAAHWEGLSGLPEVYEQLAPQPCVGETLHSSLPRDSELFVPEEGSSEKESEDAPKTSPPTPGKHGLEQTGEEKVMVTVPDKNPPCPCCGTRVNSVLNLIEHLKVSHGKRGVCFRCAKCGKENSNYHSVVCHFKKCRGPETEKAPAGEWICEVCNRDFTTKIGLGQHKRLAHPAVRNQERIVASQPKETSNRGAHKRCWTKEEEELLIRLEAQFEGNKNINKLIAEHITTKTAKQISDKRRLLSRKPAEEPRMEPGTCHHTRRAAASLRTEPEMSHHAQAEDRDNGPGRRPLPGRAAAGGRTMDEIRRHPDKGNGQQRPTKQKSEEQLQAYYKKTLEERLSAGALNTFPRAFKQVMEGRDIKLVINQTAQDCFGCLESISQIRTATRDKKDTVTREKHPKKPFQKWMKKRAIKKGNYLRFQRLFYLDRGKLAKIILDDIECLSCDIPLSEIYSVFKTRWETTGSFKSLGDFKTYGKADNTAFRELITAKEIEKNVQEMSKGSAPGPDGITLGDVVKMDPEFSRTMEIFNLWLTTGKIPDMVRGCRTVLIPKSSKPDRLKDINNWRPITIGSILLRLFSRIVTARLSKACPLNPRQRGFIRAAGCSENLKLLQTIIWSAKREHRPLGVVFVDIAKAFDTVSHQHIIHALQQREVDPHIVGLVSNMYENISTYITTKRNTHTDKIQIRVGVKQGDPMSPLLFNLAMDPLLCKLEESGKGYHRGQSSITAMAFADDLVLLSDSWENMNTNISILETFCNLTGLKTQGQKCHGFYIKPTKKSYTINDCAAWTINGTPLNMIDPGESEKYLGLQFDPWIGIARSGLSTKLDFWLQRIDQAPLKPLQKTDILKTYTIPRLIYIADHSEVKSALLETLDQKIRTAVKEWLHLPPCTCDAILYSSTRDGGLGITKLAGLIPSVQARRLHRIAQSSDDTMKCFMEKEKMEQLHKKLWIQAGGDRENIPSIWEAPPSSEPPNNVSTNSEWEAPTQKDKFPKPCNWRKNEFKKWTKLASQGRGIVNFERDKISNHWIQYYRRIPHRKLLTALQLRANVYPTREFLARGRQDQYIKACRHCDADNESCAHIIGNCPVTQDARIKRHNYICELLLEEAKKKDWVVFKEPHIRDSNKELYKPDLIFVKDGRALVVDVTVRYEAAKSSLEEAAAEKVRKYKHLETEVRHLTNAKDVTFVGFPLGARGKWHQDNFKLLTELGLSKSRQVKMAETFSTVALFSSVDIVHMFASRARKSMVM

SEQ ID NO: 1694 - protein, 1390 aa, synthetic construct
MASCPKPGPPVSAGAMSLESGLTTHSVLAIERGPNSLANSGSDFGGGGLGLPLRLLRVSVGTQTSRSDWVDLVSWSHPGPTSKSQQVDLVSLFPKHRVDLLSKNDQVDLVAQFLPSKFPPNLAENDLALLVNLEFYRSDLHVYECVHKAAHWEGLSGLPEVYEQLAPQPCVGETLHSSLPRDSELFVPEEGSSEKESEDAPKTSPPTPGKHGREQTGEEKVMVTVPDKNPPCPCCGTRVNSVLNLIEHLKVSHGKRGVCFRCAKCGKENSNYHSVVCHFKKCRGPETEKAPAGEWICEVCNRDFTTKIGLGQHKRLAHPAVRNQERIVASQPKETSNRGAHKRCWTKEEEELLIRLEAQFEGNKNINKLIAEHITTKTAKQISDKRRLLSRKPAEEPRMEPGTCHHTRRAAASLRTEPEMSHHAQAEDRDNGPGRRPLPGRAAAGGRTMDEIRRHPDKGNGQQRPTKQKSEEQLQAYYKKTLEERLSAGALNTFPRAFKQVMEGRDIKLVINQTAQDCFGCLESISQIRTATRDKKDTVTREKHPKKPFQKWMKKRAIKKGNYLRFQRLFYLDRGKLAKIILDDIECLSCDIPLSEIYSVFKTRWETTGSFKSLGDFKTYGKADNTAFRELITAKEIEKNVQEMSKGSAPGPDGITLGDVVKMDPEFSRTMEIFNLWLTTGKIPDMVRGCRTVLIPKSSKPDRLKDINNWRPITIGSILLRLFSRIVTARLSKACPLNPRQRGFIRAAGCSENLKLLQTIIWSAKREHRPLGVVFVDIAKAFDTVSHQHIIHALQQREVDPHIVGLVSNMYENISTYITTKRNTHTDKIQIRVGVKQGDPMSPLLFNLAMDPLLCKLEESGKGYHRGQSSITAMAFADDLVLLSDSWENMNTNISILETFCNLTGLKTQGQKCHGFYIKPTKKSYTINDCAAWTINGTPLNMIDPGESEKYLGLQFDPWIGIARSGLSTKLDFWLQRIDQAPLKPLQKTDILKTYTIPRLIYIADHSEVKSALLETLDQKIRTAVKEWLHLPPCTCDAILYSSTRDGGLGITKLAGLIPSVQARRLHRIAQSSDDTMKCFMEKEKMEQLHKKLWIQAGGDRENIPSIWEAPPSSEPPNNVSTNSEWEAPTQKDKFPKPCNWRKNEFKKWTKLASQGRGIVNFERDKISNHWIQYYRRIPHRKLLTALQLRANVYPTREFLARGRQDQYIKACRHCDADNESCAHIIGNCPVTQDARIKRHNYICELLLEEAKKKDWVVFKEPHIRDSNKELYKPDLIFVKDGRALVVDVTVRYEAAKSSLEEAAAEKVRKYKHLETEVRHLTNAKDVTFVGFPLGARGKWHQDNFKLLTELGLSKSRQVKMAETFSTVALFSSVDIVHMFASRARKSMVM

SEQ ID NO: 1695 - protein, 1396 aa, synthetic construct
MKKKSKKASCPKPGPPVSAGAMSLESGLTTHSVLAIERGPNSLANSGSDFGGGGLGLPLRLLRVSVGTQTSRSDWVDLVSWSHPGPTSKSQQVDLVSLFPKHRVDLLSKNDQVDLVAQFLPSKFPPNLAENDLALLVNLEFYRSDLHVYECVHKAAHWEGLSGLPEVYEQLAPQPCVGETLHSSLPRDSELFVPEEGSSEKESEDAPKTSPPTPGKHGLEQTGEEKVMVTVPDKNPPCPCCGTRVNSVLNLIEHLKVSHGKRGVCFRCAKCGKENSNYHSVVCHFKKCRGPETEKAPAGEWICEVCNRDFTTKIGLGQHKRLAHPAVRNQERIVASQPKETSNRGAHKRCWTKEEEELLIRLEAQFEGNKNINKLIAEHITTKTAKQISDKRRLLSRKPAEEPRMEPGTCHHTRRAAASLRTEPEMSHHAQAEDRDNGPGRRPLPGRAAAGGRTMDEIRRHPDKGNGQQRPTKQKSEEQLQAYYKKTLEERLSAGALNTFPRAFKQVMEGRDIKLVINQTAQDYFGCLESISQIRTATRDKKDTVTREKHPKKPFQKWMKKRAIKKGNYLRFQRLFYLDRGKLAKIILDDIECLSCDIPLSEIYSVFKTRWETTGSFKSLGDFKTYGKADNTAFRELITAKEIEKNVQEMSKGSAPGPDGITLGDVVKMDPEFSRTMEIFNLWLTTGKIPDMVRGCRTVLIPKSSDPDRLKDINNWRPITIGSILLRLFSRIVTARLSKACPLNPRQRGFIRAAGCSENLKLLQTIIWSAKREHRPLGVVFVDIAKAFDTVSHQHIIHALQQREVDPHIVGLVSNMYENISTYITTKRNTHTDKIQIRVGVKQGDPMSPLLFNLAMDPLLCKLEESGKGYHRGQSSITAMAFADDLVLLSDSWENMNTNISILETFCNLTGLKTQGQKCHGFYIKPTKKSYTINDCAAWTINGTPLNMIDPGESEKYLGLQFDPWIGIARSGLSTKLDFWLQRIDQAPLKPLQKTDILKTYTIPRLIYIADHSEVKSALLETLDQKIRTAVKEWLHLPPCTCDAILYSSTRDGGLGITKLAGLIPSVQARRLHRIAQSSDDTMKCFMEKEKMEQLHKKLWIQAGGDRENIPSIWEAPPSSEPPNNVSTNSEWEAPTQKDKFPKPCNWRKNEFKKWTKLASQGRGIVNFERDKISNHWIQYYRRIPHRKLLTALQLRANVYPTREFLARGRQDQYIKACRHCDADNESCAHIIGNCPVTQDARIKRHNYICELLLEEAKKKDWVVFKEPHIRDSNKELYKPDLIFVKDGRALVVDVTVRYEAAKSSLEEAAAEKVRKYKHLETEVRHLTNAKDVTFVGFPLGARGKWHQDNFKLLTELGLSKSRQVKMAETFSTVALFSSVDIVHMFASRARKSMVM

SEQ ID NO: 1696 - protein, 1550 aa, synthetic construct
MAPKKKRKVNISGSSCGSPNSADTSSDFKDLWTKLKECHDREVQGLQVKVTKLKQERILDAQRLEEFFTKNQQLREQQKVLHETIKVLEDRLRAGLCDRCAVTEEHMRKKQQEFENIRQQNLKLITELMNERNTLQEENKKLSEQLQQKIENDQQHQAAELECEEDVIPDSPITAFSFSGVNRLRRKENPHVRYIEQTHTKLEHSVCANEMRKVSKSSTHPQHNPNENEILVADTYDQSQSPMAKAHGTSSYTPDKSSFNLATVVAETLGLGVQEESETQGPMSPLGDELYHCLEGNHKKQPFESGSETPGTSESATPEGSYEQLAPQPCVGETLHSSLPRDSELFVPEEGSSEKESEDAPKTSPPTPGKHGLRQTGEEKVMVTVPDKNPPCPCCGTRVNSVLNLIEHLKVSHGKRGVCFRCAKCGKENSNYHSVVCHFKKCRGPETEKAPAGEWICEVCNRDFTTKIGLGQHKRLAHPAVRNQERIVASQPKETSNRGAHKRCWTKEEEELLIRLEAQFEGNKNINKLIAEHITTKTAKQISDKRRLLSRKPAEEPRMEPGTCHHTRRAAASLRTEPEMSHHAQAEDRDNGPGRRPLPGRAAAGGRTMDEIRRHPDKGNGQQRPTKQKSEEQLQAYYKKTLEERLSAGALNTFPRAFKQVMEGRDIKLVINQTAQDCFGCLESISQIRTATRDKKDTVTREKHPKKPFQKWMKKRAIKKGNYLRFQRLFYLDRGKLAKIILDDIECLSCDIPLSEIYSVFKTRWETTGSFKSLGDFKTYGKADNTAFRELITAKEIEKNVQEMSKGSAPGPDGITLGDVVKMDPEFSRTMEIFNLWLTTGKIPDMVRGCRTVLIPKSSKPDRLKDINNWRPITIGSILLRLFSRIVTARLSKACPLNPRQRGFIRAAGCSENLKLLQTIIWSAKREHRPLGVVFVDIAKAFDTVSHQHIIHALQQREVDPHIVGLVSNMYENISTYITTKRNTHTDKIQIRVGVKQGDPMSPLLFNLAMDPLLCKLEESGKGYHRGQSSITAMAFADDLVLLSDSWENMNTNISILETFCNLTGLKTQGQKCHGFYIKPTKKSYTINDCAAWTINGTPLNMIDPGESEKYLGLQFDPWIGIARSGLSTKLDFWLQRIDQAPLKPLQKLDILKTYTIPRLIYIADHSEVKSALLETLDQKIRTAVKEWLHLPPCTCDAILYSSTRDGGLGITKLAGLIPSVQARRLHRIAQSSDDTMKCFMEKEKMEQLHKKLWIQAGGDRENIPSIWEAPPSSEPPNNVSTNSEWEAPTQKDKFPKPCNWRKNEFKKWTKLASQGRGIVNFERDKISNHWIQYYRRIPHRKLLTALQLRANVYPTREFLARGRQDQYIKACRHCDADNESCAHIIGNCPVTQDARIKRHNYICELLLEEAKKKDWVVFKEPHIRDSNKELYKPDLIFVKDGRALVVDVTVRYEAAKSSLEEAAAEKVRKYKHLETEVRHLTNAKDVTFVGFPLGARGKWHQDNFKLLTELGLSKSRQVKMAETFSTVALFSSVDIVHMFASRARKSMVM

SEQ ID NO: 1697 - protein, 1634 aa, synthetic construct
MPKRKVSSAEGAAKEEPKRRSARLSAKPPAKVEAKPKKAAAKDKSSDKKVQTKGKRGAKGKQAEVANQETKEDLPAENGETKTEESPASDEAGEKEAKSDSGSETPGTSESATPESNISGSSCGSPNSADTSSDFKDLWTKLKECHDREVQGLQVKVTKLKQERILDAQRLEEFFTKNQQLREQQKVLHETIKVLEDRLRAGLCDRCAVTEEHMRKKQQEFENIRQQNLKLITELMNERNTLQEENKKLSEQLQQKIENDQQHQAAELECEEDVIPDSPITAFSFSGVNRLRRKENPHVRYIEQTHTKLEHSVCANEMRKVSKSSTHPQHNPNENEILVADTYDQSQSPMAKAHGTSSYTPDKSSFNLATVVAETLGLGVQEESETQGPMSPLGDELYHCLEGNHKKQPFESGSETPGTSESATPEGSLFVPEEGSSEKESEDAPKTSPPTPGKHGLEQTGEEKVMVTVPDKNPPCPCCGTRVNSVLNLIEHLKVSHGKRGVCFRCAKCGKENSNYHSVVCHFKKCRGPETEKAPAGEWICEVCNRDFTTKIGLGQHKRLAHPAVRNQERIVASQPKETSNRGAHKRCWTKEEEELLIRLEAQFEGNKNINKLIAEHITTKTAKQISDKRRLLSRKPAEEPRMEPGTCHHTRRAAASLRTEPEMSHHAQAEDRDNGPGRRPLPGRAAAGGRTMDEIRRHPDKGNGQQRPTKQKSEEQLQAYYKKTLEERLSAGALNTFPRAFKQVMEGRDIKLVINQTAQDCFGCLESISQIRTATRDKKDTVTREKHPKKPFQKWMKKRAIKKGNYLRFQRLFYLDRGKLAKIILDDIECLSCDIPLSEIYSVFKTRWETTGSFKSLGDFKTYGKADNTAFRELITAKEIEKNVQEMSKGSAPGPDGITLGDVVKMDPEFSRTMEIFNLWLTTGKIPDMVRGCRTVLIPKSSKPDRLKDINNWRPITIGSILLRLFSRIVTARLSKACPLNPRQRGFIRAAGCSENLKLLQTIIWSAKREHRPLGVVFVDIAKAFDTVSHQHIIHALQQREVDPHIVGLVSNMYENISTYITTKRNTHTDKIQIRVGVKQGDPMSPLLFNLAMDPLLCKLEESGKGYHRGQSSITAMAFADDLVLLSDSWENMNTNISILETFCNLTGLKTQGQKCHGFYIKPTKKSYTINDCAAWTINGTPLNMIDPGESEKYLGLQFDPWIGIARSGLSTKLDFWLQRIDQAPLKPLQKTDILKTYTIPRLIYIADHSEVKSALLETLDQKIRTAVKEWLHLPPCTCDAILYSSTRDGGLGITKLAGLIPSVQARRLHRIAQSSDDTMKCFMEKEKMEQLHKKLWIQAGGDRENIPSIWEAPPSSEPPNNVSTNSEWEAPTQKDKFPKPCNWRKNEFKKWTKLASQGRGIVNFERDKISNHWIQYYRRIPHRKLLTALQLRANVYPTREFLARGRQDQYIKACRHCDADNESCAHIIGNCPVTQDARIKRHNYICELLLEEAKKKDWVVFKEPHIRDSNKELYKPDLIFVKDGRALVVDVTVRYEAAKSSLEEAAAEKVRKYKHLETEVRHLTNAKDVTFVGFPLGARGKWHQDNFKLLTELGLSKSRQVKMAETFSTVALFSSVDIVHMFASRARKSMVM

SEQ ID NO: 1698 - protein, 1625 aa, synthetic construct
MAPKKKRKVNISGSSCGSPNSADTSSDFKDLWTKLKECHDREVQGLQVKVTKLKQERILDAQRLEEFFTKNQQLREQQKVLHETIKVLEDRLRAGLCDRCAVTEEHMRKKQQEFENIRQQNLKLITELMNERNTLQEENKKLSEQLQQKIENDQQHQAAELECEEDVIPDSPITAFSFSGVNRLRRKENPHVRYIEQTHTKLEHSVCANEMRKVSKSSTHPQHNPNENEILVADTYDQSQSPMAKAHGTSSYTPDKSSFNLATVVAETLGLGVQEESETQGPMSPLGDELYHCLEGNHKKQPFESGSETPGTSESATPEGSVTVKFKYKGEEKEVDISKIKKVWRVGKMISFTYDDNGKTGRGAVSEKDAPKELLQMLEKSGSETPGTSESATPESYEQLAPQPCVGETLHSSLPRDSELFVPEEGSSEKESEDAPKTSPPTPGKHGLEQTGEEKVMVTVPDKNPPCPCCGTRVNSVLNLIEHLKVSHGKRGVCFRCAKCGKENSNYHSVVCHFPKCRGPETEKAPAGEWICEVCNRDFTTKIGLGQHKRLAHPAVRNQERIVASQPKETSNRGAHKRCWTKEEEELLIRLEAQFEGNKNINKLIAEHITTKTAKQISDKRRLLSRKPAEEPREEPGTCHHTRRAAASLRTEPEMSHHAQAEDRDNGPGRRPLPGRAAAGGRTMDEIRRHPDKGNGQQRPTKQKSEEQLQAYYKKTLEERLSAGALNTFPRAFKQVMEGRDIKLVINQTAQDCFGCLESISQIRTATRDKKDTVTREKHPKKPFQKWMKDRAIKKGNYLRFQRLFYLDRGKLAKIILDDIECLSCDIPLSEIYSVFKTRWETTGSFKSLGDFKTYGKADNTAFRELITAKEIEKNVQEMSKGSAPGPDGITLGDVVKMDPEFSRTMEIFNLWLTTGKIPDMVRGCRTVLIPKSSKPDRLKDINNWRPITIGSILLRLFSRIVTARLSKACPLNPRQRGFIRAAGCSENLKLLQTIIWSAKREHRPLGVVFVDIAKAFDTVSHQHIIHALQQREVDPHIVGLVSNMYENISTYITTKRNTHTDKIQIRVGVKQGDPMSPLLFNLAMDPLLCKLEESGKGYHRGQSSITAMAFADDLVLLSDSWENMNTNISILETFCNLTGLKTQGQKCHGFYIKPTKDSYTINDCAAWTINGTPLNMIDPGESEKYLGLQFDPWIGIARSGLSTKLDFWLQRIDQAPLKPLQKTDILKTYTIPRLIYIADHSEVKTALLETLDQKIRTAVKEWLHLPPCTCDAILYSSTRDGGLGITKLAGLIPSVQARRLHRIAQSSDDTMKCFMEKEKMEQLHKKLWIQAGGDRENIPSIWEAPPSSEPPNNVSTNSEWEAPTQKDKFPKPCNWRKNEFKKWTKLASQGRGIVNFERDKISNHWIQYYRRIPHRKLLTALQLRANVYPTREFLARGRQDQYIKACRHCDADIESCAHIIGNCPVTQDARIKRHNYICELLLEEAKKKDWVVFKEPHIRDSNKELYKPDLIFVKDARALVVDVTVRYEAAKSSLEEAAAEKVRKYKHLETEVRHLTNAKDVTFVGFPLGARGKWHQDNFKLLTELGLSKSRQVKMAETFSTVALFSSVDIVHMFASRARKSMVM

SEQ ID NO: 1699 - protein, 1397 aa, synthetic construct
MPKRKVSSAEGAAKEEPKRRSARLSAKPPAKVEAKPKKAAAKDKSSDKKVQTKGKRGAKGKQAEVANQETKEDLPAENGETKTEESPASDEAGEKEAKSDSGSETPGTSESATPESVTVKFKYKGEEKEVDISKIKKVWRVGKMISFTYDDNGKTGRGAVSEKDAPKELLQMLEKSGSETPGTSESATPESLFVPEEGSSEKESEDAPKTSPPTPGKHGLEQTGEEKVMVTVPDKNPPCPCCGTRVNSVLNLIEHLKVSHGKRGVCFRCAKCGKENSNYHSVVCHFPKCRGPETEKAPAGEWICEVCNRDFTTKIGLGQHKRLAHPAVRNQERIVASQPKETSNRGAHKRCWTKEEEELLIRLEAQFEGNKNINKLIAEHITTKTAKQISDKRRLLSRKPAEEPREEPGTCHHTRRAAASLRTEPEMSHHAQAEDRDNGPGRRPLPGRAAAGGRTMDEIRRHPDKGNGQQRPTKQKSEEQLQAYYKKTLEERLSAGALNTFPRAFKQVMEGRDIKLVINQTAQDCFGCLESISQIRTATRDKKDTVTREKHPKKPFQKWMKDRAIKKGNYLRFQRLFYLDRGKLAKIILDDIECLSCDIPLSEIYSVFKTRWETTGSFKSLGDFKTYGKADNTAFRELITAKEIEKNVQEMSKGSAPGPDGITLGDVVKMDPEFSRTMEIFNLWLTTGKIPDMVRGCRTVLIPKSSKPDRLKDINNWRPITIGSILLRLFSRIVTARLSKACPLNPRQRGFIRAAGCSENLKLLQTIIWSAKREHRPLGVVFVDIAKAFDTVSHQHIIHALQQREVDPHIVGLVSNMYENISTYITTKRNTHTDKIQIRVGVKQGDPMSPLLFNLAMDPLLCKLEESGKGYHRGQSSITAMAFADDLVLLSDSWENMNTNISILETFCNLTGLKTQGQKCHGFYIKPTKDSYTINDCAAWTINGTPLNMIDPGESEKYLGLQFDPWIGIARSGLSTKLDFWLQRIDQAPLKPLQKTDILKTYTIPRLIYIADHSEVKTALLETLDQKIRTAVKEWLHLPPCTCDAILYSSTRDGGLGITKLAGLIPSVQARRLHRIAQSSDDTMKCFMEKEKMEQLHKKLWIQAGGDRENIPSIWEAPPSSEPPNNVSTNSEWEAPTQKDKFPKPCNWRKNEFKKWTKLASQGRGIVNFERDKISNHWIQYYRRIPHRKLLTALQLRANVYPTREFLARGRQDQYIKACRHCDADIESCAHIIGNCPVTQDARIKRHNYICELLLEEAKKKDWVVFKEPHIRDSNKELYKPDLIFVKDARALVVDVTVRYEAAKSSLEEAAAEKVRKYKHLETEVRHLTNAKDVTFVGFPLGARGKWHQDNFKLLTELGLSKSRQVKMAETFSTVALFSSVDIVHMFASRARKSMVM

SEQ ID NO: 1700 - protein, 1277 aa, synthetic construct
MAPKKKRKVPTLLGFHTASGKKVKIAKESLDKVKNLFDEKEQGGSGGGYEQLAPQPCVGETLHSSLPRDSELFVPEEGSSEKESEDAPKTSPPTPGKHGLEQTGEEKVMVTVPDKNPPCPCCGTRVNSVLNLIEHLKVSHGKRGVCFRCAKCGKENSNYHSVVCHFKKCRGPETEKAPAGEWICEVCNRDFTTKIGLGQHKRLAHPAVRNQERIVASQPKETSNRGAHKRCWTKEEEELLIRLEAQFEGNKNINKLIAEHITTKTAKQISDKRRLLSRKPAEEPRMEPGTCHHTRRAAASLRTEPEMSHHAQAEDRDNGPGRRPLPGRAAAGGRTMDEIRRHPDKGNGQQRPTKQKSEEQLQAYYKKTLEERLSAGALNTFPRAFKQVMEGRDIKLVINQTAQDCFGCLESISQIRTATRDKKDTVTREKHPKKPFQKWMKKRAIKKGNYLRFQRLFYLDRGKLAKIILDDIECLSCDIPLSEIYSVFKTRWETTGSFKSLGDFKTYGKADNTAFRELITAKEIEKNVQEMSKGSAPGPDGITLGDVVKMDPEFSRTMEIFNLWLTTGKIPDMVRGCRTVLIPKSSKPDRLKDINNWRPITIGSILLRLFSRIVTARLSKACPLNPRQRGFIRAAGCSENLKLLQTIIWSAKREHRPLGVVFVDIAKAFDTVSHQHIIHALQQREVDPHIVGLVSNMYENISTYITTKRNTHTDKIQIRVGVKQGDPMSPLLFNLAMDPLLCKLEESGKGYHRGQSSITAMAFADDLVLLSDSWENMNTNISILETFCNLTGLKTQGQKCHGFYIKPTKKSYTINDCAAWTINGTPLNMIDPGESEKYLGLQFDPWIGIARSGLSTKLDFWLQRIDQAPLKPLQKTDILKTYTIPRLIYIADHSEVKSALLETLDQKIRTAVKEWLHLPPCTCDAILYSSTRDGGLGITKLAGLIPSVQARRLHRIAQSSDDTMKCFMEKEKMEQLHKKLWIQAGGDRENIPSIWEAPPSSEPPNNVSTNSEWEAPTQKDKFPKPCNWRKNEFKKWTKLASQGRGIVNFERDKISNHWIQYYRRIPHRKLLTALQLRANVYPTREFLARGRQDQYIKACRHCDADNESCAHIIGNCPVTQDARIKRHNYICELLLEEAKKKDWVVFKEPHIRDSNKELYKPDLIFVKDGRALVVDVTVRYEAAKSSLEEAAAEKVRKYKHLETEVRHLTNAKDVTFVGFPLGARGKWHQDNFKLLTELGLSKSRQVKMAETFSTVALFSSVDIVHMFASRARKSMVM

SEQ ID NO: 1701 - protein, 1674 aa, synthetic construct
MAPKKKRKVPKRKVSSAEGAAKEEPKRRSARLSAKPPAKVEAKPKKAAAKDKSSDKKVQTKGKRGAKGKQAEVANQETKEDLPAENGETKTEESPASDEAGEKEAKSDSGSETPGTSESATPESNISGSSCGSPNSADTSSDFKDLWTKLKECHDREVQGLQVKVTKLKQERILDAQRLEEFFTKNQQLREQQKVLHETIKVLEDRLRAGLCDRCAVTEEHMRKKQQEFENIRQQNLKLITELMNERNTLQEENKKLSEQLQQKIENDQQHQAAELECEEDVIPDSPITAFSFSGVNRLRRKENPHVRYIEQTHTKLEHSVCANEMRKVSKSSTHPQHNPNENEILVADTYDQSQSPMAKAHGTSSYTPDKSSFNLATVVAETLGLGVQEESETQGPMSPLGDELYHCLEGNHKKQPFESGSETPGTSESATPEGSYEQLAPQPCVGETLHSSLPRDSELFVPEEGSSEKESEDAPKTSPPTPGKHGLEQTGEEKVMVTVPDKNPPCPCCGTRVNSVLNLIEHLKVSHGKRGVCFRCAKCGKENSNYHSVVCHFKKCRGPETEKAPAGEWICEVCNRDFTTKIGLGQHKRLAHPAVRNQERIVASQPKETSNRGAHKRCWTKEEEELLIRLEAQFEGNKNINKLIAEHITTKTAKQISDKRRLLSRKPAEEPREEPGTCHHTRRAAASLRTEPEMSHHAQAEDRDNGPGRRPLPGRAAAGGRTMDEIRRHPDKGNGQQRPTKQKSEEQLQAYYKKTLEERLSAGALNTFPRAFKQVMEGRDIKLVINQTAQDCFGCLESISQIRTATRDKKDTVTREKHPKKPFQKWMKKRAIKKGNYLRFQRLFYLDRGKLAKIILDDIECLSCDIPLSEIYSVFKTRWETTGSFKSLGDFKTYGKADNTAFRELITAKEIEKNVQEMSKGSAPGPDGITLGDVVKMDPEFSRTMEIFNLWLTTGKIPDMVRGCRTVLIPKSSKPDRLKDINNWRPITIGSILLRLFSRIVTARLSKACPLNPRQRGFIRAAGCSENLKLLQTIIWSAKREHRPLGVVFVDIAKAFDTVSHQHIIHALQQREVDPHIVGLVSNMYENISTYITTKRNTHTDKIQIRVGVKQGDPMSPLLFNLAMDPLLCKLEESGKGYHRGQSSITAMAFADDLVLLSDSWENMNTNISILETFCNLTGLKTQGQKCHGFYIKPTKDSYTINDCAAWTINGTPLNMIDPGESEKYLGLQFDPWIGIARSGLSTKLDFWLQRIDQAPLKPLQKTDILKTYTIPRLIYIADHSEVKSALLETLDQKIRTAVKEWLHLPPCTCDAILYSSTRDGGLGITKLAGLIPSVQARRLHRIAQSSDDTMKCFMEKEKMEQLHKKLWIQAGGDRENIPSIWEAPPSSEPPNNVSTNSEWEAPTQKDKFPKPCNWRKNEFKKWTKLASQGRGIVNFERDKISNHWIQYYRRIPHRKLLTALQLRANVYPTREFLARGRQDQYIKACRHCDADIESCAHIIGNCPVTQDARIKRHNYICELLLEEAKKKDWVVFKEPHIRDSNKELYKPDLIFVKDARALVVDVTVRYEAAKSSLEEAAAEKVRKYKHLETEVRHLTNAKDVTFVGFPLGARGKWHQDNFKLLTELGLSKSRQVKMAETFSTVALFSSVDIVHMFASRARKSMVMRKKRRQRRR

SEQ ID NO: 1702 - protein, 1390 aa, synthetic construct
MASCPKPGPPVSAGAMSLESGLTTHSVLAIERGPNSLANSGSDFGGGGLGLPLRLLRVSVGTQTSRSDWVDLVSWSHPGPTSKSQQVDLVSLFPKHRVDLLSKNDQVDLVAQFLPSKFPPNLAENDLALLVNLEFYRSDLHVYEGVHKAAHWEGLSGLPEVYEQLAPQPCVGETLHSSLPRDSELFVPEEGSSEKESEDAPKTSPPTPGKHGLEQTGEEKVMVTVPDKNPPCPCCGTRVNSVLNLIEHLKVSHGKRGVCFRCAKCGKENSNYHSVVCHFKKCRGPETEKAPAGEWICEVCNRDFTTKIGLGQHKRRAHPAVRNQERIVASQPKETSNRGAHKRCWTKEEEELLIRLEAQFEGNKNINKLIAEHITTKTAKQISDKRRLLSRKPAEEPREMPGTCHHTRRAAASLRTEPEMSHHAQAEDRDNGPGRRPLPGRAAAGGRTMDEIRRHPDKGNGQQRPTKQKSEEQLQAYYKKTLEERLSAGALNTFPRAFKQVMEGRDIKLVINQTAQDYFGCLESISQIRTATRDKKDTVTRKKHPKKPFQKWMKKRAIKKGNYLRFQRLFYLDRGKLAKIILDDIECLSCDIPLSEIYSVFKTRWETTGSFKSLGDFKTYGKADNTAFRDLITAKEIEKNVQEMSKGSAPGPDGITLGDVVKMDPEGSRTMEIFNLWLTTGKIPDMVRGCRTVLIPKSSDPDRLKDINNWRPITIGSILLRLFSRIVTARLSKACPLNPRQRGFIRAAGCSENLKLLQTIIWSAKREHRPLGVVFVDIAKAFDTVSHQHIIHALQQREVDPHIVGLVSNMYENISTYITTKRNTHTDKIQIRVGVKQGDPMSPLLFNLAMDPLLCKLEESGKGYHRGQSSITAMAFADDLVLLSDSWEGMNTNISILETFCNLTGLKTQGQKCHGFYIKPTKKSYTINDCAAWTINGTPLNMIDPGESEKYLGLQFDPWIGIARSGLSTKLDFWLQRIDQAPLKPLQKLDILKTYTIPRLIYIADHSEVKTALLETLDQKIRTAVKEWLHLPPCTCDAILYSSTRDGGLGITKLAGLIPSVQARRLHRIAQSSDDTMKCFMEKEKMEQLHKKLWIQAGGDRENIPSIWEAPPSSEPPNNVSTNSEWEAPTQKDKFPKPCNWRKNEFKKWTKLASQGRGIVNFERDKISNHWIQYYRRIPHRKLLTALQLRANVYPTREFLARGRQDQYIKACRHCDADIESCAHIIGNCPVTQDARIKRHNKICELLLEEAKKKDWVVFKEPHIRDSNKELYKPDLIFVKDARALVVDVTVRYEAAKSSLEEAAAEKVRKYKHLETEVRHLTNAKDVTFVGFPLGARGKWHQDNFKLLTELGLSKSRQVKMAETFSTVALFSSVDIVHMFASRARKSMVM

SEQ ID NO: 1703 - protein, 1390 aa, synthetic construct
MASCPKPGPPVSAGAMSLESGLTTHSVLAIERGPNSLANSGSDFGGGGLGLPLRLLRVSVGTQTSRSDWVDLVSWSHPGPTSKSQQVDLVSLFPKHRVDLLSKNDQVDLVAQFLPSKFPPNLAENDLALLVNLEFYRSDLHVYEGVHKAAHWEGLSGLPEVYEQLAPQPCVGETLHSSLPRDSELFVPEEGSSEKESEDAPKTSPPTPGKHGLEQTGEEKVMVTVPDKNPPCPCCGTRVNSVLNLIEHLKVSHGKRGVCFRCAKCGKENSNYHSVVCHFKKCRGPETEKAPAGEWICEVCNRDFTTKIGLGQHKRRAHPAVRNQERIVASQPKETSNRGAHKRCWTKEEEELLIRLEAQFEGNKNINKLIAEHITTKTAKQISDKRRLLSRKPAEEPREMPGTCHHTRRAAASLRTEPEMSHHAQAEDRDNGPGRRPLPGRAAAGGRTMDEIRRHPDKGNGQQRPTKQKSEEQLQAYYKKTLEERLSAGALNTFPRAFKQVMEGRDIKLVINQTAQDYFGCLESISQIRTATRDKKDTVTRKKHPKKPFQKWMKKRAIKKGNYLRFQRLFHLDRGKLAKIILDDIECLSCDIPLSEIYSVFKTRWETTGSFKSLGDFKTYGKADNTAFRDLITAKEIEKNVQEMSKGSAPGPDGITLGDVVKMDPEGSRTMEIFNLWLTTGKIPDMVRGCRTVLIPKSSDPDRLKDINNWRPITIGSILLRLFSRIVTARLSKACPLNPRQRGFIRAAGCSENLKLLQTIIWSAKREHRPLGVVFVDIAKAFDTVSHQHIIHALQQREVDPHIVGLVSNMYENISTYITTKRNTHTDKIQIRVGVKQGDPMSPLLFNLAMDPLLCKLEESGKGYHRGQSSITAMAFADDLVLLSDSWEGMNTNISILETFCNLTGLKTQGQKCHGFYIKPTKKSYTINDCAAWTINGTPLNMIDPGESEKYLGLQFDPWIGIARSGLSTKLDFWLQRIDQAPLKPLQKLDILKTYTIPRLIYIADHSEVKTALLETLDQKIRTAVKEWLHLPPCTCDAILYSSTRDGGLGITKLAGLIPSVQARRLHRIAQSSDDTMKCFMEKEKMEQLHKKLWIQAGGDRENIPSIWEAPPSSEPPNNVSTNSEWEAPTQKDKFPKPCNWRKNEFKKWTKLASQGRGIVNFERDKISNHWIQYYRRIPHRKLLTALQLRANVYPTREFLARGRQDQYIKACRHCDADIESCAHIIGNCPVTQDARIKRHNKICELLLEEAKKKDWVVFKEPHIRDSNKELYKPDLIFVKDARALVVDVTVRYEAAKSSLEEAAAEKVRKYKHLETEVRHLTNAKDVTFVGFPLGARGKWHQDNFKLLTELGLSKSRQVKMAETFSTVALFSSVDIVHMFASRARKSMVM

SEQ ID NO: 1704 - protein, 1390 aa, synthetic construct
MASCPKPGPPVSAGAMSLESGLTTHSVLAIERGPNSLANSGSDFGGGGLGLPLRLLRVSVGTQTSRSDWVDLVSWSHPGPTSKSQQVDLVSLFPKHRVDLLSKNDQVDLVAQFLPSKFPPNLAENDLALLVNLEFYRSDLHVYEGVHKAAHWEGLSGLPEVYEQLAPQPCVGETLHSSLPRDSELFVPEEGSSEKESEDAPKTSPPTPGKHGKRQTGEEKVMVTVPDKNPPCPCCGTRVNSVLNLIEHLKVSHGKRRVCFRCAKCGKENSNYHSVVCHFKKCRGPETEKAPAGEWICEVCNRDFTTKIGLGQHKRLAHPAVRNQERIVASQPKETSNRGAHKRCWTKEEEELLIRLEAQFEGNKNINKLIAEHITTKTAKQISDKRRLLSRKPAEEPREEPGTCHHTRRAAASLRTEPEMSHHAQAEDRDNGPGRRPLPGRAAAGGRTMDEIRRHPDKGNGQQRPTKQKSEEQLQAYYKKTLEERLSAGALNTFPRAFKQVMEGRDIKLVINQTAQDCFGCLESISQIRTATRDKKYTVTRKKHPKKPFQKWMKKRAIKKGNYLRFQRLFYLDRGKLAKIILDDIECLSCDIPLSEIYSVFKTRWETTGSFKSLGDFKTYGKADNTAFRELITAKEIEKNVQEMSKGSAPGPDGITLGDVVKMDPEGSRTMEIFNLWLTTGKIPDMVRGCRTVLIPKSSDPDRLKDINNWRPITIGSILLRLFSRIVTARLSKACPLNPRQRGFIRAAGCSENLKLLQTIIWSAKREHRPLGVVFVDIAKAFDTVSHQHIIHALQQREVDPHIVGLVSNMYENISTYITTKRNTHTDKIQIRVGVKQGDPMSPLLFNLAMDPLLCKLEESGKGYHRGQSSITAMAFADDLVLLSDSWENMNTNISILETFCNLTGLKTQGQKCHGFYIKPTKDSYTINDCAAWTINGTPLNMIDPGESEKYLGLQFDPWIGIARSGLSTKLDFWLQRIDQAPLKPLQKLDILKTYTIPRLIYIADHSEVKTALLETLDQKIRTAVKEWLHLPPCTCDAILYSSTRDGGLGITKLAGLIPSVQARRLHRIAQSSDDTMKCFMEKEKMEQLHKKLWIQAGGDRENIPSIWEAPPSSEPPNNVSTNSEWEAPTQKDKFPKPCNWRKNEFKKWTKLASQGRGIVNFERDKISNHWIQYYRRIPHRKLLTALQLRANVYPTREFLARGRQDQYIKACRHCDADIESCAHIIGNCPVTQDARIKRHNKICELLLEEAKKKDWVVFKEPHIRDSNKELYKPDLIFVKDGRALVVDVTVRYEAAKSSLEEAAAEKVRKYKHLETEVRHLTNAKDVTFVGFPLGARGKWHQDNFKLLTELGLSKSRQVKMAETFSTVALFSSVDIVHMFASRARKSMVM

SEQ ID NO: 1705 - protein, 1390 aa, synthetic construct
MASCPKPGPPVSAGAMSLESGLTTHSVLAIERGPNSLANSGSDFGGGGLGLPLRLLRVSVGTQTSRSDWVDLVSWSHPGPTSKSQQVDLVSLFPKHRVDLLSKNDQVDLVAQFLPSKFPPNLAENDLALLVNLEFYRSDLHVYECVHKAAHWEGLSGLPEVYEQLAPQPCVGETLHSSLPRDSELFVPEEGSSEKESEDAPKTSPPTPGKHGLEQTGEEKVMVTVPDKNPPCPCCGTRVNSVLNLIEHLKVSHGKRGVCFRCAKCGKENSNYHSVVCHFPKCRGPETEKAPAGEWICEVCNRDFTTKIGLGQHKRLAHPAVRNQERIVASQPKETSNRGAHKRCWTKEEEELLIRLEAQFEGHKNINKLIAEHITTKTAKQISDKRRLLSRKPAEEPREEPGTCHHTRRAAASLRTEPEMSHHAQAEDRDNGPGRRPLPGRAAAGGRTMDEIRRHPDKGNGQQRPTKQKSEEQLQAYYKKTLEERLSAGALNTFPRAFKQVMEGRDIKLVINQTAQDCFGCLESISQIRTATRDKKYTVTREKHPKRPFQKWMKDRAIKKGNYLRFQRLFYLDRGKLAKIILDDIECLSCDIPLSEIYSVFKTRWETTGSFKSLGDFKTYGKADNTAFRELITAKEIEKNVQEMSKGSAPGPDGITLGDVVKMDPEFSLTMEIFNLWLTTGKIPDMVRGCRTVLIPKSSKPDRLKDINNWRPITIGSILLRLFSRIVTARLSKACPLNPRQRGFIRAAGCSENLKLLQTIIWSAKREHRPLGVVFVDIAKAFDTVSHQHIIHALQQREVDPHIVGLVSNMYENISTYITTKRNTHTDKIQIRVGVKQGDPMSPLLFNLAMDPLLCKLEESGKGYHRGQSSITAMAFADDLVLLSDSWENMNTNISILETFCNLTGLKTQGQKCHGFYIKPTKDSYTINDCAAWTINGTPLNMIDPGESEKYLGLQFDPWIGIARSGLSTKLDEWLQRIDQAPLKPLQKTDILKTYTIPRLIYIADHSEVKAALLETLDQKIRTAVKEWLHLPPCTCDAILYSSTRDGGLGITKLAGLIPSVQARRLHRIAQSSDDTMKCFMEKERMEQLHKKLWIQAGGDRENIPSIWEAPPSSEPPNNVSTNSEWEAPTQKPKFPKPCNWRKNEFKKWTKLASQGRGIVNFERDKISNHWIQYYRRIPHRKLLTALQLRANVYPTREFLARGRQDQYIKACRHCDADIESCAHIIGNCPVTQDARIKRHNYICELLLEEAKKKDWVVFKEPHIRDSNKELYKPDLIFVKDARALVVDVTVRYEAAKSSLEEAAAEKVRKYKHLETEVRHLTNAKDVTFVGFPLGARGKWHQDNFKLLTELGLSKSRQVKMAETFSTVALFSSVDIVHMFASRARKSMVM

SEQ ID NO: 1706 - protein, 1390 aa, synthetic construct
MASCPKPGPPVSAGAMSLESGLTTHSVLAIERGPNSLANSGSDFGGGGLGLPLRLLRVSVGTQTSRSDWVDLVSWSHPGPTSKSQQVDLVSLFPKHRVDLLSKNDQVDLVAQFLPSKFPPNLAENDLALLVNLEFYRSDLHVYECVHKAAHWEGLSGLPEVYEQLAPQPCVGETLHSSLPRDSELFVPEEGSSEKESEDAPKTSPPTPGKHGLEQTGEEKVMVTVPDKNPPCPCCGTRVNSVLNLIEHLKVSHGKRGVCFRCAKCGKENSNYHSVVCHFKKCRGPETEKAPAGEWICEVCNRDFTTKIGLGQHKRLAHPAVRNQERIVASQPKETSNRGAHKRCWTKEEEELLIRLEAQFEGHKNINKLIAEHITTKTAKQISDKRRLLSRKPAEEPREEPGTCHHTRRAAASLRTEPEMSHHAQAEDRDNGPGRRPLPGRAAAGGRTMDEIRRHPDKGNGQQRPTKQKSEEQLQAYYKKTLEERLSAGALNTFPRAFKQVMEGRDIKLVINQTAQDCFGCLESISQIRTATRDKKYTVTREKHPKRPFQKWMKKRAIKKGNYLRFQRLFYLDRGKLAKIILDDIECLSCDIPLSEIYSVFKTRWETTGSFKSLGDFKTYGKADNTAFRELITAKEIEKNVQEMSKGSAPGPDGITLGDVVKMDPEFSLTMEIFNLWLTTGKIPDMVRGCRTVLIPKSSKPDRLKDINNWRPITIGSILLRLFSRIVTARLSKACPLNPRQRGFIRAAGCSENLKLLQTIIWSAKREHRPLGVVFVDIAKAFDTVSHQHIIHALQQREVDPHIVGLVSNMYENISTYITTKRNTHTDKIQIRVGVKQGDPMSPLLFNLAMDPLLCKLEESGKGYHRGQSSITAMAFADDLVLLSDSWENMNTNISILETFCNLTGLKTQGQKCHGFYIKPTKDSYTINDCAAWTINGTPLNMIDPGESEKYLGLQFDPWIGIARSGLSTKLDEWLQRIDQAPLKPLQKTDILKTYTIPRLIYIADHSEVKAALLETLDQKIRTAVKEWLHLPPCTCDAILYSSTRDGGLGITKLAGLIPSVQARRLHRIAQSSDDTMKCFMEKERMEQLHKKLWIQAGGDRENIPSIWEAPPSSEPPNNVSTNSEWEAPTQKPKFPKPCNWRKNEFKKWTKLASQGRGIVNFERDKISNHWIQYYRRIPHRKLLTALQLRANVYPTREFLARGRQDQYIKACRHCDADIESCAHIIGNCPVTQDARIKRHNYICELLLEEAKKKDWVVFKEPHIRDSNKELYKPDLIFVKDARALVVDVTVRYEAAKSSLEEAAAEKVRKYKHLETEVRHLTNAKDVTFVGFPLGARGKWHQDNFKLLTELGLSKSRQVKMAETFSTVALFSSVDIVHMFASRARKSMVM

SEQ ID NO: 1707 - protein, 1671 aa, synthetic construct
MGTALTPLLTKFATRYEMGTTPEEVANTLKQTCFKGQVNDSQMVALLIVADQYKLNPFTKELYAFPDKNNGIVPVVGVDGWARIINENPQFDGMEFSMDQQGTECTCKIYRKDRSHAISATEYMAECKRNTQPWQSHPRRMLRHKAMIQCARLAFGFAGIYDQDEAERIVERDVTPAEQYEDVSEAICLIKDSPTMEDLQAAFSNAWKAYKTKGARDQLTAAKDQRKKELLDAPIDVEFEETGDDRAASGGSSGGSSGSETPGTSESATPESSGGSSGGSSMASCPKPGPPVSAGAMSLESGLTTHSVLAIERGPNSLANSGSDFGGGGLGLPLRLLRVSVGTQTSRSDWVDLVSWSHPGPTSKSQQVDLVSLFPKHRVDLLSKNDQVDLVAQFLPSKFPPNLAENDLALLVNLEFYRSDLHVYECVHKAAHWEGLSGLPEVYEQLAPQPCVGETLHSSLPRDSELFVPEEGSSEKESEDAPKTSPPTPGKHGLEQTGEEKVMVTVPDKNPPCPCCGTRVNSVLNLIEHLKVSHGKRRVCFRCAKCGKENSNYHSVVCHFPKCRGPETEKAPAGEWICEVCNRDFTTKIGLGQHKRLAHPAVRNQERIVASQPKETSNRGAHKRCWTKEEEELLIRLEAQFEGHKNINKLIAEHITTKTAKQISDKRRLLSRKPAEEPREEPGTCHHTRRAAASLRTEPEMSHHAQAEDRDNGPGRRPLPGRPAAGGRTMDEIRRHPDKGNGQQRPTKQKSEEQLQAYYKKTLEERLSAGALNTFPRAFKQVMEGRDIKLVINQTAQDCFGCLESISQIRTATRDKKYTVTREKHPKRPFQKWMKDRAIKKGNYLRFQRLFYLDRGKLAKIILDDIECLSCDIPLSEIYSVFKTRWETTGSFKSLGDFKTYGKADNTAFRELITAKEIEKNVQEMSKGSAPGPDGITLGDVVKMDPEFSLTMEIFNLWLTTGKIPDMVRGCRTVLIPKSSKPDRLKDINNWRPITIGSILLRLFSRIVTARLSKACPLNPRQRGFIRAAGCSENLKLLQTIIWSAKREHRPLGVVFVDIAKAFDTVSHQHIIHALQQREVDPHIVGLVSNMYENISTYITTKRNTHTDKIQIRVGVKQGDPMSPLLFNLAMDPLLCKLEESGKGYHRGQSSITAMAFADDLVLLSDSWENMNTNISILETFCNLTGLKTQGQKCHGFYIKPTKDSYTINDCAAWTINGTPLNMIDPGESEKYLGLQFDPWIGIARSGLSTKLDEWLQRIDQAPLKPLQKTDILKTYTIPRLIYIADHSEVKAALLETLDQKIRTAVKEWLHLPPCTCDAILYSSTRDGGLGITKLAGLIPSVQARRLHRIAQSSDDTMKCFMEKERMEQLHKKLWIQAGGDRENIPSIWEAPPSSEPPNNVSTNSEWEAPTQKPKFPKPCNWRKNEFKKWTKLASQGRGIVNFERDKISNHWIQYYRRIPHRKLLTALQLRANVYPTREFLARGRQDQYIKACRHCDADIESCAHIIGNCPVTQDARIKRHNYICELLLEEAKKKDWVVFKEPHIRDSNKELYKPDLIFVKDGRALVVDVTVRYEAAKSSLEEAAAEKVRKYKHLETEVRHLTNAKDVTFVGFPLGARGKWHQDNFKLLTELGLSKSRQVKMAETFSTVALFSSVDIVHMFASRARKSMVM

SEQ ID NO: 1708 - protein, 1671 aa, synthetic construct
MGTALTPLLTKFATRYEMGTTPEEVANTLKQTCFKGQVNDSQMVALLIVADQYKLNPFTKELYAFPDKNNGIVPVVGVDGWARIINENPQFDGMEFSMDQQGTECTCKIYRKDRSHAISATEYMAECKRNTQPWQSHPRRMLRHKAMIQCARLAFGFAGIYDQDEAERIVERDVTPAEQYEDVSEAICLIKDSPTMEDLQAAFSNAWKAYKTKGARDQLTAAKDQRKKELLDAPIDVEFEETGDDRAASGGSSGGSSGSETPGTSESATPESSGGSSGGSSMASCPKPGPPVSAGAMSLESGLTTHSVLAIERGPNSLANSGSDFGGGGLGLPLRLLRVSVGTQTSRSDWVDLVSWSHPGPTSKSQQVDLVSLFPKHRVDLLSKNDQVDLVAQFLPSKFPPNLAENDLALLVNLEFYRSDLHVYECVHKAAHWEGLSGLPEVYEQLAPQPCVGETLHSSLPRDSELFVPEEGSSEKESEDAPKTSPPTPGKHGLEQTGEEKVMVTVPDKNPPCPCCGTRVNSVLNLIEHLKVSHGKRGVCFRCAKCGKENSNYHSVVCHFKKCRGPETEKAPAGEWICEVCNRDFTTKIGLGQHKRLAHPAVRNQERIVASQPKETSNRGAHKRCWTKEEEELLIRLEAQFEGNKNINKLIAEHITTKTAKQISDKRRLLSRKPAEEPREEPGTCHHTRRAAASLRTEPEMSHHAQAEDRDNGPGRRPLPGRAAAGGRTMDEIRRHPDKGNGQQRPTKQKSEEQLQAYYKKTLEERLSAGALNTFPRAFKQVMEGRDIKLVINQTAQDCFGCLESISQIRTATRDKKYTVTREKHPKKPFQKWMKKRAIKKGNYLRFQRLFYLDRGKLAKIILDDIECLSCDIPLSEIYSVFKTRWETTGSFKSLGDFKTYGKADNTAFRELITAKEIEKNVQEMSKGSAPGPDGITLGDVVKMDPEFSLTMEIFNLWLTTGKIPDMVRGCRTVLIPKSSKPDRLKDINNWRPITIGSILLRLFSRIVTARLSKACPLNPRQRGFIRAAGCSENLKLLQTIIWSAKREHRPLGVVFVDIAKAFDTVSHQHIIHALQQREVDPHIVGLVSNMYENISTYITTKRNTHTDKIQIRVGVKQGDPMSPLLFNLAMDPLLCKLEESGKGYHRGQSSITAMAFADDLVLLSDSWENMNTNISILETFCNLTGLKTQGQKCHGFYIKPTKDSYTINDCAAWTINGTPLNMIDPGESEKYLGLQFDPWIGIARSGLSTKLDEWLQRIDQAPLKPLQKTDILKTYTIPRLIYIADHSEVKAALLETLDQKIRTAVKEWLHLPPCTCDAILYSSTRDGGLGITKLAGLIPSVQARRLHRIAQSSDDTMKCFMEKEKMEQLHKKLWIQAGGDRENIPSIWEAPPSSEPPNNVSTNSEWEAPTQKPKFPKPCNWRKNEFKKWTKLASQGRGIVNFERDKISNHWIQYYRRIPHRKLLTALQLRANVYPTREFLARGRQDQYIKACRHCDADIESCAHIIGNCPVTQDARIKRHNYICELLLEEAKKKDWVVFKEPHIRDSNKELYKPDLIFVKDARALVVDVTVRYEAAKSSLEEAAAEKVRKYKHLETEVRHLTNAKDVTFVGFPLGARGKWHQDNFKLLTELGLSKSRQVKMAETFSTVALFSSVDIVHMFASRARKSMVM

SEQ ID NO: 1709 - protein, 1399 aa, synthetic construct
MASCPKPGPPVSAGAMSLESGLTTHSVLAIERGPNSLANSGSDFGGGGLGLPLRLLRVSVGTQTSRSDWVDLVSWSHPGPTSKSQQVDLVSLFPKHRVDLLSKNDQVDLVAQFLPSKFPPNLAENDLALLVNLEFYRSDLHVYECVHKAAHWEGLSGLPEVYEQLAPQPCVGETLHSSLPRDSELFVPEEGSSEKESEDAPKTSPPTPGKHGLEQTGEEKVMVTVPDKNPPCPCCGTRVNSVLNLIEHLKVSHGKRGVCFRCAKCGKENSNYHSVVCHFKKCRGPETEKAPAGEWICEVCNRDFTTKIGLGQHKRLAHPAVRNQERIVASQPKETSNRGAHKRCWTKEEEELLIRLEAQFEGNKNINKLIAEHITTKTAKQISDKRRLLSRKPAEEPREEPGTCHHTRRAAASLRTEPEMSHHAQAEDRDNGPGRRPLPGRAAAGGRTMDEIRRHPDKGNGQQRPTKQKSEEQLQAYYKKTLEERLSAGALNTFPRAFKQVMEGRDIKLVINQTAQDCFGCLESISQIRTATRDKKDTVTREKHPKKPFQKWMKKRAIKKGNYLRFQRLFYLDRGKLAKIILDDIECLSCDIPLSEIYSVFKTRWETTGSFKSLGDFKTYGKADNTAFRELITAKEIEKNVQEMSKGSAPGPDGITLGDVVKMDPEFSRTMEIFNLWLTTGKIPDMVRGCRTVLIPKSSKPDRLKDINNWRPITIGSILLRLFSRIVTARLSKACPLNPRQRGFIRAAGCSENLKLLQTIIWSAKREHRPLGVVFVDIAKAFDTVSHQHIIHALQQREVDPHIVGLVSNMYENISTYITTKRNTHTDKIQIRVGVKQGDPMSPLLFNLAMDPLLCKLEESGKGYHRGQSSITAMAFADDLVLLSDSWENMNTNISILETFCNLTGLKTQGQKCHGFYIKPTKDSYTINDCAAWTINGTPLNMIDPGESEKYLGLQFDPWIGIARSGLSTKLDFWLQRIDQAPLKPLQKTDILKTYTIPRLIYIADHSEVKSALLETLDQKIRTAVKEWLHLPPCTCDAILYSSTRDGGLGITKLAGLIPSVQARRLHRIAQSSDDTMKCFMEKEKMEQLHKKLWIQAGGDRENIPSIWEAPPSSEPPNNVSTNSEWEAPTQKDKFPKPCNWRKNEFKKWTKLASQGRGIVNFERDKISNHWIQYYRRIPHRKLLTALQLRANVYPTREFLARGRQDQYIKACRHCDADNESCAHIIGNCPVTQDARIKRHNYICELLLEEAKKKDWVVFKEPHIRDSNKELYKPDLIFVKDGRALVVDVTVRYEAAKSSLEEAAAEKVRKYKHLETEVRHLTNAKDVTFVGFPLGARGKWHQDNFKLLTELGLSKSRQVKMAETFSTVALFSSVDIVHMFASRARKSMVMRKKRRQRRR

SEQ ID NO: 1710 - protein, 1674 aa, synthetic construct
MAPKKKRKVPKRKVSSAEGAAKEEPKRRSARLSAKPPAKVEAKPKKAAAKDKSSDKKVQTKGKRGAKGKQAEVANQETKEDLPAENGETKTEESPASDEAGEKEAKSDSGSETPGTSESATPESNISGSSCGSPNSADTSSDFKDLWTKLKECHDREVQGLQVKVTKLKQERILDAQRLEEFFTKNQQLREQQKVLHETIKVLEDRLRAGLCDRCAVTEEHMRKKQQEFENIRQQNLKLITELMNERNTLQEENKKLSEQLQQKIENDQQHQAAELECEEDVIPDSPITAFSFSGVNRLRRKENPHVRYIEQTHTKLEHSVCANEMRKVSKSSTHPQHNPNENEILVADTYDQSQSPMAKAHGTSSYTPDKSSFNLATVVAETLGLGVQEESETQGPMSPLGDELYHCLEGNHKKQPFESGSETPGTSESATPEGSYEQLAPQPCVGETLHSSLPRDSELFVPEEGSSEKESEDAPKTSPPTPGKHGLEQTGEEKVMVTVPDKNPPCPCCGTRVNSVLNLIEHLKVSHGKRGVCFRCAKCGKENSNYHSVVCHFKKCRGPETEKAPAGEWICEVCNRDFTTKIGLGQHKRLAHPAVRNQERIVASQPKETSNRGAHKRCWTKEEEELLIRLEAQFEGNKNINKLIAEHITTKTAKQISDKRRLLSRKPAEEPREEPGTCHHTRRAAASLRTEPEMSHHAQAEDRDNGPGRRPLPGRAAAGGRTMDEIRRHPDKGNGQQRPTKQKSEEQLQAYYKKTLEERLSAGALNTFPRAFKQVMEGRDIKLVINQTAQDCFGCLESISQIRTATRDKKDTVTREKHPKKPFQKWMKKRAIKKGNYLRFQRLFYLDRGKLAKIILDDIECLSCDIPLSEIYSVFKTRWETTGSFKSLGDFKTYGKADNTAFRELITAKEIEKNVQEMSKGSAPGPDGITLGDVVKMDPEFSRTMEIFNLWLTTGKIPDMVRGCRTVLIPKSSKPDRLKDINNWRPITIGSILLRLFSRIVTARLSKACPLNPRQRGFIRAAGCSENLKLLQTIIWSAKREHRPLGVVFVDIAKAFDTVSHQHIIHALQQREVDPHIVGLVSNMYENISTYITTKRNTHTDKIQIRVGVKQGDPMSPLLFNLAMDPLLCKLEESGKGYHRGQSSITAMAFADDLVLLSDSWENMNTNISILETFCNLTGLKTQGQKCHGFYIKPTKDSYTINDCAAWTINGTPLNMIDPGESEKYLGLQFDPWIGIARSGLSTKLDFWLQRIDQAPLKPLQKTDILKTYTIPRLIYIADHSEVKSALLETLDQKIRTAVKEWLHLPPCTCDAILYSSTRDGGLGITKLAGLIPSVQARRLHRIAQSSDDTMKCFMEKEKMEQLHKKLWIQAGGDRENIPSIWEAPPSSEPPNNVSTNSEWEAPTQKDKFPKPCNWRKNEFKKWTKLASQGRGIVNFERDKISNHWIQYYRRIPHRKLLTALQLRANVYPTREFLARGRQDQYIKACRHCDADNESCAHIIGNCPVTQDARIKRHNYICELLLEEAKKKDWVVFKEPHIRDSNKELYKPDLIFVKDGRALVVDVTVRYEAAKSSLEEAAAEKVRKYKHLETEVRHLTNAKDVTFVGFPLGARGKWHQDNFKLLTELGLSKSRQVKMAETFSTVALFSSVDIVHMFASRARKSMVMRKKRRQRRR

SEQ ID NO: 1711 - protein, 1514 aa, synthetic construct
MPKRKVSSAEGAAKEEPKRRSARLSAKPPAKVEAKPKKAAAKDKSSDKKVQTKGKRGAKGKQAEVANQETKEDLPAENGETKTEESPASDEAGEKEAKSDSGSETPGTSESATPESASCPKPGPPVSAGAMSLESGLTTHSVLAIERGPNSLANSGSDFGGGGLGLPLRLLRVSVGTQTSRSDWVDLVSWSHPGPTSKSQQVDLVSLFPKHRVDLLSKNDQVDLVAQFLPSKFPPNLAENDLALLVNLEFYRSDLHVYECVHFAAHWEGLSGLPEVYEQLAPQPCVGETLHSSLPRDSELFVPEEGSSEKESEDAPKTSPPTPGKHGLEQTGEEKVMVTVPDKNPPCPCCGTRVNSVLNLIEHLKVSHGKRGVCFRCAKCGKENSNYHSVVCHFKKCRGPETEKAPAGEWICEVCNRDFTTKIGLGQHKRLAHPAVRNQERIVASQPKETSNRGAHKRCWTKEEEELLIRLEAQFEGNKNINKLIAEHITTKTAKQISDKRRLLSRKPAEEPREEPGTCHHTRRAAASLRTEPEMSHHAQAEDRDNGPGRRPLPGRAAAGGRTMDEIRRHPDKGNGQQRPTKQKSEEQLQAYYKKTLEERLSAGALNTFPRAFKQVMEGRDIKLVINQTAQDCFGCLESISQIRTATRDKKDTVTREKHPKKPFQKWMKKRAIKKGNYLRFQRLFYLDRGKLAKIILDDIECLSCDIPLSEIYSVFKTRWETTGSFKSLGDFKTYGKADNTAFRELITAKEIEKNVQEMSKGSAPGPDGITLGDVVKMDPEFSRTMEIFNLWLTTGKIPDMVRGCRTVLIPKSSDPDRLKDINNWRPITIGSILLRLFSRIVTARLSKACPLNPRQRGFIRAAGCSENLKLLQTIIWSAKREHRPLGVVFVDIAKAFDTVSHQHIIHALQQREVDPHIVGLVSNMYENISTYITTKRNTHTDKIQIRVGVKQGDPMSPLLFNLAMDPLLCKLEESGKGYHRGQSSITAMAFADDLVLLSDSWENMNTNISILETFCNLTGLKTQGQKCHGFYIKPTKDSYTINDCAAWTINGTPLNMIDPGESEKYLGLQFDPWIGIARSGLSTKLDFWLQRIDQAPLKPLQKTDILKTYTIPRLIYIADHSEVKSALLETLDQKIRTAVKEWLHLPPCTCDAILYSSTRDGGLGITKLAGLIPSVQARRLHRIAQSSDDTMKCFMEKEKMEQLHKKLWIQAGGDRENIPSIWEAPPSSEPPNNVSTNSEWEAPTQKDKFPKPCNWRKNEFKKWTKLASQGRGIVNFERDKISNHWIQYYRRIPHRKLLTALQLRANVYPTREFLARGRQDQYIKACRHCDADNESCAHIIGNCPVTQDARIKRHNYICELLLEEAKKKDWVVFKEPHIRDSNKELYKPDLIFVKDGRALVVDVTVRYEAAKSSLEEAAAEKVRKYKHLETEVRHLTNAKDVTFVGFPLGARGKWHQDNFKLLTELGLSKSRQVKMAETFSTVALFSSVDIVHMFASRARKSMVMRKKRRQRRR

SEQ ID NO: 1712 - protein, 1399 aa, synthetic construct
MASCPKPGPPVSAGAMSLESGLTTHSVLAIERGPNSLANSGSDFGGGGLGLPLRLLRVSVGTQTSRSDWVDLVSWSHPGPTSKSQQVDLVSLFPKHRVDLLSKNDQVDLVAQFLPSKFPPNLAENDLALLVNLEFYRSDLHVYECVHKAAHWEGLSGLPEVYEQLAPQPCVGETLHSSLPRDSELFVPEEGSSEKESEDAPKTSPPTPGKHGLEQTGEEKVMVTVPDKNPPCPCCGTRVNSVLNLIEHLKVSHGKRGVCFRCAKCGKENSNYHSVVCHFKKCRGPETEKAPAGEWICEVCNRDFTTKIGLGQHKRLAHPAVRNQERIVASQPKETSNRGAHKRCWTKEEEELLIRLEAQFEGNKNINKLIAEHITTKTAKQISDKRRLLSRKPAEEPREEPGTCHHTRRAAASLRTEPEMSHHAQAEDRDNGPGRRPLPGRAAAGGRTMDEIRRHPDKGNGQQRPTKQKSEEQLQAYYKKTLEERLSAGALNTFPRAFKQVMEGRDIKLVINQTAQDCFGCLESISQIRTATRDKKDTVTREKHPKKPFQKWMKKRAIKKGNYLRFQRLFYLDRGKLAKIILDDIECLSCDIPLSEIYSVFKTRWETTGSFKSLGDFKTYGKADNTAFRELITAKEIEKNVQEMSKGSAPGPDGITLGDVVKMDPEFSRTMEIFNLWLTTGKIPDMVRGCRTVLIPKSSKPDRLKDINNWRPITIGSILLRLFSRIVTARLSKACPLNPRQRGFIRAAGCSENLKLLQTIIWSAKREHRPLGVVFVDIAKAFDTVSHQHIIHALQQREVDPHIVGLVSNMYENISTYITTKRNTHTDKIQIRVGVKQGDPMSPLLFNLAMDPLLCKLEESGKGYHRGQSSITAMAFADDLVLLSDSWENMNTNISILETFCNLTGLKTQGQKCHGFYIKPTKDSYTINDCAAWTINGTPLNMIDPGESEKYLGLQFDPWIGIARSGLSTKLDFWLQRIDQAPLKPLQKTDILKTYTIPRLIYIADHSEVKSALLETLDQKIRTAVKEWLHLPPCTCDAILYSSTRDGGLGITKLAGLIPSVQARRLHRIAQSSDDTMKCFMEKEKMEQLHKKLWIQAGGDRENIPSIWEAPPSSEPPNNVSTNSEWEAPTQKDKFPKPCNWRKNEFKKWTKLASQGRGIVNFERDKISNHWIQYYRRIPHRKLLTALQLRANVYPTREFLARGRQDQYIKACRHCDADNESCAHIIGNCPVTQDARIKRHNYICELLLEEAKKKDWVVFKEPHIRDSNKELYKPDLIFVKDARALVVDVTVRYEAAKSSLEEAAAEKVRKYKHLETEVRHLTNAKDVTFVGFPLGARGKWHQDNFKLLTELGLSKSRQVKMAETFSTVALFSSVDIVHMFASRARKSMVMRKKRRQRRR

SEQ ID NO: 1713 - protein, 1390 aa, synthetic construct; identical to SEQ ID NO: 1293

SEQ ID NO: 1714 - protein, 1390 aa, synthetic construct
MASCPKPGPPVSAGAMSLESGLTTHSVLAIERGPNSLANSGSDFGGGGLGLPLRLLRVSVGTQTSRSDWVDLVSWSHPGPTSKSQQVDLVSLFPKHRVDLLSKNDQVDLVAQFLPSKFPPNLAENDLALLVNLEFYRSDLHVYECVHKAAHWEGLSGLPEVYEQLAPQPCVGETLHSSLPRDSELFVPEEGSSEKESEDAPKTSPPTPGKHGLEQTGEEKVMVTVPDKNPPCPCCGTRVNSVLNLIEHLKVSHGKRGVCFRCAKCGKENSNYHSVVCHFKKCRGPETEKAPAGEWICEVCNRDFTTKIGLGQHKRLAHPAVRNQERIVASQPKETSNRGAHKRCWTKEEEELLIRLEAQFEGNKNINKLIAEHITTKTAKQISDKRRLLSRKPAEEPRMEPGTCHHTRRAAASLRTEPEMSHHAQAEDRDNGPGRRPLPGRAAAGGRTMDEIRRHPDKGNGQQRPTKQKSEEQLQAYYKKTLEERLSAGALNTFPRAFKQVMEGRDIKLVINQTAQDCFGCLESISQIRTATRDKKDTVTREKHPKKPFQKWMKKRAIKKGNYLRFQRLFYLDRGKLAKIILDDIECLSCDIPLSEIYSVFKTRWETTGSFKSLGDFKTYGKADNTAFRELITAKEIEKNVQEMSKGSAPGPDGITLGDVVKMDPEFSRTMEIFNLWLTTGKIPDMVRGCRTVLIPKSSDPDRLKDINNWRPITIGSILLRLFSRIVTARLSKACPLNPRQRGFIRAAGCSENLKLLQTIIWSAKREHRPLGVVFVDIAKAFDTVSHQHIIHALQQREVDPHIVGLVSNMYENISTYITTKRNTHTDKIQIRVGVKQGDPMSPLLFNLAMDPLLCKLEESGKGYHRGQSSITAMAFADDLVLLSDSWENMNTNISILETFCNLTGLKTQGQKCHGFYIKPTKKSYTINDCAAWTINGTPLNMIDPGESEKYLGLQFDPWIGIARSGLSTKLDFWLQRIDQAPLKPLQKTDILKTYTIPRLIYIADHSEVKSALLETLDQKIRTAVKEWLHLPPCTCDAILYSSTRDGGLGITKLAGLIPSVQARRLHRIAQSSDDTMKCFMEKEKMEQLHKKLWIQAGGDRENIPSIWEAPPSSEPPNNVSTNSEWEAPTQKDKFPKPCNWRKNEFKKWTKLASQGRGIVNFERDKISNHWIQYYRRIPHRKLLTALQLRANVYPTREFLARGRQDQYIKACRHCDADNESCAHIIGNCPVTQDARIKRHNKICELLLEEAKKKDWVVFKEPHIRDSNKELYKPDLIFVKDGRALVVDVTVRYEAAKSSLEEAAAEKVRKYKHLETEVRHLTNAKDVTFVGFPLGARGKWHQDNFKLLTELGLSKSRQVKMAETFSTVALFSSVDIVHMFASRARKSMVM

SEQ ID NO: 1715 - protein, 1322 aa, synthetic construct
MPKRKVSSAEGAAKEEPKRRSARLSAKPPAKVEAKPKKAAAKDKSSDKKVQTKGKRGAKGKQAEVANQETKEDLPAENGETKTEESPASDEAGEKEAKSDSGSETPGTSESATPESLFVPEEGSSEKESEDAPKTSPPTPGKHGLEQTGEEKVMVTVPDKNPPCPCCGTRVNSVLNLIEHLKVSHGKRGVCFRCAKCGKENSNYHSVVCHFKKCRGPETEKAPAGEWICEVCNRDFTTKIGLGQHKRLAHPAVRNQERIVASQPKETSNRGAHKRCWTKEEEELLIRLEAQFEGNKNINKLIAEHITTKTAKQISDKRRLLSRKPAEEPRMEPGTCHHTRRAAASLRTEPEMSHHAQAEDRDNGPGRRPLPGRAAAGGRTMDEIRRHPDKGNGQQRPTKQKSEEQLQAYYKKTLEERLSAGALNTFPRAFKQVMEGRDIKLVINQTAQDCFGCLESISQIRTATRDKKDTVTRKKHPKKPFQKWMKKRAIKKGNYLRFQRLFYLDRGKLARIILDDIECLSCDIPLSEIYSVFKTRWETTGSFKSLGDFKTYGKADNTAFRELITAKEIEKNVQEMSKGSAPGPDGITLGDVVKMDPEFSRTMEIFNLWLTTGKIPDMVRGCRTVLIPKSSKPDRLKDINNWRPITIGSILLRLFSRIVTARLSKACPLNPRQRGFIRAAGCSENLKLLQTIIWSAKREHRPLGVVFVDIAKAFDTVSHQHIIHALQQREVDPHIVGLVSNMYENISTYITTKRNTHTDKIQIRVGVKQGDPMSPLLFNLAMDPLLCKLEESGKGYHRGQSSITAMAFADDLVLLSDSWENMNTNISILETFCNLTGLKTQGQKCHGFYIKPTKKSYTINDCAAWTINGTPLNMIDPGESEKYLGLQFDPWIGIARSGLSTKLDFWLQRIDQAPLKPLQKTDILKTYTIPRLIYIADHSEVKSALLETLDQKIRTAVKEWLHLPPCTCDAILYSSTRDGGLGITKLAGLIPSVQARRLHRIAQSSDDTMKCFMEKEKMEQLHKKLWIQAGGDRENIPSIWEAPPSSEPPNNVSTNSEWEAPTQKDKFPKPCNWRKNEFKKWTKLASQGRGIVNFERDKISNHWIQYYRRIPHRKLLTALQLRANVYPTREFLARGRQDQYIKACRHCDADNESCAHIIGNCPVTQDARIKRHNYICELLLEEAKKKDWVVFKEPHIRDSNKELYKPDLIFVKDGRALVVDVTVRYEAAKSSLEEAAAEKVRKYKHLETEVRHLTNAKDVTFVGFPLGARGKWHQDNFKLLTELGLSKSRQVKMAETFSTVALFSSVDIVHMFASRARKSMVM

SEQ ID NO: 1716 - protein, 982 aa, synthetic construct
MDEYQRSLSRPLLTIMSINIEGLSLAKEELLAKMSEDISCDILCIQETHRDITMRRPKILGMQLAVERPHRQYGSAIFVRSGVAISATSLTEVNNIEILSVELDSCTVSSLYKPPGADFYFTPPTSCHNHEAHFVVGDFNSHSCVWGYDEDDRNGEAVLTWADNSRMSLLHDSKLPPSFNSGRWKRGYNPDLIFVKESISHQCTKRVLNPIPNTQHRPICCVAYAAVRPKSVPFRRRYNFNKANWTKFTETLEAAISDIEPSIENYDLFVEAVKRSSRLSIPRGCRTSYLPGLNEESLNQLQEYLRLFQENPYSDGTIAAGQKLSTALANAKKDRWIELLENLDMSKSSRKAWQLLRRLDSDPLVNPGHANVTPDQIAHQLIQNGKTNCSRIKMKINRVPELETHQLSSPLNLKELREAIKRCKTGKAPGLDDLMMEQIKHLGPKAENWLLKFYNQCLAHKQIPRAWRKTKIIAILKPGKDASNARNYRPISLLCHLYKVYERMLLNRLGPVIEPKLIAQQAGFRPGKNCTGQILHLTEHIEEGYEKGCITGTVFVDLTAAYDTVQHRKMLHKVYHITRDFDFTKTVQTLLENRSFYVEFQGQKSRWRRQKNGLPQGSVLAPTLFNIFTNDQPQPPLTKSFIYADDLGLTTQAKDFETVEKQLTNALKDLSSYYKENHLKPNPAKTQVCAFHLRNREANRKLKVTWEGQELEHCFHPKYLGVTLDRTLTYRKHCMNTKHKVAARNNILRKLTGSAWGADPQVIRTSALALSFSTAEYACPVWHKSAHAKQVDIALNETCRIITGCLKPTPVDKLYKLAGIAPPDVRREVAANGERKKVEHCESHPLHDYHPPPTRLKSRKGFMRTTTPLDVPPATARVSLWAAKPGNSNWMAPQEGLPPGANQEWATWKSLNRLRSGVGRSKDNLARWHYLEESSTLCDCGAEQTTQHMYACPQCPASCTEEELFKATDNAVAVARFWSKTI

SEQ ID NO: 1717 - protein, 9 aa, synthetic construct
RKKRRQRRR

SEQ ID NO: 1718 - protein, 111 aa, synthetic construct
TDPRETVPPGNSGEETIGEAFAWLNRTVEAINREAVNHLPRELIFQVWQRSWRYWHDEQGMSESYTKYRYLCIIQKAVYMHVRKGCTCLGRGHGPGGWRPGPPPPPPPGLV

SEQ ID NO: 1719 - protein, 13 aa, synthetic construct
ATRIGRFANYLRN

SEQ ID NO: 1720 - protein, 87 aa, synthetic construct
AASLNGAPLIKDPMLIFVKTLTGKTITLEVEPSDTIENVKAKIQDKEGIPPDQQRLAFAGKSLEDGRTLSDYNILKDSKLHPLLRLR

SEQ ID NO: 1721 - skipped

SEQ ID NO: 1722 - protein, 6 aa, synthetic construct
KKKSKK

SEQ ID NO: 1723 - protein, 410 aa, synthetic construct; identical to SEQ ID NO: 297

SEQ ID NO: 1724 - protein, 299 aa, synthetic construct
PVDFHYGVRVDVTLLSKIRRVNEHIKSATKTGVVQVHGSACTPTLSVLSSVGTAGVLGLRIKNALTPLVGHTEGSGDVSFSFRNTSVGSGFTHTRELFGANVLDAGIAFYRKGEACDTGAQPQFVRTTISYGDNLTSTVHKSVVDQKGILPFHDRMEAGGRTTRLLLCGKTGAFLLKWLRQQKTKEDQTVTVSVSETLSIVTFSLGGVSKIIDFKPETKPVSGWDGLKGKKSVDVGVVHTDALSRVSLESLIAALRLCKVPGWFTPGLIWHSNEILEVEGVPTGCQSGDVKLSVLLLEV

SEQ ID NO: 1725 - protein, 1390 aa, synthetic construct
MASCPKPGPPVSAGAMSLESGLTTHSVLAIERGPNSLANSGSDFGGGGLGLPLRLLRVSVGTQTSRSDWVDLVSWSHPGPTSKSQQVDLVSLFPKHRVDLLSKNDQVDLVAQFLPSKFPPNLAENDLALLVNLEFYRSDLHVYECVHKAAHWEGLSGLPEVYEQLAPQPCVGETLHSSLPRDSELFVPEEGSSEKESEDAPKTSPPTPGKHGLEQTGEEKVMVTVPDKNPPCPCCGTRVNSVLNLIEHLKVSHGKRGVCFRCAKCGKENSNYHSVVCHFKKCRGPETEKAPAGEWICEVCNRDFTTKIGLGQHKRLAHPAVRNQERIVASQPKETSNRGAHKRCWTKEEEELLIRLEAQFEGNKNINKLIAEHITTKTAKQISDKRRLLSRKPAEEPREEPGTCHHTRRAAASLRTEPEMSHHAQAEDRDNGPGRRPLPGRAAAGGRTMDEIRRHPDKGNGQQRPTKQKSEEQLQAYYKKTLEERLSAGALNTFPRAFKQVMEGRDIKLVINQTAQDCFGCLESISQIRTATRDKKDTVTREKHPKKPFQKWMKKRAIKKGNYLRFQRLFYLDRGKLAKIILDDIECLSCDIPLSEIYSVFKTRWETTGSFKSLGDFKTYGKADNTAFRELITAKEIEKNVQEMSKGSAPGPDGITLGDVKKMDPEFSRTMEIFNLWLTTGKIPDMVRGCRTVLIPKSSKPDRLKDINNWRPITIGSILLRLFSRIVTARLSKACPLNPRQRGFIRAAGCSENLKLLQTIIWSAKREHRPLGVVFVDIAKAFDTVSHQHIIHALQQREVDPHIVGLVSNMYENISTYITTKRNTHTDKIQIRVGVKQGDPMSPLLFNLAMDPLLCKLEESGKGYHRGQSSITAMAFADDLVLLSDSWENMNTNISILETFCNLTGLKTQGQKCHGFYIKPTKDSYTINDCAAWTINGTPLNMIDPGESEKYLGLQFDPWIGIARSGLSTKLDFWLQRIDQAPLKPLQKTDILKTYTIPRLIYIADHSEVKSALLETLDQKIRTAVKEWLHLPPCTCDAILYSSTRDGGLGITKLAGLIPSVQARRLHRIAQSSDDTMKCFMEKEKMEQLHKKLWIQAGGDRENIPSIWEAPPSSEPPNNVSTNSEWEAPTQKDKFPKPCNWRKNEFKKWTKLASQGRGIVNFERDKISNHWIQYYRRIPHRKLLTALQLRANVYPTREFLARGRQDQYIKACRHCDADNESCAHIIGNCPVTQDARIKRHNYICELLLEEAKKKDWVVFKEPHIRDSNKELYKPDLIFVKDGRALVVDVTVRYEAAKSSLEEAAAEKVRKYKHLETEVRHLTNAKDVTFVGFPLGARGKWHQDNFKLLTELGLSKSRQVKMAETFSTVALFSSVDIVHMFASRARKSMVM

SEQ ID NO: 1726 - protein, 1390 aa, synthetic construct
MASCPKPGPPVSAGAMSLESGLTTHSVLAIERGPNSLANSGSDFGGGGLGLPLRLLRVSVGTQTSRSDWVDLVSWSHPGPTSKSQQVDLVSLFPKHRVDLLSKNDQVDLVAQFLPSKFPPNLAENDLALLVNLEFYRSDLHVYECVHKAAHWEGLSGLPEVYEQLAPQPCVGETLHSSLPRDSELFVPEEGSSEKESEDAPKTSPPTPGKHGLEQTGEEKVMVTVPDKNPPCPCCGTRVNSVLNLIEHLKVSHGKRGVCFRCAKCGKENSNYHSVVCHFKKCRGPETEKAPAGEWICEVCNRDFTTKIGLGQHKRLAHPAVRNQERIVASQPKETSNRGAHKRCWTKEEEELLIRLEAQFEGNKNINKLIAEHITTKTAKQISDKRRLLSRKPAEEPREEPGTCHHTRRAAASLRTEPEMSHHAQAEDRDNGPGRRPLPGRAAAGGRTMDEIRRHPDKGNGQQRPTKQKSEEQLQAYYKKTLEERLSAGALNTFPRAFKQVMEGRDIKLVINQTAQDYFGCLESISQIRTATRDKKDTVTREKHPKKPFQKWMKKRAIKKGNYLRFQRLFYLDRGKLAKIILDDIECLSCDIPLSEIYSVFKTRWETTGSFKSLGDFKTYGKADNTAFRELITAKEIEKNVQEMSKGSAPGPDGITLGDVVKMDPEFSRTMEIFNLWLTTGKIPDMVRGCRTVLIPKSSKPDRLKDINNWRPITIGSILLRLFSRIVTARLSKACPLNPRQRGFIRAAGCSENLKLLQTIIWSAKREHRPLGVVFVDIAKAFDTVSHQHIIHALQQREVDPHIVGLVSNMYENISTYITTKRNTHTDKIQIRVGVKQGDPMSPLLFNLAMDPLLCKLEESGKGYHRGQSSITAMAFADDLVLLSDSWENMNTNISILETFCNLTGLKTQGQKCHGFYIKPTKDSYTINDCAAWTINGTPLNMIDPGESEKYLGLQFDPWIGIARSGLSTKLDFWLQRIDQAPLKPLQKTDILKTYTIPRLIYIADHSEVKSALLETLDQKIRTAVKEWLHLPPCTCDAILYSSTRDGGLGITKLAGLIPSVQARRLHRIAQSSDDTMKCFMEKEKMEQLHKKLWIQAGGDRENIPSIWEAPPSSEPPNNVSTNSEWEAPTQKDKFPKPCNWRKNEFKKWTKLASQGRGIVNFERDKISNHWIQYYRRIPHRKLLTALQLRANVYPTREFLARGRQDQYIKACRHCDADNESCAHIIGNCPVTQDARIKRHNYICELLLEEAKKKDWVVFKEPHIRDSNKELYKPDLIFVKDGRALVVDVTVRYEAAKSSLEEAAAEKVRKYKHLETEVRHLTNAKDVTFVGFPLGARGKWHQDNFKLLTELGLSKSRQVKMAETFSTVALFSSVDIVHMFASRARKSMVM

SEQ ID NO: 1727 - protein, 1390 aa, synthetic construct
MASCPKPGPPVSAGAMSLESGLTTHSVLAIERGPNSLANSGSDFGGGGLGLPLRLLRVSVGTQTSRSDWVDLVSWSHPGPTSKSQQVDLVSLFPKHRVDLLSKNDQVDLVAQFLPSKFPPNLAENDLALLVNLEFYRSDLHVYECVHKAAHWEGLSGLPEVYEQLAPQPCVGETLHSSLPRDSELFVPEEGSSEKESEDAPKTSPPTPGKHGLEQTGEEKVMVTVPDKNPPCPCCGTRVNSVLNLIEHLKVSHGKRGVCFRCAKCGKENSNYHSVVCHFKKCRGPETEKAPAGEWICEVCNRDFTTKIGLGQHKRLAHPAVRNQERIVASQPKETSNRGAHKRCWTKEEEELLIRLEAQFEGNKNINKLIAEHITTKTAKQISDKRRLLSRKPAEEPREEPGTCHHTRRAAASLRTEPEMSHHAQAEDRDNGPGRRPLPGRAAAGGRTMDEIRRHPDKGNGQQRPTKQKSEEQLQAYYKKTLEERLSAGALNTFPRAFKQVMEGRDIKLVINQTAQDCFGCLESISQIRTATRDKKDTVTREKHPKKPFQKWMKKRAIKKGNYLRFQRLFYLDRGKLAKIILDDIECLSCDIPLSEIYSVFKTRWETTGSFKSLGDFKTYGKADNTAFRELITAKEIEKNVQEMSKGSAPGPDGITLGDVVKMDPEFSRTMEIFNLWLTTGKIPDMVRGCRTVLIPKSSDPDRLKDINNWRPITIGSILLRLFSRIVTARLSKACPLNPRQRGFIRAAGCSENLKLLQTIIWSAKREHRPLGVVFVDIAKAFDTVSHQHIIHALQQREVDPHIVGLVSNMYENISTYITTKRNTHTDKIQIRVGVKQGDPMSPLLFNLAMDPLLCKLEESGKGYHRGQSSITAMAFADDLVLLSDSWENMNTNISILETFCNLTGLKTQGQKCHGFYIKPTKDSYTINDCAAWTINGTPLNMIDPGESEKYLGLQFDPWIGIARSGLSTKLDFWLQRIDQAPLKPLQKTDILKTYTIPRLIYIADHSEVKSALLETLDQKIRTAVKEWLHLPPCTCDAILYSSTRDGGLGITKLAGLIPSVQARRLHRIAQSSDDTMKCFMEKEKMEQLHKKLWIQAGGDRENIPSIWEAPPSSEPPNNVSTNSEWEAPTQKDKFPKPCNWRKNEFKKWTKLASQGRGIVNFERDKISNHWIQYYRRIPHRKLLTALQLRANVYPTREFLARGRQDQYIKACRHCDADNESCAHIIGNCPVTQDARIKRHNYICELLLEEAKKKDWVVFKEPHIRDSNKELYKPDLIFVKDGRALVVDVTVRYEAAKSSLEEAAAEKVRKYKHLETEVRHLTNAKDVTFVGFPLGARGKWHQDNFKLLTELGLSKSRQVKMAETFSTVALFSSVDIVHMFASRARKSMVM

SEQ ID NO: 1728 - protein, 1390 aa, synthetic construct
MASCPKPGPPVSAGAMSLESGLTTHSVLAIERGPNSLANSGSDFGGGGLGLPLRLLRVSVGTQTSRSDWVDLVSWSHPGPTSKSQQVDLVSLFPKHRVDLLSKNDQVDLVAQFLPSKFPPNLAENDLALLVNLEFYRSDLHVYECVHKAAHWEGLSGLPEVYEQLAPQPCVGETLHSSLPRDSELFVPEEGSSEKESEDAPKTSPPTPGKHGLEQTGEEKVMVTVPDKNPPCPCCGTRVNSVLNLIEHLKVSHGKRGVCFRCAKCGKENSNYHSVVCHFKKCRGPETEKAPAGEWICEVCNRDFTTKIGLGQHKRLAHPAVRNQERIVASQPKETSNRGAHKRCWTKEEEELLIRLEAQFEGNKNINKLIAEHITTKTAKQISDKRRLLSRKPAEEPREEPGTCHHTRRAAASLRTEPEMSHHAQAEDRDNGPGRRPLPGRAAAGGRTMDEIRRHPDKGNGQQRPTKQKSEEQLQAYYKKTLEERLSAGALNTFPRAFKQVMEGRDIKLVINQTAQDCFGCLESISQIRTATRDKKDTVTREKHPKKPFQKWMKKRAIKKGNYLRFQRLFYLDRGKLAKIILDDIECLSCDIPLSEIYSVFKTRWETTGSFKSLGDFKTYGKADNTAFRELITAKEIEKNVQEMSKGSAPGPDGITLGDVVKMDPEGSRTMEIFNLWLTTGKIPDMVRGCRTVLIPKSSKPDRLKDINNWRPITIGSILLRLFSRIVTARLSKACPLNPRQRGFIRAAGCSENLKLLQTIIWSAKREHRPLGVVFVDIAKAFDTVSHQHIIHALQQREVDPHIVGLVSNMYENISTYITTKRNTHTDKIQIRVGVKQGDPMSPLLFNLAMDPLLCKLEESGKGYHRGQSSITAMAFADDLVLLSDSWENMNTNISILETFCNLTGLKTQGQKCHGFYIKPTKDSYTINDCAAWTINGTPLNMIDPGESEKYLGLQFDPWIGIARSGLSTKLDFWLQRIDQAPLKPLQKTDILKTYTIPRLIYIADHSEVKSALLETLDQKIRTAVKEWLHLPPCTCDAILYSSTRDGGLGITKLAGLIPSVQARRLHRIAQSSDDTMKCFMEKEKMEQLHKKLWIQAGGDRENIPSIWEAPPSSEPPNNVSTNSEWEAPTQKDKFPKPCNWRKNEFKKWTKLASQGRGIVNFERDKISNHWIQYYRRIPHRKLLTALQLRANVYPTREFLARGRQDQYIKACRHCDADNESCAHIIGNCPVTQDARIKRHNYICELLLEEAKKKDWVVFKEPHIRDSNKELYKPDLIFVKDGRALVVDVTVRYEAAKSSLEEAAAEKVRKYKHLETEVRHLTNAKDVTFVGFPLGARGKWHQDNFKLLTELGLSKSRQVKMAETFSTVALFSSVDIVHMFASRARKSMVM

SEQ ID NO: 1729 - protein, 1390 aa, synthetic construct
MASCPKPGPPVSAGAMSLESGLTTHSVLAIERGPNSLANSGSDFGGGGLGLPLRLLRVSVGTQTSRSDWVDLVSWSHPGPTSKSQQVDLVSLFPKHRVDLLSKNDQVDLVAQFLPSKFPPNLAENDLALLVNLEFYRSDLHVYEGVHKAAHWEGLSGLPEVYEQLAPQPCVGETLHSSLPRDSELFVPEEGSSEKESEDAPKTSPPTPGKHGLEQTGEEKVMVTVPDKNPPCPCCGTRVNSVLNLIEHLKVSHGKRGVCFRCAKCGKENSNYHSVVCHFKKCRGPETEKAPAGEWICEVCNRDFTTKIGLGQHKRLAHPAVRNQERIVASQPKETSNRGAHKRCWTKEEEELLIRLEAQFEGNKNINKLIAEHITTKTAKQISDKRRLLSRKPAEEPREEPGTCHHTRRAAASLRTEPEMSHHAQAEDRDNGPGRRPLPGRAAAGGRTMDEIRRHPDKGNGQQRPTKQKSEEQLQAYYKKTLEERLSAGALNTFPRAFKQVMEGRDIKLVINQTAQDCFGCLESISQIRTATRDKKDTVTREKHPKKPFQKWMKKRAIKKGNYLRFQRLFYLDRGKLAKIILDDIECLSCDIPLSEIYSVFKTRWETTGSFKSLGDFKTYGKADNTAFRELITAKEIEKNVQEMSKGSAPGPDGITLGDVVKMDPEFSRTMEIFNLWLTTGKIPDMVRGCRTVLIPKSSKPDRLKDINNWRPITIGSILLRLFSRIVTARLSKACPLNPRQRGFIRAAGCSENLKLLQTIIWSAKREHRPLGVVFVDIAKAFDTVSHQHIIHALQQREVDPHIVGLVSNMYENISTYITTKRNTHTDKIQIRVGVKQGDPMSPLLFNLAMDPLLCKLEESGKGYHRGQSSITAMAFADDLVLLSDSWENMNTNISILETFCNLTGLKTQGQKCHGFYIKPTKDSYTINDCAAWTINGTPLNMIDPGESEKYLGLQFDPWIGIARSGLSTKLDFWLQRIDQAPLKPLQKTDILKTYTIPRLIYIADHSEVKSALLETLDQKIRTAVKEWLHLPPCTCDAILYSSTRDGGLGITKLAGLIPSVQARRLHRIAQSSDDTMKCFMEKEKMEQLHKKLWIQAGGDRENIPSIWEAPPSSEPPNNVSTNSEWEAPTQKDKFPKPCNWRKNEFKKWTKLASQGRGIVNFERDKISNHWIQYYRRIPHRKLLTALQLRANVYPTREFLARGRQDQYIKACRHCDADNESCAHIIGNCPVTQDARIKRHNYICELLLEEAKKKDWVVFKEPHIRDSNKELYKPDLIFVKDGRALVVDVTVRYEAAKSSLEEAAAEKVRKYKHLETEVRHLTNAKDVTFVGFPLGARGKWHQDNFKLLTELGLSKSRQVKMAETFSTVALFSSVDIVHMFASRARKSMVM

SEQ ID NO: 1730 - protein, 1390 aa, synthetic construct
MASCPKPGPPVSAGAMSLESGLTTHSVLAIERGPNSLANSGSDFGGGGLGLPLRLLRVSVGTQTSRSDWVDLVSWSHPGPTSKSQQVDLVSLFPKHRVDLLSKNDQVDLVAQFLPSKFPPNLAENDLALLVNLEFYRSDLHVYECVHKAAHWEGLSGLPEVYEQLAPQPCVGETLHSSLPRDSELFVPEEGSSEKESEDAPKTSPPTPGKHGLEQTGEEKVMVTVPDKNPPCPCCGTRVNSVLNLIEHLKVSHGKRGVCFRCAKCGKENSNYHSVVCHFKKCRGPETEKAPAGEWICEVCNRDFTTKIGLGQHKRLAHPAVRNQERIVASQPKETSNRGAHKRCWTKEEEELLIRLEAQFEGNKNINKLIAEHITTKTAKQISDKRRLLSRKPAEEPREEPGTCHHTRRAAASLRTEPEMSHHAQAEDRDNGPGRRPLPGRAAAGGRTMDEIRRHPDKGNGQQRPTKQKSEEQLQAYYKKTLEERLSAGALNTFPRAFKQVMEGRDIKLVINQTAQDCFGCLESISQIRTATRDKKDTVTREKHPKKPFQKWMKKRAIKKGNYLRFQRLFYLDRGKLAKIILDDIECLSCDIPLSEIYSVFKTRWETTGSFKSLGDFKTYGKADNTAFRELITAKEIEKNVQEMSKGSAPGPDGITLGDVVKMDPEFSRTMEIFNLWLTTGKIPDMVRGCRTVLIPKSSKPDRLKDINNWRPITIGSILLRLFSRIVTARLSKACPLNPRQRGFIRAAGCSENLKLLQTIIWSAKREHRPLGVVFVDIAKAFDTVSHQHIIHALQQREVDPHIVGLVSNMYENISTYITTKRNTHTDKIQIRVGVKQGDPMSPLLFNLAMDPLLCKLEESGKGYHRGQSSITAMAFADDLVLLSDSWEGMNTNISILETFCNLTGLKTQGQKCHGFYIKPTKDSYTINDCAAWTINGTPLNMIDPGESEKYLGLQFDPWIGIARSGLSTKLDFWLQRIDQAPLKPLQKTDILKTYTIPRLIYIADHSEVKSALLETLDQKIRTAVKEWLHLPPCTCDAILYSSTRDGGLGITKLAGLIPSVQARRLHRIAQSSDDTMKCFMEKEKMEQLHKKLWIQAGGDRENIPSIWEAPPSSEPPNNVSTNSEWEAPTQKDKFPKPCNWRKNEFKKWTKLASQGRGIVNFERDKISNHWIQYYRRIPHRKLLTALQLRANVYPTREFLARGRQDQYIKACRHCDADNESCAHIIGNCPVTQDARIKRHNYICELLLEEAKKKDWVVFKEPHIRDSNKELYKPDLIFVKDGRALVVDVTVRYEAAKSSLEEAAAEKVRKYKHLETEVRHLTNAKDVTFVGFPLGARGKWHQDNFKLLTELGLSKSRQVKMAETFSTVALFSSVDIVHMFASRARKSMVM

SEQ ID NO: 1731 - protein, 1390 aa, synthetic construct
MASCPKPGPPVSAGAMSLESGLTTHSVLAIERGPNSLANSGSDFGGGGLGLPLRLLRVSVGTQTSRSDWVDLVSWSHPGPTSKSQQVDLVSLFPKHRVDLLSKNDQVDLVAQFLPSKFPPNLAENDLALLVNLEFYRSDLHVYECVHKAAHWEGLSGLPEVYEQLAPQPCVGETLHSSLPRDSELFVPEEGSSEKESEDAPKTSPPTPGKHGLEQTGEEKVMVTVPDKNPPCPCCGTRVNSVLNLIEHLKVSHGKRGVCFRCAKCGKENSNYHSVVCHFKKCRGPETEKAPAGEWICEVCNRDFTTKIGLGQHKRLAHPAVRNQERIVASQPKETSNRGAHKRCWTKEEEELLIRLEAQFEGNKNINKLIAEHITTKTAKQISDKRRLLSRKPAEEPRMEPGTCHHTRRAAASLRTEPEMSHHAQAEDRDNGPGRRPLPGRAAAGGRTMDEIRRHPDKGNGQQRPTKQKSEEQLQAYYKKTLEERLSAGALNTFPRAFKQVMEGRDIKLVINQTAQDCFGCLESISQIRTATRDKKDTVTREKHPKKPFQKWMKKRAIKKGNYLRFQRLFYLDRGKLAKIILDDIECLSCDIPLSEIYSVFKTRWETTGSFKSLGDFKTYGKADNTAFRELITAKEIEKNVQEMSKGSAPGPDGITLGDVVKMDPEFSRTMEIFNLWLTTGKIPDMVRGCRTVLIPKSSKPDRLKDINNWRPITIGSILLRLFSRIVTARLSKACPLNPRQRGFIRAAGCSENLKLLQTIIWSAKREHRPLGVVFVDIAKAFDTVSHQHIIHALQQREVDPHIVGLVSNMYENISTYITTKRNTHTDKIQIRVGVKQGDPMSPLLFNLAMDPLLCKLEESGKGYHRGQSSITAMAFADDLVLLSDSWENMNTNISILETFCNLTGLKTQGQKCHGFYIKPTKDSYTINDCAAWTINGTPLNMIDPGESEKYLGLQFDPWIGIARSGLSTKLDFWLQRIDQAPLKPLQKTDILKTYTIPRLIYIADHSEVKSALLETLDQKIRTAVKEWLHLPPCTCDAILYSSTRDGGLGITKLAGLIPSVQARRLHRIAQSSDDTMKCFMEKEKMEQLHKKLWIQAGGDRENIPSIWEAPPSSEPPNNVSTNSEWEAPTQKDKFPKPCNWRKNEFKKWTKLASQGRGIVNFERDKISNHWIQYYRRIPHRKLLTALQLRANVYPTREFLARGRQDQYIKACRHCDADNESCAHIIGNCPVTQDARIKRHNYICELLLEEAKKKDWVVFKEPHIRDSNKELYKPDLIFVKDGRALVVDVTVRYEAAKSSLEEAAAEKVRKYKHLETEVRHLTNAKDVTFVGFPLGARGKWHQDNFKLLTELGLSKSRQVKMAETFSTVALFSSVDIVHMFASRARKSMVM

SEQ ID NO: 1732 - protein, 1390 aa, synthetic construct
MASCPKPGPPVSAGAMSLESGLTTHSVLAIERGPNSLANSGSDFGGGGLGLPLRLLRVSVGTQTSRSDWVDLVSWSHPGPTSKSQQVDLVSLFPKHRVDLLSKNDQVDLVAQFLPSKFPPNLAENDLALLVNLEFYRSDLHVYECVHKAAHWEGLSGLPEVYEQLAPQPCVGETLHSSLPRDSELFVPEEGSSEKESEDAPKTSPPTPGKHGLEQTGEEKVMVTVPDKNPPCPCCGTRVNSVLNLIEHLKVSHGKRGVCFRCAKCGKENSNYHSVVCHFKKCRGPETEKAPAGEWICEVCNRDFTTKIGLGQHKRLAHPAVRNQERIVASQPKETSNRGAHKRCWTKEEEELLIRLEAQFEGNKNINKLIAEHITTKTAKQISDKRRLLSRKPAEEPREEPGTCHHTRRAAASLRTEPEMSHHAQAEDRDNGPGRRPLPGRAAAGGRTMDEIRRHPDKGNGQQRPTKQKSEEQLQAYYKKTLEERLSAGALNTFPRAFKQVMEGRDIKLVINQTAQDCFGCLESISQIRTATRDKKDTVTREKHPKKPFQKWMKKRAIKKGNYLRFQRLFYLDRGKLAKIILDDIECLSCDIPLSEIYSVFKTRWETTGSFKSLGDFKTYGKADNTAFRELITAKEIEKNVQEMSKGSAPGPDGITLGDVVKMDPEFSRTMEIFNLWLTTGKIPDMVRGCRTVLIPKSSKPDRLKDINNWRPITIGSILLRLFSRIVTARLSKACPLNPRQRGFIRAAGCSENLKLLQTIIWSAKREHRPLGVVFVDIAKAFDTVSHQHIIHALQQREVDPHIVGLVSNMYENISTYITTKRNTHTDKIQIRVGVKQGDPMSPLLFNLAMDPLLCKLEESGKGYHRGQSSITAMAFADDLVLLSDSWENMNTNISILETFCNLTGLKTQGQKCHGFYIKPTKKSYTINDCAAWTINGTPLNMIDPGESEKYLGLQFDPWIGIARSGLSTKLDFWLQRIDQAPLKPLQKTDILKTYTIPRLIYIADHSEVKSALLETLDQKIRTAVKEWLHLPPCTCDAILYSSTRDGGLGITKLAGLIPSVQARRLHRIAQSSDDTMKCFMEKEKMEQLHKKLWIQAGGDRENIPSIWEAPPSSEPPNNVSTNSEWEAPTQKDKFPKPCNWRKNEFKKWTKLASQGRGIVNFERDKISNHWIQYYRRIPHRKLLTALQLRANVYPTREFLARGRQDQYIKACRHCDADNESCAHIIGNCPVTQDARIKRHNYICELLLEEAKKKDWVVFKEPHIRDSNKELYKPDLIFVKDGRALVVDVTVRYEAAKSSLEEAAAEKVRKYKHLETEVRHLTNAKDVTFVGFPLGARGKWHQDNFKLLTELGLSKSRQVKMAETFSTVALFSSVDIVHMFASRARKSMVM

SEQ ID NO: 1733 - protein, 1390 aa, synthetic construct
MASCPKPGPPVSAGAMSLESGLTTHSVLAIERGPNSLANSGSDFGGGGLGLPLRLLRVSVGTQTSRSDWVDLVSWSHPGPTSKSQQVDLVSLFPKHRVDLLSKNDQVDLVAQFLPSKFPPNLAENDLALLVNLEFYRSDLHVYECVHKAAHWEGLSGLPEVYEQLAPQPCVGETLHSSLPRDSELFVPEEGSSEKESEDAPKTSPPTPGKHGLEQTGEEKVMVTVPDKNPPCPCCGTRVNSVLNLIEHLKVSHGKRGVCFRCAKCGKENSNYHSVVCHFKKCRGPETEKAPAGEWICEVCNRDFTTKIGLGQHKRLAHPAVRNQERIVASQPKETSNRGAHKRCWTKEEEELLIRLEAQFEGNKNINKLIAEHITTKTAKQISDKRRLLSRKPAEEPRMEPGTCHHTRRAAASLRTEPEMSHHAQAEDRDNGPGRRPLPGRAAAGGRTMDEIRRHPDKGNGQQRPTKQKSEEQLQAYYKKTLEERLSAGALNTFPRAFKQVMEGRDIKLVINQTAQDYFGCLESISQIRTATRDKKDTVTREKHPKKPFQKWMKKRAIKKGNYLRFQRLFYLDRGKLAKIILDDIECLSCDIPLSEIYSVFKTRWETTGSFKSLGDFKTYGKADNTAFRELITAKEIEKNVQEMSKGSAPGPDGITLGDVVKMDPEFSRTMEIFNLWLTTGKIPDMVRGCRTVLIPKSSKPDRLKDINNWRPITIGSILLRLFSRIVTARLSKACPLNPRQRGFIRAAGCSENLKLLQTIIWSAKREHRPLGVVFVDIAKAFDTVSHQHIIHALQQREVDPHIVGLVSNMYENISTYITTKRNTHTDKIQIRVGVKQGDPMSPLLFNLAMDPLLCKLEESGKGYHRGQSSITAMAFADDLVLLSDSWENMNTNISILETFCNLTGLKTQGQKCHGFYIKPTKDSYTINDCAAWTINGTPLNMIDPGESEKYLGLQFDPWIGIARSGLSTKLDFWLQRIDQAPLKPLQKTDILKTYTIPRLIYIADHSEVKSALLETLDQKIRTAVKEWLHLPPCTCDAILYSSTRDGGLGITKLAGLIPSVQARRLHRIAQSSDDTMKCFMEKEKMEQLHKKLWIQAGGDRENIPSIWEAPPSSEPPNNVSTNSEWEAPTQKDKFPKPCNWRKNEFKKWTKLASQGRGIVNFERDKISNHWIQYYRRIPHRKLLTALQLRANVYPTREFLARGRQDQYIKACRHCDADNESCAHIIGNCPVTQDARIKRHNYICELLLEEAKKKDWVVFKEPHIRDSNKELYKPDLIFVKDGRALVVDVTVRYEAAKSSLEEAAAEKVRKYKHLETEVRHLTNAKDVTFVGFPLGARGKWHQDNFKLLTELGLSKSRQVKMAETFSTVALFSSVDIVHMFASRARKSMVM

SEQ ID NO: 1734 - protein, 1390 aa, synthetic construct
MASCPKPGPPVSAGAMSLESGLTTHSVLAIERGPNSLANSGSDFGGGGLGLPLRLLRVSVGTQTSRSDWVDLVSWSHPGPTSKSQQVDLVSLFPKHRVDLLSKNDQVDLVAQFLPSKFPPNLAENDLALLVNLEFYRSDLHVYECVHKAAHWEGLSGLPEVYEQLAPQPCVGETLHSSLPRDSELFVPEEGSSEKESEDAPKTSPPTPGKHGLEQTGEEKVMVTVPDKNPPCPCCGTRVNSVLNLIEHLKVSHGKRGVCFRCAKCGKENSNYHSVVCHFKKCRGPETEKAPAGEWICEVCNRDFTTKIGLGQHKRLAHPAVRNQERIVASQPKETSNRGAHKRCWTKEEEELLIRLEAQFEGNKNINKLIAEHITTKTAKQISDKRRLLSRKPAEEPREEPGTCHHTRRAAASLRTEPEMSHHAQAEDRDNGPGRRPLPGRAAAGGRTMDEIRRHPDKGNGQQRPTKQKSEEQLQAYYKKTLEERLSAGALNTFPRAFKQVMEGRDIKLVINQTAQDYFGCLESISQIRTATRDKKDTVTREKHPKKPFQKWMKKRAIKKGNYLRFQRLFYLDRGKLAKIILDDIECLSCDIPLSEIYSVFKTRWETTGSFKSLGDFKTYGKADNTAFRELITAKEIEKNVQEMSKGSAPGPDGITLGDVVKMDPEFSRTMEIFNLWLTTGKIPDMVRGCRTVLIPKSSKPDRLKDINNWRPITIGSILLRLFSRIVTARLSKACPLNPRQRGFIRAAGCSENLKLLQTIIWSAKREHRPLGVVFVDIAKAFDTVSHQHIIHALQQREVDPHIVGLVSNMYENISTYITTKRNTHTDKIQIRVGVKQGDPMSPLLFNLAMDPLLCKLEESGKGYHRGQSSITAMAFADDLVLLSDSWEGMNTNISILETFCNLTGLKTQGQKCHGFYIKPTKDSYTINDCAAWTINGTPLNMIDPGESEKYLGLQFDPWIGIARSGLSTKLDFWLQRIDQAPLKPLQKTDILKTYTIPRLIYIADHSEVKSALLETLDQKIRTAVKEWLHLPPCTCDAILYSSTRDGGLGITKLAGLIPSVQARRLHRIAQSSDDTMKCFMEKEKMEQLHKKLWIQAGGDRENIPSIWEAPPSSEPPNNVSTNSEWEAPTQKDKFPKPCNWRKNEFKKWTKLASQGRGIVNFERDKISNHWIQYYRRIPHRKLLTALQLRANVYPTREFLARGRQDQYIKACRHCDADNESCAHIIGNCPVTQDARIKRHNYICELLLEEAKKKDWVVFKEPHIRDSNKELYKPDLIFVKDGRALVVDVTVRYEAAKSSLEEAAAEKVRKYKHLETEVRHLTNAKDVTFVGFPLGARGKWHQDNFKLLTELGLSKSRQVKMAETFSTVALFSSVDIVHMFASRARKSMVM

SEQ ID NO: 1735 - protein, 1390 aa, synthetic construct
MASCPKPGPPVSAGAMSLESGLTTHSVLAIERGPNSLANSGSDFGGGGLGLPLRLLRVSVGTQTSRSDWVDLVSWSHPGPTSKSQQVDLVSLFPKHRVDLLSKNDQVDLVAQFLPSKFPPNLAENDLALLVNLEFYRSDLHVYEGVHKAAHWEGLSGLPEVYEQLAPQPCVGETLHSSLPRDSELFVPEEGSSEKESEDAPKTSPPTPGKHGKRQTGEEKVMVTVPDKNPPCPCCGTRVNSVLNLIEHLKVSHGKRRVCFRCAKCGKENSNYHSVVCHFKKCRGPETEKAPAGEWICEVCNRDFTTKIGLGQHKRLAHPAVRNQERIVASQPKETSNRGAHKRCWTKEEEELLIRLEAQFEGNKNINKLIAEHITTKTAKQISDKRRLLSRKPAEEPREEPGTCHHTRRAAASLRTEPEMSHHAQAEDRDNGPGRRPLPGRAAAGGRTMDEIRRHPDKGNGQQRPTKQKSEEQLQAYYKKTLEERLSAGALNTFPRAFKQVMEGRDIKLVINQTAQDCFGCLESISQIRTATRDKKYTVTRKKHPKKPFQKWMKKRAIKKGNYLRFQRLFYLDRGKLAKIILDDIECLSCDIPLSEIYSVFKTRWETTGSFKSLGDFKTYGKADNTAFRELITAKEIEKNVQEMSKGSAPGPDGITLGDVVKMDPEGSRTMEIFNLWLTTGKIPDMVRGCRTVLIPKSSDPDRLKDINNWRPITIGSILLRLFSRIVTARLSKACPLNPRQRGFIRAAGCSENLKLLQTIIWSAKREHRPLGVVFVDIAKAFDTVSHQHIIHALQQREVDPHIVGLVSNMYENISTYITTKRNTHTDKIQIRVGVKQGDPMSPLLFNLAMDPLLCKLEESGKGYHRGQSSITAMAFADDLVLLSDSWEGMNTNISILETFCNLTGLKTQGQKCHGFYIKPTKKSYTINDCAAWTINGTPLNMIDPGESEKYLGLQFDPWIGIARSGLSTKLDFWLQRIDQAPLKPLQKLDILKTYTIPRLIYIADHSEVKTALLETLDQKIRTAVKEWLHLPPCTCDAILYSSTRDGGLGITKLAGLIPSVQARRLHRIAQSSDDTMKCFMEKEKMEQLHKKLWIQAGGDRENIPSIWEAPPSSEPPNNVSTNSEWEAPTQKDKFPKPCNWRKNEFKKWTKLASQGRGIVNFERDKISNHWIQYYRRIPHRKLLTALQLRANVYPTREFLARGRQDQYIKACRHCDADIESCAHIIGNCPVTQDARIKRHNKICELLLEEAKKKDWVVFKEPHIRDSNKELYKPDLIFVKDGRALVVDVTVRYEAAKSSLEEAAAEKVRKYKHLETEVRHLTNAKDVTFVGFPLGARGKWHQDNFKLLTELGLSKSRQVKMAETFSTVALFSSVDIVHMFASRARKSMVM

SEQ ID NO: 1736 - protein, 1390 aa, synthetic construct
MASCPKPGPPVSAGAMSLESGLTTHSVLAIERGPNSLANSGSDFGGGGLGLPLRLLRVSVGTQTSRSDWVDLVSWSHPGPTSKSQQVDLVSLFPKHRVDLLSKNDQVDLVAQFLPSKFPPNLAENDLALLVNLEFYRSDLHVYECVHKAAHWEGLSGLPEVYEQLAPQPCVGETLHSSLPRDSELFVPEEGSSEKESEDAPKTSPPTPGKHGLEQTGEEKVMVTVPDKNPPCPCCGTRVNSVLNLIEHLKVSHGKRRVCFRCAKCGKENSNYHSVVCHFPKCRGPETEKAPAGEWICEVCNRDFTTKIGLGQHKRLAHPAVRNQERIVASQPKETSNRGAHKRCWTKEEEELLIRLEAQFEGHKNINKLIAEHITTKTAKQISDKRRLLSRKPAEEPREEPGTCHHTRRAAASLRTEPEMSHHAQAEDRDNGPGRRPLPGRAAAGGRTMDEIRRHPDKGNGQQRPTKQKSEEQLQAYYKKTLEERLSAGALNTFPRAFKQVMEGRDIKLVINQTAQDCFGCLESISQIRTATRDKKYTVTREKHPKRPFQKWMKDRAIKKGNYLRFQRLFYLDRGKLAKIILDDIECLSCDIPLSEIYSVFKTRWETTGSFKSLGDFKTYGKADNTAFRELITAKEIEKNVQEMSKGSAPGPDGITLGDVVKMDPEFSLTMEIFNLWLTTGKIPDMVRGCRTVLIPKSSKPDRLKDINNWRPITIGSILLRLFSRIVTARLSKACPLNPRQRGFIRAAGCSENLKLLQTIIWSAKREHRPLGVVFVDIAKAFDTVSHQHIIHALQQREVDPHIVGLVSNMYENISTYITTKRNTHTDKIQIRVGVKQGDPMSPLLFNLAMDPLLCKLEESGKGYHRGQSSITAMAFADDLVLLSDSWENMNTNISILETFCNLTGLKTQGQKCHGFYIKPTKDSYTINDCAAWTINGTPLNMIDPGESEKYLGLQFDPWIGIARSGLSTKLDEWLQRIDQAPLKPLQKTDILKTYTIPRLIYIADHSEVKAALLETLDQKIRTAVKEWLHLPPCTCDAILYSSTRDGGLGITKLAGLIPSVQARRLHRIAQSSDDTMKCFMEKERMEQLHKKLWIQAGGDRENIPSIWEAPPSSEPPNNVSTNSEWEAPTQKPKFPKPCNWRKNEFKKWTKLASQGRGIVNFERDKISNHWIQYYRRIPHRKLLTALQLRANVYPTREFLARGRQDQYIKACRHCDADIESCAHIIGNCPVTQDARIKRHNYICELLLEEAKKKDWVVFKEPHIRDSNKELYKPDLIFVKDGRALVVDVTVRYEAAKSSLEEAAAEKVRKYKHLETEVRHLTNAKDVTFVGFPLGARGKWHQDNFKLLTELGLSKSRQVKMAETFSTVALFSSVDIVHMFASRARKSMVM

SEQ ID NO: 1737 - protein, 1390 aa, synthetic construct
MASCPKPGPPVSAGAMSLESGLTTHSVLAIERGPNSLANSGSDFGGGGLGLPLRLLRVSVGTQTSRSDWVDLVSWSHPGPTSKSQQVDLVSLFPKHRVDLLSKNDQVDLVAQFLPSKFPPNLAENDLALLVNLEFYRSDLHVYECVHKAAHWEGLSGLPEVYEQLAPQPCVGETLHSSLPRDSELFVPEEGSSEKESEDAPKTSPPTPGKHGLEQTGEEKVMVTVPDKNPPCPCCGTRVNSVLNLIEHLKVSHGKRGVCFRCAKCGKENSNYHSVVCHFKKCRGPETEKAPAGEWICEVCNRDFTTKIGLGQHKRLAHPAVRNQERIVASQPKETSNRGAHKRCWTKEEEELLIRLEAQFEGHKNINKLIAEHITTKTAKQISDKRRLLSRKPAEEPREEPGTCHHTRRAAASLRTEPEMSHHAQAEDRDNGPGRRPLPGRAAAGGRTMDEIRRHPDKGNGQQRPTKQKSEEQLQAYYKKTLEERLSAGALNTFPRAFKQVMEGRDIKLVINQTAQDCFGCLESISQIRTATRDKKYTVTREKHPKRPFQKWMKKRAIKKGNYLRFQRLFYLDRGKLAKIILDDIECLSCDIPLSEIYSVFKTRWETTGSFKSLGDFKTYGKADNTAFRELITAKEIEKNVQEMSKGSAPGPDGITLGDVVKMDPEFSLTMEIFNLWLTTGKIPDMVRGCRTVLIPKSSKPDRLKDINNWRPITIGSILLRLFSRIVTARLSKACPLNPRQRGFIRAAGCSENLKLLQTIIWSAKREHRPLGVVFVDIAKAFDTVSHQHIIHALQQREVDPHIVGLVSNMYENISTYITTKRNTHTDKIQIRVGVKQGDPMSPLLFNLAMDPLLCKLEESGKGYHRGQSSITAMAFADDLVLLSDSWENMNTNISILETFCNLTGLKTQGQKCHGFYIKPTKDSYTINDCAAWTINGTPLNMIDPGESEKYLGLQFDPWIGIARSGLSTKLDEWLQRIDQAPLKPLQKTDILKTYTIPRLIYIADHSEVKAALLETLDQKIRTAVKEWLHLPPCTCDAILYSSTRDGGLGITKLAGLIPSVQARRLHRIAQSSDDTMKCFMEKERMEQLHKKLWIQAGGDRENIPSIWEAPPSSEPPNNVSTNSEWEAPTQKPKFPKPCNWRKNEFKKWTKLASQGRGIVNFERDKISNHWIQYYRRIPHRKLLTALQLRANVYPTREFLARGRQDQYIKACRHCDADIESCAHIIGNCPVTQDARIKRHNYICELLLEEAKKKDWVVFKEPHIRDSNKELYKPDLIFVKDGRALVVDVTVRYEAAKSSLEEAAAEKVRKYKHLETEVRHLTNAKDVTFVGFPLGARGKWHQDNFKLLTELGLSKSRQVKMAETFSTVALFSSVDIVHMFASRARKSMVM

SEQ ID NO: 1738 - protein, 1671 aa, synthetic construct
MGTALTPLLTKFATRYEMGTTPEEVANTLKQTCFKGQVNDSQMVALLIVADQYKLNPFTKELYAFPDKNNGIVPVVGVDGWARIINENPQFDGMEFSMDQQGTECTCKIYRKDRSHAISATEYMAECKRNTQPWQSHPRRMLRHKAMIQCARLAFGFAGIYDQDEAERIVERDVTPAEQYEDVSEAICLIKDSPTMEDLQAAFSNAWKAYKTKGARDQLTAAKDQRKKELLDAPIDVEFEETGDDRAASGGSSGGSSGSETPGTSESATPESSGGSSGGSSMASCPKPGPPVSAGAMSLESGLTTHSVLAIERGPNSLANSGSDFGGGGLGLPLRLLRVSVGTQTSRSDWVDLVSWSHPGPTSKSQQVDLVSLFPKHRVDLLSKNDQVDLVAQFLPSKFPPNLAENDLALLVNLEFYRSDLHVYECVHKAAHWEGLSGLPEVYEQLAPQPCVGETLHSSLPRDSELFVPEEGSSEKESEDAPKTSPPTPGKHGLEQTGEEKVMVTVPDKNPPCPCCGTRVNSVLNLIEHLKVSHGKRRVCFRCAKCGKENSNYHSVVCHFPKCRGPETEKAPAGEWICEVCNRDFTTKIGLGQHKRLAHPAVRNQERIVASQPKETSNRGAHKRCWTKEEEELLIRLEAQFEGHKNINKLIAEHITTKTAKQISDKRRLLSRKPAEEPRMEPGTCHHTRRAAASLRTEPEMSHHAQAEDRDNGPGRRPLPGRPAAGGRTMDEIRRHPDKGNGQQRPTKQKSEEQLQAYYKKTLEERLSAGALNTFPRAFKQVMEGRDIKLVINQTAQDCFGCLESISQIRTATRDKKYTVTREKHPKRPFQKWMKDRAIKKGNYLRFQRLFYLDRGKLAKIILDDIECLSCDIPLSEIYSVFKTRWETTGSFKSLGDFKTYGKADNTAFRELITAKEIEKNVQEMSKGSAPGPDGITLGDVVKMDPEFSLTMEIFNLWLTTGKIPDMVRGCRTVLIPKSSKPDRLKDINNWRPITIGSILLRLFSRIVTARLSKACPLNPRQRGFIRAAGCSENLKLLQTIIWSAKREHRPLGVVFVDIAKAFDTVSHQHIIHALQQREVDPHIVGLVSNMYENISTYITTKRNTHTDKIQIRVGVKQGDPMSPLLFNLAMDPLLCKLEESGKGYHRGQSSITAMAFADDLVLLSDSWENMNTNISILETFCNLTGLKTQGQKCHGFYIKPTKDSYTINDCAAWTINGTPLNMIDPGESEKYLGLQFDPWIGIARSGLSTKLDEWLQRIDQAPLKPLQKTDILKTYTIPRLIYIADHSEVKAALLETLDQKIRTAVKEWLHLPPCTCDAILYSSTRDGGLGITKLAGLIPSVQARRLHRIAQSSDDTMKCFMEKERMEQLHKKLWIQAGGDRENIPSIWEAPPSSEPPNNVSTNSEWEAPTQKPKFPKPCNWRKNEFKKWTKLASQGRGIVNFERDKISNHWIQYYRRIPHRKLLTALQLRANVYPTREFLARGRQDQYIKACRHCDADIESCAHIIGNCPVTQDARIKRHNYICELLLEEAKKKDWVVFKEPHIRDSNKELYKPDLIFVKDGRALVVDVTVRYEAAKSSLEEAAAEKVRKYKHLETEVRHLTNAKDVTFVGFPLGARGKWHQDNFKLLTELGLSKSRQVKMAETFSTVALFSSVDIVHMFASRARKSMVM

SEQ ID NO: 1739 - protein, 1390 aa, synthetic construct
MASCPKPGPPVSAGAMSLESGLTTHSVLAIERGPNSLANSGSDFGGGGLGLPLRLLRVSVGTQTSRSDWVDLVSWSHPGPTSKSQQVDLVSLFPKHRVDLLSKNDQVDLVAQFLPSKFPPNLAENDLALLVNLEFYRSDLHVYEGVHKAAHWEGLSGLPEVYEQLAPQPCVGETLHSSLPRDSELFVPEEGSSEKESEDAPKTSPPTPGKHGLRQTGEEKVMVTVPDKNPPCPCCGTRVNSVLNLIEHLKVSHGKRGVCFRCAKCGKENSNYHSVVCHFKKCRGPETEKAPAGEWICEVCNRDFTTKIGLGQHKRLAHPAVRNQERIVASQPKETSNRGAHKRCWTKEEEELLIRLEAQFEGNKNINKLIAEHITTKTAKQISDKRRLLSRKPAEEPRMEPGTCHHTRRAAASLRTEPEMSHHAQAEDRDNGPGRRPLPGRAAAGGRTMDEIRRHPDKGNGQQRPTKQKSEEQLQAYYKKTLEERLSAGALNTFPRAFKQVMEGRDIKLVINQTAQDCFGCLESISQIRTATRDKKDTVTREKHPKKPFQKWMKKRAIKKGNYLRFQRLFYLDRGKLAKIILDDIECLSCDIPLSEIYSVFKTRWETTGSFKSLGDFKTYGKADNTAFRELITAKEIEKNVQEMSKGSAPGPDGITLGDVVKMDPEFSRTMEIFNLWLTTGKIPDMVRGCRTVLIPKSSDPDRLKDINNWRPITIGSILLRLFSRIVTARLSKACPLNPRQRGFIRAAGCSENLKLLQTIIWSAKREHRPLGVVFVDIAKAFDTVSHQHIIHALQQREVDPHIVGLVSNMYENISTYITTKRNTHTDKIQIRVGVKQGDPMSPLLFNLAMDPLLCKLEESGKGYHRGQSSITAMAFADDLVLLSDSWENMNTNIKILETFCNLTGLKTQGQKCHGFYIKPTKKSYTINDCAAWTINGTPLNMIDPGESEKYLGLQFDPWIGIARSGLSTKLDFWLQRIDQAPLKPLQKLDILKTYTIPRLIYIADHSEVKSALLETLDQKIRTAVKEWLHLPPCTCDAILYSSTRDGGLGITKLAGLIPSVQARRLHRIAQSSDDTMKCFMEKEKMEQLHKKLWIQAGGDRENIPSIWEAPPSSEPPNNVSTNSEWEAPTQKDKFPKPCNWRKNEFKKWTKLASQGRGIVNFERDKISNHWIQYYRRIPHRKLLTALQLRANVYPTREFLARGRQDQYIKACRHCDADNESCAHIIGNCPVTQDARIKRHNKICELLLEEAKKKDWVVFKEPHIRDSNKELYKPDLIFVKDGRALVVDVTVRYEAAKSSLEEAAAEKVRKYKHLETEVRHLTNAKDVTFVGFPLGARGKWHQDNFKLLTELGLSKSRQVKMAETFSTVALFSSVDIVHMFASRARKSMVM

SEQ ID NO: 1740 - protein, 1464 aa, synthetic construct
MAPKKKRKVVTVKFKYKGEEKEVDISKIKKVWRVGKMISFTYDDNGKTGRGAVSEKDAPKELLQMLEKSGSETPGTSESATPESYEQLAPQPCVGETLHSSLPRDSELFVPEEGSSEKESEDAPKTSPPTPGKHGLEQTGEEKVMVTVPDKNPPCPCCGTRVNSVLNLIEHLKVSHGKRGVCFRCAKCGKENSNYHSVVCHFKKCRGPETEKAPAGEWICEVCNRDFTTKIGLGQHKRLAHPAVRNQERIVASQPKETSNRGAHKRCWTKEEEELLIRLEAQFEGNKNINKLIAEHITTKTAKQISDKRRLLSRKPAEEPREEPGTCHHTRRAAASLRTEPEMSHHAQAEDRDNGPGRRPLPGRAAAGGRTMDEIRRHPDKGNGQQRPTKQKSEEQLQAYYKKTLEERLSAGALNTFPRAFKQVMEGRDIKLVINQTAQDCFGCLESISQIRTATRDKKDTVTREKHPKKPFQKWMKKRAIKKGNYLRFQRLFYLDRGKLAKIILDDIECLSCDIPLSEIYSVFKTRWETTGSFKSLGDFKTYGKADNTAFRELITAKEIEKNVQEMSKGSAPGPDGITLGDVVKMDPEFSRTMEIFNLWLTTGKIPDMVRGCRTVLIDTSNLMEQILSSDNLNRAYLQVVRNKGAEGVDGMKYTELKEHLAKNGETIKGQLRTAAYKPQPARRVEIPKPDGGVRNLGVPTVTDRFIQQAIAQVLTPIYEEQFHDHSYGFRPNRCAQQAILTALNIMNDGNDWIVDIDLEKFFDTVNHDKLMTLIGRTIADGDVISIVRKYLVSGIMIDDEYEDSIVGTPQGGNLSPLLANIMLNELDKEMEAAGLNFVRYADDCIIMVGSEMSANRVMRNISRFIEEKLGLKVNMTKSKVDRPSGLKYLGFGFYFDPRAHQFKAKPHAKSVAKFKKRMKELTCRSWGVSNSYKVEKLNQLIRGWINYFKIGSMKTLCKELDSRIRYRLRMCIWKQWKTPQNQEKNLVKLGIDRNTARRVAYTGKRIAYVCNKGAVNVAISNKRLASFQFDPWIGIARSGLSTKLDFWLQRIDQAPLKPLQKTDILKTYTIPRLIYIADHSEVKTALLETLDQKIRTAVKEWLHLPPCTCDAILYSSTRDGGLGITKLAGLIPSVQARRLHRIAQSSDDTMKCFMEKEKMEQLHKKLWIQAGGDRENIPSIWEAPPSSEPPNNVSTNSEWEAPTQKDKFPKPCNWRKNEFKKWTKLASQGRGIVNFERDKISNHWIQYYRRIPHRKLLTALQLRANVYPTREFLARGRQDQYIKACRHCDADIESCAHIIGNCPVTQDARIKRHNYICELLLEEAKKKDWVVFKEPHIRDSNKELYKPDLIFVKDARALVVDVTVRYEAAKSSLEEAAAEKVRKYKHLETEVRHLTNAKDVTFVGFPLGARGKWHQDNFKLLTELGLSKSRQVKMAETFSTVALFSSVDIVHMFASRARKSMVM

SEQ ID NO: 1741 - protein, 1529 aa, synthetic construct
MASCPKPGPPVSAGAMSLESGLTTHSVLAIERGPNSLANSGSDFGGGGLGLPLRLLRVSVGTQTSRSDWVDLVSWSHPGPTSKSQQVDLVSLFPKHRVDLLSKNDQVDLVAQFLPSKFPPNLAENDLALLVNLEFYRSDLHVYEGVHFAAHWEGLSGLPEVYEQLAPQPCVGETLHSSLPRDSELFVPEEGSSEKESEDAPKTSPPTPGKHGLEQTGEEKVMVTVPDKNPPCPCCGTRVNSVLNLIEHLKVSHGKRGVCFRCAKCGKENSNYHSVVCHFPKCRGPETEKAPAGEWICEVCNRDFTTKIGLGQHKRLAHPAVRNQERIVASQPKETSNRGAHKRCWTKEEEELLIRLEAQFEGNKNINKLIAEHITTKTAKQISDKRRLLSRKPAEEPREEPGTCHHTRRAAASLRTEPEMSHHAQAEDRDNGPGRRPLPGRAAAGGRTMDEIRRHPDKGNGQQRPTKQKSEEQLQAYYKKTLEERLSAGALNTFPRAFKQVMEGRDIKLVINQTAQDCFGCLESISQIRTATRDKKDTVTREKHPKKPFQKWMKKRAIKKGNYLRFQRLFYLDRGKLAKIILDDIECLSCDIPLSEIYSVFKTRWETTGSFKSLGDFKTYGKADNTAFRELITAKEIEKNVQEMSKGSAPGPDGITLGDVVKMDPEFSRTMEIFNLWLTTGKIPDMVRGCRTVLIDTSNLMEQILSSDNLNRAYLQVVRNKGAEGVDGMKYTELKEHLAKNGETIKGQLRTAAYKPQPARRVEIPKPDGGVRNLGVPTVTDRFIQQAIAQVLTPIYEEQFHDHSYGFRPNRCAQQAILTALNIMNDGNDWIVDIDLEKFFDTVNHDKLMTLIGRTIADGDVISIVRKYLVSGIMIDDEYEDSIVGTPQGGNLSPLLANIMLNELDKEMEAAGLNFVRYADDCIIMVGSEMSANRVMRNISRFIEEKLGLKVNMTKSKVDRPSGLKYLGFGFYFDPRAHQFKAKPHAKSVAKFKKRMKELTCRSWGVSNSYKVEKLNQLIRGWINYFKIGSMKTLCKELDSRIRYRLRMCIWKQWKTPQNQEKNLVKLGIDRNTARRVAYTGKRIAYVCNKGAVNVAISNKRLASFSSIPGSASLEAAAPSWTFGSNATRPPSLFRKPTFKLIRSPDSSTSPTTPRSRPACWKPWTRKSEPPSRNGCTCPLAHATLSCTAAPGTAAESPSPASSPACRLGDSTESPRAATTPSASWRRKRWSSCTRSCGSKRAEIVRTFPASGRPLPAQNLPITCPPILNGRLPPRRISFPSPATGGRTSSKNGQSWLARAGASTSKGTRLATTGSSTTEESPTESSSPPSSYVQTCTQPENSWPEADRTSTSRPAGTAMPISRAVLTSSATAPSPRTPESRDTTTSASYFWRKPRRRIGLCSRSPTSETPTRSCTSQTSSSRTLEPWWWTSPSDTRLLSPALRRLPPRKCGSTSTWKQRSDTSPTPRTLPSWASPVLEANGTRTTSSCLPSWASPRADRLRWPRPSAPSPCSLLWTLCTCSPPEPERAW

SEQ ID NO: 1742 - protein, 1904 aa, synthetic construct
MASCPKPGPPVSAGAMSLESGLTTHSVLAIERGPNSLANSGSDFGGGGLGLPLRLLRVSVGTQTSRSDWVDLVSWSHPGPTSKSQQVDLVSLFPKHRVDLLSKNDQVDLVAQFLPSKFPPNLAENDLALLVNLEFYRSDLHVYECVHFAAHWEGLSGLPEVYEQLAPQPCVGETLHSSLPRDSELFVPEEGSSEKESEDAPKTSPPTPGKHGLEQTGEEKVMVTVPDKNPPCPCCGTRVNSVLNLIEHLKVSHGKRGVCFRCAKCGKENSNYHSVVCHFPKCRGPETEKAPAGEWICEVCNRDFTTKIGLGQHKRLAHPAVRNQERIVASQPKETSNRGAHKRCWTKEEEELLIRLEAQFEGNKNINKLIAEHITTKTAKQISDKRRLLSRKPAEEPREEPGTCHHTRRAAASLRTEPEMSHHAQAEDRDNGPGRRPLPGRAAAGGRTMDEIRRHPDKGNGQQRPTKQKSEEQLQAYYKKTLEERLSAGALNTFPRAFKQVMEGRDIKLVINQTAQDCFGCLESISQIRTATRDKKDTVTREKHPKKPFQKWMKDRAIKKGNYLRFQRLFYLDRGKLAKIILDDIECLSCDIPLSEIYSVFKTRWETTGSFKSLGDFKTYGKADNTAFRELITAKEIEKNVQEMSKGSAPGPDGITLGDVVKMDPEFSRTMEIFNLWLTTGKIPDMVRGCRTVLIILDTDYITEDGKPVIRIFKKENGEFKIEYDRTFEPYLYALLKDDSAIEEVKKITAERHGTVVTVKRVEKVQKKFLGRPVEVWKLYFTHPQDVPAIMDKIREHPAVIDIYEYDIPFAIRYLIDKGLVPMEGDEELKLLAFDIETLYHEGEEFAEGPILMISYADEEGARVITWKNVDLPYVDVVSTEREMIKRFLRVVKEKDPDVLITYNGDNFDFAYLKKRCEKLGINFALGRDGSEPKIQRMGDRFAVEVKGRIHFDLYPVIRRTINLPTYTLEAVYEAVFGQPKEKVYAEEITTAWETGENLERVARYSMEDAKVTYELGKEFLPMEAQLSRLIGQSLWDVSRSSTGNLVEWFLLRKAYERNELAPNKPDEKELARRHQSHEGGYIKEPERGLWENIVYLDFRSLYPSIIITHNVSPDTLNREGCKEYDVAPQVGHRFCKDFPGFIPSLLGDLLEERQKIKKRMKATIDPIERKLLDYRQRAIKILANSLYGYYGYARARWYCKECAESVIAWGREYLTMTIKEIEEKYGFKVIYSDTDGFFATIPGADAETVKKKAMEFLKYINAKLPGALELEYEGFYKRGLFVTKKKYAVIDEEGKITTRGLEIVRRDWSEIAKETQARVLEALLKDGDVEKAVRIVKEVTEKLSKYEVPPEKLVIHKQITRDLKDYKATGPHVAVAKRLAARGVKIRPGTVISYIVLKGSGRIVDRAIPFDEFDPTKHKYDAEYYIEKQVLPAVERILRAFGYRKEDLRYQKTRQVGLSARLKPKGTQFDPWIGIARSGLSTKLDFWLQRIDQAPLKPLQKTDILKTYTIPRLIYIADHSEVKTALLETLDQKIRTAVKEWLHLPPCTCDAILYSSTRDGGLGITKLAGLIPSVQARRLHRIAQSSDDTMKCFMEKEKMEQLHKKLWIQAGGDRENIPSIWEAPPSSEPPNNVSTNSEWEAPTQKDKFPKPCNWRKNEFKKWTKLASQGRGIVNFERDKISNHWIQYYRRIPHRKLLTALQLRANVYPTREFLARGRQDQYIKACRHCDADIESCAHIIGNCPVTQDARIKRHNYICELLLEEAKKKDWVVFKEPHIRDSNKELYKPDLIFVKDARALVVDVTVRYEAAKSSLEEAAAEKVRKYKHLETEVRHLTNAKDVTFVGFPLGARGKWHQDNFKLLTELGLSKSRQVKMAETFSTVALFSSVDIVHMFASRARKSMVM

SEQ ID NO: 1743 - protein, 1625 aa, synthetic construct
MAPKKKRKVNISGSSCGSPNSADTSSDFKDLWTKLKECHDREVQGLQVKVTKLKQERILDAQRLEEFFTKNQQLREQQKVLHETIKVLEDRLRAGLCDRCAVTEEHMRKKQQEFENIRQQNLKLITELMNERNTLQEENKKLSEQLQQKIENDQQHQAAELECEEDVIPDSPITAFSFSGVNRLRRKENPHVRYIEQTHTKLEHSVCANEMRKVSKSSTHPQHNPNENEILVADTYDQSQSPMAKAHGTSSYTPDKSSFNLATVVAETLGLGVQEESETQGPMSPLGDELYHCLEGNHKKQPFESGSETPGTSESATPEGSVTVKFKYKGEEKEVDISKIKKVWRVGKMISFTYDDNGKTGRGAVSEKDAPKELLQMLEKSGSETPGTSESATPESYEQLAPQPCVGETLHSSLPRDSELFVPEEGSSEKESEDAPKTSPPTPGKHGLEQTGEEKVMVTVPDKNPPCPCCGTRVNSVLNLIEHLKVSHGKRGVCFRCAKCGKENSNYHSVVCHFKKCRGPETEKAPAGEWICEVCNRDFTTKIGLGQHKRLAHPAVRNQERIVASQPKETSNRGAHKRCWTKEEEELLIRLEAQFEGNKNINKLIAEHITTKTAKQISDKRRLLSRKPAEEPREEPGTCHHTRRAAASLRTEPEMSHHAQAEDRDNGPGRRPLPGRAAAGGRTMDEIRRHPDKGNGQQRPTKQKSEEQLQAYYKKTLEERLSAGALNTFPRAFKQVMEGRDIKLVINQTAQDCFGCLESISQIRTATRDKKDTVTREKHPKKPFQKWMKKRAIKKGNYLRFQRLFYLDRGKLAKIILDDIECLSCDIPLSEIYSVFKTRWETTGSFKSLGDFKTYGKADNTAFRELITAKEIEKNVQEMSKGSAPGPDGITLGDVVKMDPEFSRTMEIFNLWLTTGKIPDMVRGCRTVLIPKSSKPDRLKDINNWRPITIGSILLRLFSRIVTARLSKACPLNPRQRGFIRAAGCSENLKLLQTIIWSAKREHRPLGVVFVDIAKAFDTVSHQHIIHALQQREVDPHIVGLVSNMYENISTYITTKRNTHTDKIQIRVGVKQGDPMSPLLFNLAMDPLLCKLEESGKGYHRGQSSITAMAFADDLVLLSDSWENMNTNISILETFCNLTGLKTQGQKCHGFYIKPTKDSYTINDCAAWTINGTPLNMIDPGESEKYLGLQFDPWIGIARSGLSTKLDFWLQRIDQAPLKPLQKLDILKTYTIPRLIYIADHSEVKSALLETLDQKIRTAVKEWLHLPPCTCDAILYSSTRDGGLGITKLAGLIPSVQARRLHRIAQSSDDTMKCFMEKEKMEQLHKKLWIQAGGDRENIPSIWEAPPSSEPPNNVSTNSEWEAPTQKDKFPKPCNWRKNEFKKWTKLASQGRGIVNFERDKISNHWIQYYRRIPHRKLLTALQLRANVYPTREFLARGRQDQYIKACRHCDADNESCAHIIGNCPVTQDARIKRHNYICELLLEEAKKKDWVVFKEPHIRDSNKELYKPDLIFVKDGRALVVDVTVRYEAAKSSLEEAAAEKVRKYKHLETEVRHLTNAKDVTFVGFPLGARGKWHQDNFKLLTELGLSKSRQVKMAETFSTVALFSSVDIVHMFASRARKSMVM

SEQ ID NO: 1744 - protein, 1405 aa, synthetic construct
MAPKKKRKVVTVKFKYKGEEKEVDISKIKKVWRVGKMISFTYDDNGKTGRGAVSEKDAPKELLQMLEKSGSETPGTSESATPESPKRKVSSAEGAAKEEPKRRSARLSAKPPAKVEAKPKKAAAKDKSSDKKVQTKGKRGAKGKQAEVANQETKEDLPAENGETKTEESPASDEAGEKEAKSDSGSETPGTSESATPESLFVPEEGSSEKESEDAPKTSPPTPGKHGLEQTGEEKVMVTVPDKNPPCPCCGTRVNSVLNLIEHLKVSHGKRGVCFRCAKCGKENSNYHSVVCHFKKCRGPETEKAPAGEWICEVCNRDFTTKIGLGQHKRLAHPAVRNQERIVASQPKETSNRGAHKRCWTKEEEELLIRLEAQFEGNKNINKLIAEHITTKTAKQISDKRRLLSRKPAEEPREEPGTCHHTRRAAASLRTEPEMSHHAQAEDRDNGPGRRPLPGRAAAGGRTMDEIRRHPDKGNGQQRPTKQKSEEQLQAYYKKTLEERLSAGALNTFPRAFKQVMEGRDIKLVINQTAQDCFGCLESISQIRTATRDKKDTVTREKHPKKPFQKWMKKRAIKKGNYLRFQRLFYLDRGKLAKIILDDIECLSCDIPLSEIYSVFKTRWETTGSFKSLGDFKTYGKADNTAFRELITAKEIEKNVQEMSKGSAPGPDGITLGDVVKMDPEFSRTMEIFNLWLTTGKIPDMVRGCRTVLIPKSSKPDRLKDINNWRPITIGSILLRLFSRIVTARLSKACPLNPRQRGFIRAAGCSENLKLLQTIIWSAKREHRPLGVVFVDIAKAFDTVSHQHIIHALQQREVDPHIVGLVSNMYENISTYITTKRNTHTDKIQIRVGVKQGDPMSPLLFNLAMDPLLCKLEESGKGYHRGQSSITAMAFADDLVLLSDSWENMNTNISILETFCNLTGLKTQGQKCHGFYIKPTKDSYTINDCAAWTINGTPLNMIDPGESEKYLGLQFDPWIGIARSGLSTKLDFWLQRIDQAPLKPLQKLDILKTYTIPRLIYIADHSEVKSALLETLDQKIRTAVKEWLHLPPCTCDAILYSSTRDGGLGITKLAGLIPSVQARRLHRIAQSSDDTMKCFMEKEKMEQLHKKLWIQAGGDRENIPSIWEAPPSSEPPNNVSTNSEWEAPTQKDKFPKPCNWRKNEFKKWTKLASQGRGIVNFERDKISNHWIQYYRRIPHRKLLTALQLRANVYPTREFLARGRQDQYIKACRHCDADNESCAHIIGNCPVTQDARIKRHNYICELLLEEAKKKDWVVFKEPHIRDSNKELYKPDLIFVKDGRALVVDVTVRYEAAKSSLEEAAAEKVRKYKHLETEVRHLTNAKDVTFVGFPLGARGKWHQDNFKLLTELGLSKSRQVKMAETFSTVALFSSVDIVHMFASRARKSMVM

SEQ ID NO: 1745 - protein, 1405 aa, synthetic construct
MAPKKKRKVVTVKFKYKGEEKEVDISKIKKVWRVGKMISFTYDDNGKTGRGAVSEKDAPKELLQMLEKSGSETPGTSESATPESPKRKVSSAEGAAKEEPKRRSARLSAKPPAKVEAKPKKAAAKDKSSDKKVQTKGKRGAKGKQAEVANQETKEDLPAENGETKTEESPASDEAGEKEAKSDSGSETPGTSESATPESLFVPEEGSSEKESEDAPKTSPPTPGKHGLEQTGEEKVMVTVPDKNPPCPCCGTRVNSVLNLIEHLKVSHGKRGVCFRCAKCGKENSNYHSVVCHFKKCRGPETEKAPAGEWICEVCNRDFTTKIGLGQHKRLAHPAVRNQERIVASQPKETSNRGAHKRCWTKEEEELLIRLEAQFEGNKNINKLIAEHITTKTAKQISDKRRLLSRKPAEEPREEPGTCHHTRRAAASLRTEPEMSHHAQAEDRDNGPGRRPLPGRAAAGGRTMDEIRRHPDKGNGQQRPTKQKSEEQLQAYYKKTLEERLSAGALNTFPRAFKQVMEGRDIKLVINQTAQDCFGCLESISQIRTATRDKKDTVTREKHPKKPFQKWMKKRAIKKGNYLRFQRLFYLDRGKLAKIILDDIECLSCDIPLSEIYSVFKTRWETTGSFKSLGDFKTYGKADNTAFRELITAKEIEKNVQEMSKGSAPGPDGITLGDVVKMDPEFSRTMEIFNLWLTTGKIPDMVRGCRTVLIPKSSKPDRLKDINNWRPITIGSILLRLFSRIVTARLSKACPLNPRQRGFIRAAGCSENLKLLQTIIWSAKREHRPLGVVFVDIAKAFDTVSHQHIIHALQQREVDPHIVGLVSNMYENISTYITTKRNTHTDKIQIRVGVKQGDPMSPLLFNLAMDPLLCKLEESGKGYHRGQSSITAMAFADDLVLLSDSWENMNTNISILETFCNLTGLKTQGQKCHGFYIKPTKKSYTINDCAAWTINGTPLNMIDPGESEKYLGLQFDPWIGIARSGLSTKLDFWLQRIDQAPLKPLQKTDILKTYTIPRLIYIADHSEVKSALLETLDQKIRTAVKEWLHLPPCTCDAILYSSTRDGGLGITKLAGLIPSVQARRLHRIAQSSDDTMKCFMEKEKMEQLHKKLWIQAGGDRENIPSIWEAPPSSEPPNNVSTNSEWEAPTQKDKFPKPCNWRKNEFKKWTKLASQGRGIVNFERDKISNHWIQYYRRIPHRKLLTALQLRANVYPTREFLARGRQDQYIKACRHCDADNESCAHIIGNCPVTQDARIKRHNYICELLLEEAKKKDWVVFKEPHIRDSNKELYKPDLIFVKDGRALVVDVTVRYEAAKSSLEEAAAEKVRKYKHLETEVRHLTNAKDVTFVGFPLGARGKWHQDNFKLLTELGLSKSRQVKMAETFSTVALFSSVDIVHMFASRARKSMVM

SEQ ID NO: 1746 - protein, 1390 aa, synthetic construct; identical to SEQ ID NO: 1

SEQ ID NO: 1747 - DNA, 2090 bp, synthetic construct
  source 1..2090: mol_type = other DNA
gagtaactatgactctcttaagtctagttacaactgggcatcgctgcagagatcgcacctcctcgtggtcccgctggtagcccttcgaagggtgactaagtcgatctctgccccaggtacggagccgttgggactcaccagtccaacgtaatactcgacggatcgatccgaacaaacgacccaacacccgtgcgttttattctgtctttttattgccgatcccctcagaagaactcgtcaagaaggcgatagaaggcgatgcgctgcgaatcgggagcggcgataccgtaaagcacgaggaagcggtcagcccattcgccgccaagctcttcagcaatatcacgggtagccaacgctatgtcctgatagcggtcggccgctttacttgtacagctcgtccatgccgagagtgatcccggcggcggtcacgaactccagcaggaccatgtgatcgcgcttctcgttggggtctttgctcagggcggactgggtgctcaggtagtggttgtcgggcagcagcacggggccgtcgccgatgggggtgttctgctggtagtggtcggccagctgcacgctgccgtcctcgatgttgtggcggatcttgaagttcaccttgatgccgttcttctgcttgtcggccatgatatagacgttgtggctgttgtagttgtactccagcttgtgccccaggatgttgccgtcctccttgaagtcgatgcccttcagctcgatgcggttcaccagggtgtcgccctcgaacttcacctcggcgcgggtcttgtagttgccgtcgtccttgaagaagatggtgcgctcctggacgtagccttcgggcatggcggacttgaagaagtcgtgctgcttcatgtggtcggggtagcggctgaagcactgcacgccgtaggtcagggtggtcacgagggtgggccagggcacgggcagcttgccggtggtgcagatgaacttcagggtcagcttgccgtaggtggcatcgccctcgccctcgccggacacgctgaacttgtggccgtttacgtcgccgtccagctcgaccaggatgggcaccaccccggtgaacagctcctcgcccttgctcaccatggtggcgaattcgaagcttgagctcgagatctgagtccggtagcgctagcggatctgacggttcactaaaccagctctgcttatatagacctcccaccgtacacgcctaccgcccatttgcgtcaatggggcggagttgttacgacattttggaaagtcccgttgattttggtgccaaaacaaactcccattgacgtcaatggggtggagacttggaaatccccgtgagtcaaaccgctatccacgcccattgatgtactgccaaaaccgcatcaccatggtaatagcgatgactaatacgtagatgtactgccaagtaggaaagtcccataaggtcatgtactgggcataatgccaggcgggccatttaccgtcattgacgtcaatagggggcgtacttggcatatgatacacttgatgtactgccaagtgggcagtttaccgtaaatactccacccattgacgtcaatggaaagtccctattggcgttactatgggaacatacgtcattattgacgtcaatgggcgggggtcgttgggcggtcagccaggcgggccatttaccgtaagttatgtaacgcggaactccatatatgggctatgaactaatgaccccgtaattgattactattaaattcctgcagttcaggttatttagatgcttagtttttgtacctttcttgttttgtttaggattttgatagtgttagtatttttatatttttgtacgattgcataatgttcttttttatacagttctgttttaataaaatagacgatagctagagacgttagggcagccacaagccagttaggtagcggatagtaggtaggaacagacttttactatttcataacgcgtcaattaccacctgatttggaccaattcacgggatttgtccaaggtggacgggccacctttacttaacccggaaaaggaacatatataatttatgtgtgttcgataaatagcaaaaaaaaaaaaaaaa

SEQ ID NO: 1748 - DNA, 2106 bp, synthetic construct
  source 1..2106: mol_type = other DNA
gagtaactatgactctcttaagtctagttacaactgggcatcgctgcagagatcgcacctcctcgtggtcccgctggtagcccttcgaagggtgactaagtcgatctctgccccaggtacggagccgttgggactcaccagtccaacgtaatactcgacggatcgatccgaacaaacgacccaacacccgtgcgttttattctgtctttttattgccgatcccctcagaagaactcgtcaagaaggcgatagaaggcgatgcgctgcgaatcgggagcggcgataccgtaaagcacgaggaagcggtcagcccattcgccgccaagctcttcagcaatatcacgggtagccaacgctatgtcctgatagcggtcggccgctttacttgtacagctcgtccatgccgagagtgatcccggcggcggtcacgaactccagcaggaccatgtgatcgcgcttctcgttggggtctttgctcagggcggactgggtgctcaggtagtggttgtcgggcagcagcacggggccgtcgccgatgggggtgttctgctggtagtggtcggccagctgcacgctgccgtcctcgatgttgtggcggatcttgaagttcaccttgatgccgttcttctgcttgtcggccatgatatagacgttgtggctgttgtagttgtactccagcttgtgccccaggatgttgccgtcctccttgaagtcgatgcccttcagctcgatgcggttcaccagggtgtcgccctcgaacttcacctcggcgcgggtcttgtagttgccgtcgtccttgaagaagatggtgcgctcctggacgtagccttcgggcatggcggacttgaagaagtcgtgctgcttcatgtggtcggggtagcggctgaagcactgcacgccgtaggtcagggtggtcacgagggtgggccagggcacgggcagcttgccggtggtgcagatgaacttcagggtcagcttgccgtaggtggcatcgccctcgccctcgccggacacgctgaacttgtggccgtttacgtcgccgtccagctcgaccaggatgggcaccaccccggtgaacagctcctcgcccttgctcaccatggtggcgaattcgaagcttgagctcgagatctgagtccggtagcgctagcggatctgacggttcactaaaccagctctgcttatatagacctcccaccgtacacgcctaccgcccatttgcgtcaatggggcggagttgttacgacattttggaaagtcccgttgattttggtgccaaaacaaactcccattgacgtcaatggggtggagacttggaaatccccgtgagtcaaaccgctatccacgcccattgatgtactgccaaaaccgcatcaccatggtaatagcgatgactaatacgtagatgtactgccaagtaggaaagtcccataaggtcatgtactgggcataatgccaggcgggccatttaccgtcattgacgtcaatagggggcgtacttggcatatgatacacttgatgtactgccaagtgggcagtttaccgtaaatactccacccattgacgtcaatggaaagtccctattggcgttactatgggaacatacgtcattattgacgtcaatgggcgggggtcgttgggcggtcagccaggcgggccatttaccgtaagttatgtaacgcggaactccatatatgggctatgaactaatgaccccgtaattgattactattaaattcctgcagttcaggttatttagatgcttagtttttgtacctttcttgttttgtttaggattttgatagtgttagtatttttatatttttgtacgattgcataatgttcttttttatacagttctgttttaataaaatagacgatagctagagacgttagggcagccacaagccagttaggtagcggatagtaggtaggaacagacttttactatttcataacgcgtcaattaccacctgatttggaccaattcacgggatttgtccaaggtggacgggccacctttacttaacccggaaaaggaacatatataatttatgtgtgttcgataaatagccaaatgcctcgtcatcaaaaaaaaaaaaaaaa

SEQ ID NO: 1749 - DNA, 2250 bp, synthetic construct; identical to SEQ ID NO: 617
  source 1..2250: mol_type = other DNA

SEQ ID NO: 1750 - protein, 1390 aa, synthetic construct
MASCPKPGPPVSAGAMSLESGLTTHSVLAIERGPNSLANSGSDFGGGGLGLPLRLLRVSVGTQTSRSDWVDLVSWSHPGPTSKSQQVDLVSLFPKHRVDLLSKNDQVDLVAQFLPSKFPPNLAENDLALLVNLEFYRSDLHVYECVHKAAHWEGLSGLPEVYEQLAPQPCVGETLHSSLPRDSELFVPEEGSSEKESEDAPKTSPPTPGKHGLEQTGEEKVMVTVPDKNPPCPCCGTRVNSVLNLIEHLKVSHGKRGVCFRCAKCGKENSNYHSVVCHFKKCRGPETEKAPAGEWICEVCNRDFTTKIGLGQHKRLAHPAVRNQERIVASQPKETSNRGAHKRCWTKEEEELLIRLEAQFEGNKNINKLIAEHITTKTAKQISDKRRLLSRKPAEEPREEPGTCHHTRRAAASLRTEPEMSHHAQAEDRDNGPGRRPLPGRAAAGGRTMDEIRRHPDKGNGQQRPTKQKSEEQLQAYYKKTLEERLSAGALNTFPRAFKQVMEGRDIKLVINQTAQDCFGCLESISQIRTATRDKKDTVTREKHPKKPFQKWMKKRAIKKGNYLRFQRLFYLDRGKLAKIILDDIECLSCDIPLSEIYSVFKTRWETTGSFKSLGDFKTYGKADNTAFRELITAKEIEKNVQEMSKGSAPGPDGITLGDVVKMDPEFSRTMEIFNLWLTTGKIPDMVRGCRTVLIPKSSKPDRLKDINNWRPITIGSILLRLFSRIVTARLSKACPLNPRQRGFIRAAGCSENLKLLQTIIWSAKREHRPLGVVFVDIAKAFDTVSHQHIIHALQQREVDPHIVGLVSNMYENISTYITTKRNTHTDKIQIRVGVKQGDPMSPLLFNLAMDPLLCKLEESGKGYHRGQSSITAMAFADDLVLLSDSWENMNTNISILETFCNLTGLKTQGQKCHGFYIKPTKDSYTINDCAAWTINGTPLNMIDPGESEKYLGLQFDPWIGIARSGLSTKLDFWLQRIDQAPLKPLQKLDILKTYTIPRLIYIADHSEVKSALLETLDQKIRTAVKEWLHLPPCTCDAILYSSTRDGGLGITKLAGLIPSVQARRLHRIAQSSDDTMKCFMEKEKMEQLHKKLWIQAGGDRENIPSIWEAPPSSEPPNNVSTNSEWEAPTQKDKFPKPCNWRKNEFKKWTKLASQGRGIVNFERDKISNHWIQYYRRIPHRKLLTALQLRANVYPTREFLARGRQDQYIKACRHCDADNESCAHIIGNCPVTQDARIKRHNYICELLLEEAKKKDWVVFKEPHIRDSNKELYKPDLIFVKDGRALVVDVTVRYEAAKSSLEEAAAEKVRKYKHLETEVRHLTNAKDVTFVGFPLGARGKWHQDNFKLLTELGLSKSRQVKMAETFSTVALFSSVDIVHMFASRARKSMVM

SEQ ID NO: 1751 - protein, 1390 aa, synthetic construct
MASCPKPGPPVSAGAMSLESGLTTHSVLAIERGPNSLANSGSDFGGGGLGLPLRLLRVSVGTQTSRSDWVDLVSWSHPGPTSKSQQVDLVSLFPKHRVDLLSKNDQVDLVAQFLPSKFPPNLAENDLALLVNLEFYRSDLHVYECVHKAAHWEGLSGLPEVYEQLAPQPCVGETLHSSLPRDSELFVPEEGSSEKESEDAPKTSPPTPGKHGLEQTGEEKVMVTVPDKNPPCPCCGTRVNSVLNLIEHLKVSHGKRGVCFRCAKCGKENSNYHSVVCHFKKCRGPETEKAPAGEWICEVCNRDFTTKIGLGQHKRLAHPAVRNQERIVASQPKETSNRGAHKRCWTKEEEELLIRLEAQFEGNKNINKLIAEHITTKTAKQISDKRRLLSRKPAEEPREEPGTCHHTRRAAASLRTEPEMSHHAQAEDRDNGPGRRPLPGRAAAGGRTMDEIRRHPDKGNGQQRPTKQKSEEQLQAYYKKTLEERLSAGALNTFPRAFKQVMEGRDIKLVINQTAQDCFGCLESISQIRTATRDKKDTVTREKHPKKPFQKWMKKRAIKKGNYLRFQRLFYLDRGKLAKIILDDIECLSCDIPLSEIYSVFKTRWETTGSFKSLGDFKTYGKADNTAFRELITAKEIEKNVQEMSKGSAPGPDGITLGDRVKMDPEFSRTMEIFNLWLTTGKIPDMVRGCRTVLIPKSSKPDRLKDINNWRPITIGSILLRLFSRIVTARLSKACPLNPRQRGFIRAAGCSENLKLLQTIIWSAKREHRPLGVVFVDIAKAFDTVSHQHIIHALQQREVDPHIVGLVSNMYENISTYITTKRNTHTDKIQIRVGVKQGDPMSPLLFNLAMDPLLCKLEESGKGYHRGQSSITAMAFADDLVLLSDSWENMNTNISILETFCNLTGLKTQGQKCHGFYIKPTKDSYTINDCAAWTINGTPLNMIDPGESEKYLGLQFDPWIGIARSGLSTKLDFWLQRIDQAPLKPLQKTDILKTYTIPRLIYIADHSEVKSALLETLDQKIRTAVKEWLHLPPCTCDAILYSSTRDGGLGITKLAGLIPSVQARRLHRIAQSSDDTMKCFMEKEKMEQLHKKLWIQAGGDRENIPSIWEAPPSSEPPNNVSTNSEWEAPTQKDKFPKPCNWRKNEFKKWTKLASQGRGIVNFERDKISNHWIQYYRRIPHRKLLTALQLRANVYPTREFLARGRQDQYIKACRHCDADNESCAHIIGNCPVTQDARIKRHNYICELLLEEAKKKDWVVFKEPHIRDSNKELYKPDLIFVKDGRALVVDVTVRYEAAKSSLEEAAAEKVRKYKHLETEVRHLTNAKDVTFVGFPLGARGKWHQDNFKLLTELGLSKSRQVKMAETFSTVALFSSVDIVHMFASRARKSMVM

SEQ ID NO: 1752 - protein, 1390 aa, synthetic construct
MASCPKPGPPVSAGAMSLESGLTTHSVLAIERGPNSLANSGSDFGGGGLGLPLRLLRVSVGTQTSRSDWVDLVSWSHPGPTSKSQQVDLVSLFPKHRVDLLSKNDQVDLVAQFLPSKFPPNLAENDLALLVNLEFYRSDLHVYECVHKAAHWEGLSGLPEVYEQLAPQPCVGETLHSSLPRDSELFVPEEGSSEKESEDAPKTSPPTPGKHGLEQTGEEKVMVTVPDKNPPCPCCGTRVNSVLNLIEHLKVSHGKRGVCFRCAKCGKENSNYHSVVCHFKKCRGPETEKAPAGEWICEVCNRDFTTKIGLGQHKRLAHPAVRNQERIVASQPKETSNRGAHKRCWTKEEEELLIRLEAQFEGNKNINKLIAEHITTKTAKQISDKRRLLSRKPAEEPREEPGTCHHTRRAAASLRTEPEMSHHAQAEDRDNGPGRRPLPGRAAAGGRTMDEIRRHPDKGNGQQRPTKQKSEEQLQAYYKKTLEERLSAGALNTFPRAFKQVMEGRDIKLVINQTAQDCFGCLESISQIRTATRDKKDTVTREKHPKKPFQKWMKKRAIKKGNYLRFQRLFYLDRGKLAKIILDDIECLSCDIPLSEIYSVFKTRWETTGSFKSLGDFKTYGKADNTAFRELITAKEILKNVQEMSKGSAPGPDGITLGDVVKMDPEFSRTMEIFNLWLTTGKIPDMVRGCRTVLIPKSSKPDRLKDINNWRPITIGSILLRLFSRIVTARLSKACPLNPRQRGFIRAAGCSENLKLLQTIIWSAKREHRPLGVVFVDIAKAFDTVSHQHIIHALQQREVDPHIVGLVSNMYENISTYITTKRNTHTDKIQIRVGVKQGDPMSPLLFNLAMDPLLCKLEESGKGYHRGQSSITAMAFADDLVLLSDSWENMNTNISILETFCNLTGLKTQGQKCHGFYIKPTKDSYTINDCAAWTINGTPLNMIDPGESEKYLGLQFDPWIGIARSGLSTKLDFWLQRIDQAPLKPLQKTDILKTYTIPRLIYIADHSEVKSALLETLDQKIRTAVKEWLHLPPCTCDAILYSSTRDGGLGITKLAGLIPSVQARRLHRIAQSSDDTMKCFMEKEKMEQLHKKLWIQAGGDRENIPSIWEAPPSSEPPNNVSTNSEWEAPTQKDKFPKPCNWRKNEFKKWTKLASQGRGIVNFERDKISNHWIQYYRRIPHRKLLTALQLRANVYPTREFLARGRQDQYIKACRHCDADNESCAHIIGNCPVTQDARIKRHNYICELLLEEAKKKDWVVFKEPHIRDSNKELYKPDLIFVKDGRALVVDVTVRYEAAKSSLEEAAAEKVRKYKHLETEVRHLTNAKDVTFVGFPLGARGKWHQDNFKLLTELGLSKSRQVKMAETFSTVALFSSVDIVHMFASRARKSMVM

SEQ ID NO: 1753 - protein, 1625 aa, synthetic construct
MAPKKKRKVVTVKFKYKGEEKEVDISKIKKVWRVGKMISFTYDDNGKTGRGAVSEKDAPKELLQMLEKSGSETPGTSESATPESNISGSSCGSPNSADTSSDFKDLWTKLKECHDREVQGLQVKVTKLKQERILDAQRLEEFFTKNQQLREQQKVLHETIKVLEDRLRAGLCDRCAVTEEHMRKKQQEFENIRQQNLKLITELMNERNTLQEENKKLSEQLQQKIENDQQHQAAELECEEDVIPDSPITAFSFSGVNRLRRKENPHVRYIEQTHTKLEHSVCANEMRKVSKSSTHPQHNPNENEILVADTYDQSQSPMAKAHGTSSYTPDKSSFNLATVVAETLGLGVQEESETQGPMSPLGDELYHCLEGNHKKQPFESGSETPGTSESATPEGSYEQLAPQPCVGETLHSSLPRDSELFVPEEGSSEKESEDAPKTSPPTPGKHGLEQTGEEKVMVTVPDKNPPCPCCGTRVNSVLNLIEHLKVSHGKRGVCFRCAKCGKENSNYHSVVCHFKKCRGPETEKAPAGEWICEVCNRDFTTKIGLGQHKRLAHPAVRNQERIVASQPKETSNRGAHKRCWTKEEEELLIRLEAQFEGNKNINKLIAEHITTKTAKQISDKRRLLSRKPAEEPREEPGTCHHTRRAAASLRTEPEMSHHAQAEDRDNGPGRRPLPGRAAAGGRTMDEIRRHPDKGNGQQRPTKQKSEEQLQAYYKKTLEERLSAGALNTFPRAFKQVMEGRDIKLVINQTAQDCFGCLESISQIRTATRDKKDTVTREKHPKKPFQKWMKKRAIKKGNYLRFQRLFYLDRGKLAKIILDDIECLSCDIPLSEIYSVFKTRWETTGSFKSLGDFKTYGKADNTAFRELITAKEIEKNVQEMSKGSAPGPDGITLGDVVKMDPEFSRTMEIFNLWLTTGKIPDMVRGCRTVLIPKSSKPDRLKDINNWRPITIGSILLRLFSRIVTARLSKACPLNPRQRGFIRAAGCSENLKLLQTIIWSAKREHRPLGVVFVDIAKAFDTVSHQHIIHALQQREVDPHIVGLVSNMYENISTYITTKRNTHTDKIQIRVGVKQGDPMSPLLFNLAMDPLLCKLEESGKGYHRGQSSITAMAFADDLVLLSDSWENMNTNISILETFCNLTGLKTQGQKCHGFYIKPTKKSYTINDCAAWTINGTPLNMIDPGESEKYLGLQFDPWIGIARSGLSTKLDFWLQRIDQAPLKPLQKTDILKTYTIPRLIYIADHSEVKSALLETLDQKIRTAVKEWLHLPPCTCDAILYSSTRDGGLGITKLAGLIPSVQARRLHRIAQSSDDTMKCFMEKEKMEQLHKKLWIQAGGDRENIPSIWEAPPSSEPPNNVSTNSEWEAPTQKDKFPKPCNWRKNEFKKWTKLASQGRGIVNFERDKISNHWIQYYRRIPHRKLLTALQLRANVYPTREFLARGRQDQYIKACRHCDADNESCAHIIGNCPVTQDARIKRHNYICELLLEEAKKKDWVVFKEPHIRDSNKELYKPDLIFVKDGRALVVDVTVRYEAAKSSLEEAAAEKVRKYKHLETEVRHLTNAKDVTFVGFPLGARGKWHQDNFKLLTELGLSKSRQVKMAETFSTVALFSSVDIVHMFASRARKSMVM

SEQ ID NO: 1754 - protein, 1397 aa, synthetic construct
MPKRKVSSAEGAAKEEPKRRSARLSAKPPAKVEAKPKKAAAKDKSSDKKVQTKGKRGAKGKQAEVANQETKEDLPAENGETKTEESPASDEAGEKEAKSDSGSETPGTSESATPESVTVKFKYKGEEKEVDISKIKKVWRVGKMISFTYDDNGKTGRGAVSEKDAPKELLQMLEKSGSETPGTSESATPESLFVPEEGSSEKESEDAPKTSPPTPGKHGLRQTGEEKVMVTVPDKNPPCPCCGTRVNSVLNLIEHLKVSHGKRGVCFRCAKCGKENSNYHSVVCHFKKCRGPETEKAPAGEWICEVCNRDFTTKIGLGQHKRLAHPAVRNQERIVASQPKETSNRGAHKRCWTKEEEELLIRLEAQFEGNKNINKLIAEHITTKTAKQISDKRRLLSRKPAEEPREEPGTCHHTRRAAASLRTEPEMSHHAQAEDRDNGPGRRPLPGRAAAGGRTMDEIRRHPDKGNGQQRPTKQKSEEQLQAYYKKTLEERLSAGALNTFPRAFKQVMEGRDIKLVINQTAQDCFGCLESISQIRTATRDKKDTVTREKHPKKPFQKWMKKRAIKKGNYLRFQRLFYLDRGKLAKIILDDIECLSCDIPLSEIYSVFKTRWETTGSFKSLGDFKTYGKADNTAFRELITAKEIEKNVQEMSKGSAPGPDGITLGDVVKMDPEFSRTMEIFNLWLTTGKIPDMVRGCRTVLIPKSSKPDRLKDINNWRPITIGSILLRLFSRIVTARLSKACPLNPRQRGFIRAAGCSENLKLLQTIIWSAKREHRPLGVVFVDIAKAFDTVSHQHIIHALQQREVDPHIVGLVSNMYENISTYITTKRNTHTDKIQIRVGVKQGDPMSPLLFNLAMDPLLCKLEESGKGYHRGQSSITAMAFADDLVLLSDSWENMNTNISILETFCNLTGLKTQGQKCHGFYIKPTKDSYTINDCAAWTINGTPLNMIDPGESEKYLGLQFDPWIGIARSGLSTKLDFWLQRIDQAPLKPLQKTDILKTYTIPRLIYIADHSEVKSALLETLDQKIRTAVKEWLHLPPCTCDAILYSSTRDGGLGITKLAGLIPSVQARRLHRIAQSSDDTMKCFMEKEKMEQLHKKLWIQAGGDRENIPSIWEAPPSSEPPNNVSTNSEWEAPTQKDKFPKPCNWRKNEFKKWTKLASQGRGIVNFERDKISNHWIQYYRRIPHRKLLTALQLRANVYPTREFLARGRQDQYIKACRHCDADNESCAHIIGNCPVTQDARIKRHNYICELLLEEAKKKDWVVFKEPHIRDSNKELYKPDLIFVKDGRALVVDVTVRYEAAKSSLEEAAAEKVRKYKHLETEVRHLTNAKDVTFVGFPLGARGKWHQDNFKLLTELGLSKSRQVKMAETFSTVALFSSVDIVHMFASRARKSMVM

SEQ ID NO: 1755 - protein, 1657 aa, synthetic construct
MPKRKVSSAEGAAKEEPKRRSARLSAKPPAKVEAKPKKAAAKDKSSDKKVQTKGKRGAKGKQAEVANQETKEDLPAENGETKTEESPASDEAGEKEAKSDSGSETPGTSESATPESNISGSSCGSPNSADTSSDFKDLWTKLKECHDREVQGLQVKVTKLKQERILDAQRLEEFFTKNQQLREQQKVLHETIKVLEDRLRAGLCDRCAVTEEHMRKKQQEFENIRQQNLKLITELMNERNTLQEENKKLSEQLQQKIENDQQHQAAELECEEDVIPDSPITAFSFSGVNRLRRKENPHVRYIEQTHTKLEHSVCANEMRKVSKSSTHPQHNPNENEILVADTYDQSQSPMAKAHGTSSYTPDKSSFNLATVVAETLGLGVQEESETQGPMSPLGDELYHCLEGNHKKQPFESGSETPGTSESATPEGSYEQLAPQPCVGETLHSSLPRDSELFVPEEGSSEKESEDAPKTSPPTPGKHGLEQTGEEKVMVTVPDKNPPCPCCGTRVNSVLNLIEHLKVSHGKRGVCFRCAKCGKENSNYHSVVCHFKKCRGPETEKAPAGEWICEVCNRDFTTKIGLGQHKRLAHPAVRNQERIVASQPKETSNRGAHKRCWTKEEEELLIRLEAQFEGNKNINKLIAEHITTKTAKQISDKRRLLSRKPAEEPREEPGTCHHTRRAAASLRTEPEMSHHAQAEDRDNGPGRRPLPGRAAAGGRTMDEIRRHPDKGNGQQRPTKQKSEEQLQAYYKKTLEERLSAGALNTFPRAFKQVMEGRDIKLVINQTAQDCFGCLESISQIRTATRDKKDTVTREKHPKKPFQKWMKKRAIKKGNYLRFQRLFYLDRGKLAKIILDDIECLSCDIPLSEIYSVFKTRWETTGSFKSLGDFKTYGKADNTAFRELITAKEIEKNVQEMSKGSAPGPDGITLGDVVKMDPEFSRTMEIFNLWLTTGKIPDMVRGCRTVLIPKSSKPDRLKDINNWRPITIGSILLRLFSRIVTARLSKACPLNPRQRGFIRAAGCSENLKLLQTIIWSAKREHRPLGVVFVDIAKAFDTVSHQHIIHALQQREVDPHIVGLVSNMYENISTYITTKRNTHTDKIQIRVGVKQGDPMSPLLFNLAMDPLLCKLEESGKGYHRGQSSITAMAFADDLVLLSDSWENMNTNISILETFCNLTGLKTQGQKCHGFYIKPTKDSYTINDCAAWTINGTPLNMIDPGESEKYLGLQFDPWIGIARSGLSTKLDFWLQRIDQAPLKPLQKLDILKTYTIPRLIYIADHSEVKSALLETLDQKIRTAVKEWLHLPPCTCDAILYSSTRDGGLGITKLAGLIPSVQARRLHRIAQSSDDTMKCFMEKEKMEQLHKKLWIQAGGDRENIPSIWEAPPSSEPPNNVSTNSEWEAPTQKDKFPKPCNWRKNEFKKWTKLASQGRGIVNFERDKISNHWIQYYRRIPHRKLLTALQLRANVYPTREFLARGRQDQYIKACRHCDADNESCAHIIGNCPVTQDARIKRHNYICELLLEEAKKKDWVVFKEPHIRDSNKELYKPDLIFVKDGRALVVDVTVRYEAAKSSLEEAAAEKVRKYKHLETEVRHLTNAKDVTFVGFPLGARGKWHQDNFKLLTELGLSKSRQVKMAETFSTVALFSSVDIVHMFASRARKSMVM

SEQ ID NO: 1756 - protein, 1657 aa, synthetic construct
MPKRKVSSAEGAAKEEPKRRSARLSAKPPAKVEAKPKKAAAKDKSSDKKVQTKGKRGAKGKQAEVANQETKEDLPAENGETKTEESPASDEAGEKEAKSDSGSETPGTSESATPESNISGSSCGSPNSADTSSDFKDLWTKLKECHDREVQGLQVKVTKLKQERILDAQRLEEFFTKNQQLREQQKVLHETIKVLEDRLRAGLCDRCAVTEEHMRKKQQEFENIRQQNLKLITELMNERNTLQEENKKLSEQLQQKIENDQQHQAAELECEEDVIPDSPITAFSFSGVNRLRRKENPHVRYIEQTHTKLEHSVCANEMRKVSKSSTHPQHNPNENEILVADTYDQSQSPMAKAHGTSSYTPDKSSFNLATVVAETLGLGVQEESETQGPMSPLGDELYHCLEGNHKKQPFESGSETPGTSESATPEGSYEQLAPQPCVGETLHSSLPRDSELFVPEEGSSEKESEDAPKTSPPTPGKHGLEQTGEEKVMVTVPDKNPPCPCCGTRVNSVLNLIEHLKVSHGKRGVCFRCAKCGKENSNYHSVVCHFKKCRGPETEKAPAGEWICEVCNRDFTTKIGLGQHKRLAHPAVRNQERIVASQPKETSNRGAHKRCWTKEEEELLIRLEAQFEGNKNINKLIAEHITTKTAKQISDKRRLLSRKPAEEPREEPGTCHHTRRAAASLRTEPEMSHHAQAEDRDNGPGRRPLPGRAAAGGRTMDEIRRHPDKGNGQQRPTKQKSEEQLQAYYKKTLEERLSAGALNTFPRAFKQVMEGRDIKLVINQTAQDCFGCLESISQIRTATRDKKDTVTREKHPKKPFQKWMKKRAIKKGNYLRFQRLFYLDRGKLAKIILDDIECLSCDIPLSEIYSVFKTRWETTGSFKSLGDFKTYGKADNTAFRELITAKEIEKNVQEMSKGSAPGPDGITLGDVVKMDPEFSRTMEIFNLWLTTGKIPDMVRGCRTVLIPKSSKPDRLKDINNWRPITIGSILLRLFSRIVTARLSKACPLNPRQRGFIRAAGCSENLKLLQTIIWSAKREHRPLGVVFVDIAKAFDTVSHQHIIHALQQREVDPHIVGLVSNMYENISTYITTKRNTHTDKIQIRVGVKQGDPMSPLLFNLAMDPLLCKLEESGKGYHRGQSSITAMAFADDLVLLSDSWENMNTNISILETFCNLTGLKTQGQKCHGFYIKPTKKSYTINDCAAWTINGTPLNMIDPGESEKYLGLQFDPWIGIARSGLSTKLDFWLQRIDQAPLKPLQKTDILKTYTIPRLIYIADHSEVKSALLETLDQKIRTAVKEWLHLPPCTCDAILYSSTRDGGLGITKLAGLIPSVQARRLHRIAQSSDDTMKCFMEKEKMEQLHKKLWIQAGGDRENIPSIWEAPPSSEPPNNVSTNSEWEAPTQKDKFPKPCNWRKNEFKKWTKLASQGRGIVNFERDKISNHWIQYYRRIPHRKLLTALQLRANVYPTREFLARGRQDQYIKACRHCDADNESCAHIIGNCPVTQDARIKRHNYICELLLEEAKKKDWVVFKEPHIRDSNKELYKPDLIFVKDGRALVVDVTVRYEAAKSSLEEAAAEKVRKYKHLETEVRHLTNAKDVTFVGFPLGARGKWHQDNFKLLTELGLSKSRQVKMAETFSTVALFSSVDIVHMFASRARKSMVM

SEQ ID NO: 1757 - protein, 1657 aa, synthetic construct
MPKRKVSSAEGAAKEEPKRRSARLSAKPPAKVEAKPKKAAAKDKSSDKKVQTKGKRGAKGKQAEVANQETKEDLPAENGETKTEESPASDEAGEKEAKSDSGSETPGTSESATPESNISGSSCGSPNSADTSSDFKDLWTKLKECHDREVQGLQVKVTKLKQERILDAQRLEEFFTKNQQLREQQKVLHETIKVLEDRLRAGLCDRCAVTEEHMRKKQQEFENIRQQNLKLITELMNERNTLQEENKKLSEQLQQKIENDQQHQAAELECEEDVIPDSPITAFSFSGVNRLRRKENPHVRYIEQTHTKLEHSVCANEMRKVSKSSTHPQHNPNENEILVADTYDQSQSPMAKAHGTSSYTPDKSSFNLATVVAETLGLGVQEESETQGPMSPLGDELYHCLEGNHKKQPFESGSETPGTSESATPEGSYEQLAPQPCVGETLHSSLPRDSELFVPEEGSSEKESEDAPKTSPPTPGKHGLRQTGEEKVMVTVPDKNPPCPCCGTRVNSVLNLIEHLKVSHGKRGVCFRCAKCGKENSNYHSVVCHFKKCRGPETEKAPAGEWICEVCNRDFTTKIGLGQHKRLAHPAVRNQERIVASQPKETSNRGAHKRCWTKEEEELLIRLEAQFEGNKNINKLIAEHITTKTAKQISDKRRLLSRKPAEEPREEPGTCHHTRRAAASLRTEPEMSHHAQAEDRDNGPGRRPLPGRAAAGGRTMDEIRRHPDKGNGQQRPTKQKSEEQLQAYYKKTLEERLSAGALNTFPRAFKQVMEGRDIKLVINQTAQDCFGCLESISQIRTATRDKKDTVTREKHPKKPFQKWMKKRAIKKGNYLRFQRLFYLDRGKLAKIILDDIECLSCDIPLSEIYSVFKTRWETTGSFKSLGDFKTYGKADNTAFRELITAKEIEKNVQEMSKGSAPGPDGITLGDVVKMDPEFSRTMEIFNLWLTTGKIPDMVRGCRTVLIPKSSKPDRLKDINNWRPITIGSILLRLFSRIVTARLSKACPLNPRQRGFIRAAGCSENLKLLQTIIWSAKREHRPLGVVFVDIAKAFDTVSHQHIIHALQQREVDPHIVGLVSNMYENISTYITTKRNTHTDKIQIRVGVKQGDPMSPLLFNLAMDPLLCKLEESGKGYHRGQSSITAMAFADDLVLLSDSWENMNTNISILETFCNLTGLKTQGQKCHGFYIKPTKDSYTINDCAAWTINGTPLNMIDPGESEKYLGLQFDPWIGIARSGLSTKLDFWLQRIDQAPLKPLQKTDILKTYTIPRLIYIADHSEVKSALLETLDQKIRTAVKEWLHLPPCTCDAILYSSTRDGGLGITKLAGLIPSVQARRLHRIAQSSDDTMKCFMEKEKMEQLHKKLWIQAGGDRENIPSIWEAPPSSEPPNNVSTNSEWEAPTQKDKFPKPCNWRKNEFKKWTKLASQGRGIVNFERDKISNHWIQYYRRIPHRKLLTALQLRANVYPTREFLARGRQDQYIKACRHCDADNESCAHIIGNCPVTQDARIKRHNYICELLLEEAKKKDWVVFKEPHIRDSNKELYKPDLIFVKDGRALVVDVTVRYEAAKSSLEEAAAEKVRKYKHLETEVRHLTNAKDVTFVGFPLGARGKWHQDNFKLLTELGLSKSRQVKMAETFSTVALFSSVDIVHMFASRARKSMVM

SEQ ID NO: 1758 - protein, 1665 aa, synthetic construct
MAPKKKRKVNISGSSCGSPNSADTSSDFKDLWTKLKECHDREVQGLQVKVTKLKQERILDAQRLEEFFTKNQQLREQQKVLHETIKVLEDRLRAGLCDRCAVTEEHMRKKQQEFENIRQQNLKLITELMNERNTLQEENKKLSEQLQQKIENDQQHQAAELECEEDVIPDSPITAFSFSGVNRLRRKENPHVRYIEQTHTKLEHSVCANEMRKVSKSSTHPQHNPNENEILVADTYDQSQSPMAKAHGTSSYTPDKSSFNLATVVAETLGLGVQEESETQGPMSPLGDELYHCLEGNHKKQPFESGSETPGTSESATPEGSPKRKVSSAEGAAKEEPKRRSARLSAKPPAKVEAKPKKAAAKDKSSDKKVQTKGKRGAKGKQAEVANQETKEDLPAENGETKTEESPASDEAGEKEAKSDSGSETPGTSESATPESYEQLAPQPCVGETLHSSLPRDSELFVPEEGSSEKESEDAPKTSPPTPGKHGLEQTGEEKVMVTVPDKNPPCPCCGTRVNSVLNLIEHLKVSHGKRGVCFRCAKCGKENSNYHSVVCHFKKCRGPETEKAPAGEWICEVCNRDFTTKIGLGQHKRLAHPAVRNQERIVASQPKETSNRGAHKRCWTKEEEELLIRLEAQFEGNKNINKLIAEHITTKTAKQISDKRRLLSRKPAEEPREEPGTCHHTRRAAASLRTEPEMSHHAQAEDRDNGPGRRPLPGRAAAGGRTMDEIRRHPDKGNGQQRPTKQKSEEQLQAYYKKTLEERLSAGALNTFPRAFKQVMEGRDIKLVINQTAQDCFGCLESISQIRTATRDKKDTVTREKHPKKPFQKWMKKRAIKKGNYLRFQRLFYLDRGKLAKIILDDIECLSCDIPLSEIYSVFKTRWETTGSFKSLGDFKTYGKADNTAFRELITAKEIEKNVQEMSKGSAPGPDGITLGDVVKMDPEFSRTMEIFNLWLTTGKIPDMVRGCRTVLIPKSSDPDRLKDINNWRPITIGSILLRLFSRIVTARLSKACPLNPRQRGFIRAAGCSENLKLLQTIIWSAKREHRPLGVVFVDIAKAFDTVSHQHIIHALQQREVDPHIVGLVSNMYENISTYITTKRNTHTDKIQIRVGVKQGDPMSPLLFNLAMDPLLCKLEESGKGYHRGQSSITAMAFADDLVLLSDSWENMNTNISILETFCNLTGLKTQGQKCHGFYIKPTKDSYTINDCAAWTINGTPLNMIDPGESEKYLGLQFDPWIGIARSGLSTKLDFWLQRIDQAPLKPLQKTDILKTYTIPRLIYIADHSEVKSALLETLDQKIRTAVKEWLHLPPCTCDAILYSSTRDGGLGITKLAGLIPSVQARRLHRIAQSSDDTMKCFMEKEKMEQLHKKLWIQAGGDRENIPSIWEAPPSSEPPNNVSTNSEWEAPTQKDKFPKPCNWRKNEFKKWTKLASQGRGIVNFERDKISNHWIQYYRRIPHRKLLTALQLRANVYPTREFLARGRQDQYIKACRHCDADNESCAHIIGNCPVTQDARIKRHNYICELLLEEAKKKDWVVFKEPHIRDSNKELYKPDLIFVKDGRALVVDVTVRYEAAKSSLEEAAAEKVRKYKHLETEVRHLTNAKDVTFVGFPLGARGKWHQDNFKLLTELGLSKSRQVKMAETFSTVALFSSVDIVHMFASRARKSMVM

SEQ ID NO: 1759 - protein, 1665 aa, synthetic construct
MAPKKKRKVNISGSSCGSPNSADTSSDFKDLWTKLKECHDREVQGLQVKVTKLKQERILDAQRLEEFFTKNQQLREQQKVLHETIKVLEDRLRAGLCDRCAVTEEHMRKKQQEFENIRQQNLKLITELMNERNTLQEENKKLSEQLQQKIENDQQHQAAELECEEDVIPDSPITAFSFSGVNRLRRKENPHVRYIEQTHTKLEHSVCANEMRKVSKSSTHPQHNPNENEILVADTYDQSQSPMAKAHGTSSYTPDKSSFNLATVVAETLGLGVQEESETQGPMSPLGDELYHCLEGNHKKQPFESGSETPGTSESATPEGSPKRKVSSAEGAAKEEPKRRSARLSAKPPAKVEAKPKKAAAKDKSSDKKVQTKGKRGAKGKQAEVANQETKEDLPAENGETKTEESPASDEAGEKEAKSDSGSETPGTSESATPESYEQLAPQPCVGETLHSSLPRDSELFVPEEGSSEKESEDAPKTSPPTPGKHGLRQTGEEKVMVTVPDKNPPCPCCGTRVNSVLNLIEHLKVSHGKRGVCFRCAKCGKENSNYHSVVCHFKKCRGPETEKAPAGEWICEVCNRDFTTKIGLGQHKRLAHPAVRNQERIVASQPKETSNRGAHKRCWTKEEEELLIRLEAQFEGNKNINKLIAEHITTKTAKQISDKRRLLSRKPAEEPREEPGTCHHTRRAAASLRTEPEMSHHAQAEDRDNGPGRRPLPGRAAAGGRTMDEIRRHPDKGNGQQRPTKQKSEEQLQAYYKKTLEERLSAGALNTFPRAFKQVMEGRDIKLVINQTAQDCFGCLESISQIRTATRDKKDTVTREKHPKKPFQKWMKKRAIKKGNYLRFQRLFYLDRGKLAKIILDDIECLSCDIPLSEIYSVFKTRWETTGSFKSLGDFKTYGKADNTAFRELITAKEIEKNVQEMSKGSAPGPDGITLGDVVKMDPEFSRTMEIFNLWLTTGKIPDMVRGCRTVLIPKSSKPDRLKDINNWRPITIGSILLRLFSRIVTARLSKACPLNPRQRGFIRAAGCSENLKLLQTIIWSAKREHRPLGVVFVDIAKAFDTVSHQHIIHALQQREVDPHIVGLVSNMYENISTYITTKRNTHTDKIQIRVGVKQGDPMSPLLFNLAMDPLLCKLEESGKGYHRGQSSITAMAFADDLVLLSDSWENMNTNISILETFCNLTGLKTQGQKCHGFYIKPTKDSYTINDCAAWTINGTPLNMIDPGESEKYLGLQFDPWIGIARSGLSTKLDFWLQRIDQAPLKPLQKTDILKTYTIPRLIYIADHSEVKSALLETLDQKIRTAVKEWLHLPPCTCDAILYSSTRDGGLGITKLAGLIPSVQARRLHRIAQSSDDTMKCFMEKEKMEQLHKKLWIQAGGDRENIPSIWEAPPSSEPPNNVSTNSEWEAPTQKDKFPKPCNWRKNEFKKWTKLASQGRGIVNFERDKISNHWIQYYRRIPHRKLLTALQLRANVYPTREFLARGRQDQYIKACRHCDADNESCAHIIGNCPVTQDARIKRHNYICELLLEEAKKKDWVVFKEPHIRDSNKELYKPDLIFVKDGRALVVDVTVRYEAAKSSLEEAAAEKVRKYKHLETEVRHLTNAKDVTFVGFPLGARGKWHQDNFKLLTELGLSKSRQVKMAETFSTVALFSSVDIVHMFASRARKSMVM

SEQ ID NO: 1760 - protein, 1909 aa, synthetic construct
MAPKKKRKVGIHGVPAAAMQMQLEANADTSVEEESFGPQPISRLEQCGINANDVKKLEEAGFHTVEAVAYAPKKELINIKGISEAKADKILAEAAKLVPMGFTTETEFHQRRSEIIQITTGSKELDKLLQGGIETGSITEMFGEFRTGKTQICHTLAVTCQLPIDRGGGEGKAMYIDTEGTFRPERLLAVAERYGLSGSDVLDNVAYARAFNTDHQTQLLYQASAMMVESRYALLIVDSATALYRTDYSGRGELSARQMHLARFLRMLLRLADEFGVAVVITNQVVAQVDGAAMFAADPKKPIGGNIIAHASTTRLYLRKGRGETRICKIYDSPCLPEAEAMFAINADGVGDAKDGGSGSETPGTSESNISGSSCGSPNSADTSSDFKDLWTKLKECHDREVQGLQVKVTKLKQERILDAQRLEEFFTKNQQLREQQKVLHETIKVLEDRLRAGLCDRCAVTEEHMRKKQQEFENIRQQNLKLITELMNERNTLQEENKKLSEQLQQKIENDQQHQAAELECEEDVIPDSPITAFSFSGVNRLRRKENPHVRYIEQTHTKLEHSVCANEMRKVSKSSTHPQHNPNENEILVADTYDQSQSPMAKAHGTSSYTPDKSSFNLATVVAETLGLGVQEESETQGPMSPLGDELYHCLEGNHKKQPFESGSETPGTSESATPEGSYEQLAPQPCVGETLHSSLPRDSELFVPEEGSSEKESEDAPKTSPPTPGKHGLEQTGEEKVMVTVPDKNPPCPCCGTRVNSVLNLIEHLKVSHGKRGVCFRCAKCGKENSNYHSVVCHFKKCRGPETEKAPAGEWICEVCNRDFTTKIGLGQHKRLAHPAVRNQERIVASQPKETSNRGAHKRCWTKEEEELLIRLEAQFEGNKNINKLIAEHITTKTAKQISDKRRLLSRKPAEEPREEPGTCHHTRRAAASLRTEPEMSHHAQAEDRDNGPGRRPLPGRAAAGGRTMDEIRRHPDKGNGQQRPTKQKSEEQLQAYYKKTLEERLSAGALNTFPRAFKQVMEGRDIKLVINQTAQDCFGCLESISQIRTATRDKKDTVTREKHPKKPFQKWMKKRAIKKGNYLRFQRLFYLDRGKLAKIILDDIECLSCDIPLSEIYSVFKTRWETTGSFKSLGDFKTYGKADNTAFRELITAKEIEKNVQEMSKGSAPGPDGITLGDVVKMDPEFSRTMEIFNLWLTTGKIPDMVRGCRTVLIPKSSKPDRLKDINNWRPITIGSILLRLFSRIVTARLSKACPLNPRQRGFIRAAGCSENLKLLQTIIWSAKREHRPLGVVFVDIAKAFDTVSHQHIIHALQQREVDPHIVGLVSNMYENISTYITTKRNTHTDKIQIRVGVKQGDPMSPLLFNLAMDPLLCKLEESGKGYHRGQSSITAMAFADDLVLLSDSWENMNTNISILETFCNLTGLKTQGQKCHGFYIKPTKDSYTINDCAAWTINGTPLNMIDPGESEKYLGLQFDPWIGIARSGLSTKLDFWLQRIDQAPLKPLQKTDILKTYTIPRLIYIADHSEVKSALLETLDQKIRTAVKEWLHLPPCTCDAILYSSTRDGGLGITKLAGLIPSVQARRLHRIAQSSDDTMKCFMEKEKMEQLHKKLWIQAGGDRENIPSIWEAPPSSEPPNNVSTNSEWEAPTQKDKFPKPCNWRKNEFKKWTKLASQGRGIVNFERDKISNHWIQYYRRIPHRKLLTALQLRANVYPTREFLARGRQDQYIKACRHCDADNESCAHIIGNCPVTQDARIKRHNYICELLLEEAKKKDWVVFKEPHIRDSNKELYKPDLIFVKDGRALVVDVTVRYEAAKSSLEEAAAEKVRKYKHLETEVRHLTNAKDVTFVGFPLGARGKWHQDNFKLLTELGLSKSRQVKMAETFSTVALFSSVDIVHMFASRARKSMVM

SEQ ID NO: 1761 - protein, 1390 aa, synthetic construct
MASCPKPGPPVSAGAMSLESGLTTHSVLAIERGPNSLANSGSDFGGGGLGLPLRLLRVSVGTQTSRSDWVDLVSWSHPGPTSKSQQVDLVSLFPKHRVDLLSKNDQVDLVAQFLPSKFPPNLAENDLALLVNLEFYRSDLHVYECVHKAAHWEGLSGLPEVYEQLAPQPCVGETLHSSLPRDSELFVPEEGSSEKESEDAPKTSPPTPGKHGLEQTGEEKVMVTVPDKNPPCPCCGTRVNSVLNLIEHLKVSHGKRGVCFRCAKCGKENSNYHSVVCHFKKCRGPETEKAPAGEWICEVCNRDFTTKIGLGQHKRLAHPAVRNQERIVASQPKETSNRGAHKRCWTKEEEELLIRLEAQFEGNKNINKLIAEHITTKTAKQISDKRRLLSRKPAEEPRMEPGTCHHTRRAAASLRTEPEMSHHAQAEDRDNGPGRRPLPGRAAAGGRTMDEIRRHPDKGNGQQRPTKQKSEEQLQAYYKKTLEERLSAGALNTFPRAFKQVMEGRDIKLVINQTAQDCFGCLESISQIRTATRDKKDTVTREKHPKKPFQKWMKKRAIKKGNYLRFQRLFYLDRGKLAKIILDDIECLSCDIPLSEIYSVFKTRWETTGSFKSLGDFKTYGKADNTAFRELITAKEIEKNVQEMSKGSAPGPDGITLGDVVKMDPEFSRTMEIFNLWLTTGKIPDMVRGCRTVLIPKSSKPDRLKDINNWRPITIGSILLRLFSRIVTARLSKACPLNPRQRGFIRAAGCSENLKLLQTIIWSAKREHRPLGVVFVDIAKAFDTVSHQHIIHALQQREVDPHIVGLVSNMYENISTYITTKRNTHTDKIQIRVGVKQGDPMSPLLFNLAMDPLLCKLEESGKGYHRGQSSITAMAFADDLVLLSDSWENMNTNISILETFCNLTGLKTQGQKCHGFYIKPTKKSYTINDCAAWTINGTPLNMIDPGESEKYLGLQFDPWIGIARSGLSTKLDFWLQRIDQAPLKPLQKLDILKTYTIPRLIYIADHSEVKSALLETLDQKIRTAVKEWLHLPPCTCDAILYSSTRDGGLGITKLAGLIPSVQARRLHRIAQSSDDTMKCFMEKEKMEQLHKKLWIQAGGDRENIPSIWEAPPSSEPPNNVSTNSEWEAPTQKDKFPKPCNWRKNEFKKWTKLASQGRGIVNFERDKISNHWIQYYRRIPHRKLLTALQLRANVYPTREFLARGRQDQYIKACRHCDADNESCAHIIGNCPVTQDARIKRHNYICELLLEEAKKKDWVVFKEPHIRDSNKELYKPDLIFVKDGRALVVDVTVRYEAAKSSLEEAAAEKVRKYKHLETEVRHLTNAKDVTFVGFPLGARGKWHQDNFKLLTELGLSKSRQVKMAETFSTVALFSSVDIVHMFASRARKSMVM

SEQ ID NO: 1762 - protein, 1390 aa, synthetic construct
MASCPKPGPPVSAGAMSLESGLTTHSVLAIERGPNSLANSGSDFGGGGLGLPLRLLRVSVGTQTSRSDWVDLVSWSHPGPTSKSQQVDLVSLFPKHRVDLLSKNDQVDLVAQFLPSKFPPNLAENDLALLVNLEFYRSDLHVYECVHKAAHWEGLSGLPEVYEQLAPQPCVGETLHSSLPRDSELFVPEEGSSEKESEDAPKTSPPTPGKHGLEQTGEEKVMVTVPDKNPPCPCCGTRVNSVLNLIEHLKVSHGKRGVCFRCAKCGKENSNYHSVVCHFKKCRGPETEKAPAGEWICEVCNRDFTTKIGLGQHKRLAHPAVRNQERIVASQPKETSNRGAHKRCWTKEEEELLIRLEAQFEGNKNINKLIAEHITTKTAKQISDKRRLLSRKPAEEPRMEPGTCHHTRRAAASLRTEPEMSHHAQAEDRDNGPGRRPLPGRAAAGGRTMDEIRRHPDKGNGQQRPTKQKSEEQLQAYYKKTLEERLSAGALNTFPRAFKQVMEGRDIKLVINQTAQDCFGCLESISQIRTATRDKKDTVTREKHPKKPFQKWMKKRAIKKGNYLRFQRLFYLDRGKLARIILDDIECLSCDIPLSEIYSVFKTRWETTGSFKSLGDFKTYGKADNTAFRELITAKEIEKNVQEMSKGSAPGPDGITLGDVVKMDPEFSRTMEIFNLWLTTGKIPDMVRGCRTVLIPKSSKPDRLKDINNWRPITIGSILLRLFSRIVTARLSKACPLNPRQRGFIRAAGCSENLKLLQTIIWSAKREHRPLGVVFVDIAKAFDTVSHQHIIHALQQREVDPHIVGLVSNMYENISTYITTKRNTHTDKIQIRVGVKQGDPMSPLLFNLAMDPLLCKLEESGKGYHRGQSSITAMAFADDLVLLSDSWENMNTNISILETFCNLTGLKTQGQKCHGFYIKPTKKSYTINDCAAWTINGTPLNMIDPGESEKYLGLQFDPWIGIARSGLSTKLDFWLQRIDQAPLKPLQKTDILKTYTIPRLIYIADHSEVKSALLETLDQKIRTAVKEWLHLPPCTCDAILYSSTRDGGLGITKLAGLIPSVQARRLHRIAQSSDDTMKCFMEKEKMEQLHKKLWIQAGGDRENIPSIWEAPPSSEPPNNVSTNSEWEAPTQKDKFPKPCNWRKNEFKKWTKLASQGRGIVNFERDKISNHWIQYYRRIPHRKLLTALQLRANVYPTREFLARGRQDQYIKACRHCDADNESCAHIIGNCPVTQDARIKRHNYICELLLEEAKKKDWVVFKEPHIRDSNKELYKPDLIFVKDGRALVVDVTVRYEAAKSSLEEAAAEKVRKYKHLETEVRHLTNAKDVTFVGFPLGARGKWHQDNFKLLTELGLSKSRQVKMAETFSTVALFSSVDIVHMFASRARKSMVM

SEQ ID NO: 1763 - protein, 1390 aa, synthetic construct
MASCPKPGPPVSAGAMSLESGLTTHSVLAIERGPNSLANSGSDFGGGGLGLPLRLLRVSVGTQTSRSDWVDLVSWSHPGPTSKSQQVDLVSLFPKHRVDLLSKNDQVDLVAQFLPSKFPPNLAENDLALLVNLEFYRSDLHVYECVHKAAHWEGLSGLPEVYEQLAPQPCVGETLHSSLPRDSELFVPEEGSSEKESEDAPKTSPPTPGKHGLEQTGEEKVMVTVPDKNPPCPCCGTRVNSVLNLIEHLKVSHGKRRVCFRCAKCGKENSNYHSVVCHFKKCRGPETEKAPAGEWICEVCNRDFTTKIGLGQHKRLAHPAVRNQERIVASQPKETSNRGAHKRCWTKEEEELLIRLEAQFEGNKNINKLIAEHITTKTAKQISDKRRLLSRKPAEEPRMEPGTCHHTRRAAASLRTEPEMSHHAQAEDRDNGPGRRPLPGRAAAGGRTMDEIRRHPDKGNGQQRPTKQKSEEQLQAYYKKTLEERLSAGALNTFPRAFKQVMEGRDIKLVINQTAQDCFGCLESISQIRTATRDKKDTVTREKHPKKPFQKWMKKRAIKKGNYLRFQRLFYLDRGKLAKIILDDIECLSCDIPLSEIYSVFKTRWETTGSFKSLGDFKTYGKADNTAFRELITAKEIEKNVQEMSKGSAPGPDGITLGDVVKMDPEFSRTMEIFNLWLTTGKIPDMVRGCRTVLIPKSSKPDRLKDINNWRPITIGSILLRLFSRIVTARLSKACPLNPRQRGFIRAAGCSENLKLLQTIIWSAKREHRPLGVVFVDIAKAFDTVSHQHIIHALQQREVDPHIVGLVSNMYENISTYITTKRNTHTDKIQIRVGVKQGDPMSPLLFNLAMDPLLCKLEESGKGYHRGQSSITAMAFADDLVLLSDSWENMNTNISILETFCNLTGLKTQGQKCHGFYIKPTKKSYTINDCAAWTINGTPLNMIDPGESEKYLGLQFDPWIGIARSGLSTKLDFWLQRIDQAPLKPLQKTDILKTYTIPRLIYIADHSEVKSALLETLDQKIRTAVKEWLHLPPCTCDAILYSSTRDGGLGITKLAGLIPSVQARRLHRIAQSSDDTMKCFMEKEKMEQLHKKLWIQAGGDRENIPSIWEAPPSSEPPNNVSTNSEWEAPTQKDKFPKPCNWRKNEFKKWTKLASQGRGIVNFERDKISNHWIQYYRRIPHRKLLTALQLRANVYPTREFLARGRQDQYIKACRHCDADNESCAHIIGNCPVTQDARIKRHNYICELLLEEAKKKDWVVFKEPHIRDSNKELYKPDLIFVKDGRALVVDVTVRYEAAKSSLEEAAAEKVRKYKHLETEVRHLTNAKDVTFVGFPLGARGKWHQDNFKLLTELGLSKSRQVKMAETFSTVALFSSVDIVHMFASRARKSMVM

SEQ ID NO: 1764 - protein, 1390 aa, synthetic construct
MASCPKPGPPVSAGAMSLESGLTTHSVLAIERGPNSLANSGSDFGGGGLGLPLRLLRVSVGTQTSRSDWVDLVSWSHPGPTSKSQQVDLVSLFPKHRVDLLSKNDQVDLVAQFLPSKFPPNLAENDLALLVNLEFYRSDLHVYECVHKAAHWEGLSGLPEVYEQLAPQPCVGETLHSSLPRDSELFVPEEGSSEKESEDAPKTSPPTPGKHGLEQTGEEKVMVTVPDKNPPCPCCGTRVNSVLNLIEHLKVSHGKRGVCFRCAKCGKENSNYHSVVCHFKKCRGPETEKAPAGEWICEVCNRDFTTKIGLGQHKRLAHPAVRNQERIVASQPKETSNRGAHKRCWTKEEEELLIRLEAQFEGNKNINKLIAEHITTKTAKQISDKRRLLSRKPAEEPRMEPGTCHHTRRAAASLRTEPEMSHHAQAEDRDNGPGRRPLPGRAAAGGRTMDEIRRHPDKGNGQQRPTKQKSEEQLQAYYKKTLEERLSAGALNTFPRAFKQVMEGRDIKLVINQTAQDCFGCLESISQIRTATRDKKDTVTREKHPKKPFQKWMKKRAIKKGNYLRFQRLFYLDRGKLAKIILDDIECLSCDIPLSEIYSVFKTRWETTGSFKSLGDFKTYGKADNTAFRELITAKEIEKNVQEMSKGSAPGPDGITLGDVVKMDPEFSRTMEIFNLWLTTGKIPDMVRGCRTVLIPKSSKPDRLKDINNWRPITIGSILLRLFSRIVTARLSKACPLNPRQRGFIRAAGCSENLKLLQTIIWSAKREHRPLGVVFVDIAKAFDTVSHQHIIHALQQREVDPHIVGLVSNMYENISTYITTKRNTHTDKIQIRVGVKQGDPMSPLLFNLAMDPLLCKLEESGKGYHRGQSSITAMAYADDLVLLSDSWENMNTNISILETFCNLTGLKTQGQKCHGFYIKPTKKSYTINDCAAWTINGTPLNMIDPGESEKYLGLQFDPWIGIARSGLSTKLDFWLQRIDQAPLKPLQKTDILKTYTIPRLIYIADHSEVKSALLETLDQKIRTAVKEWLHLPPCTCDAILYSSTRDGGLGITKLAGLIPSVQARRLHRIAQSSDDTMKCFMEKEKMEQLHKKLWIQAGGDRENIPSIWEAPPSSEPPNNVSTNSEWEAPTQKDKFPKPCNWRKNEFKKWTKLASQGRGIVNFERDKISNHWIQYYRRIPHRKLLTALQLRANVYPTREFLARGRQDQYIKACRHCDADNESCAHIIGNCPVTQDARIKRHNYICELLLEEAKKKDWVVFKEPHIRDSNKELYKPDLIFVKDGRALVVDVTVRYEAAKSSLEEAAAEKVRKYKHLETEVRHLTNAKDVTFVGFPLGARGKWHQDNFKLLTELGLSKSRQVKMAETFSTVALFSSVDIVHMFASRARKSMVM

SEQ ID NO: 1765 - protein, 1459 aa, synthetic construct
MAKRTADGSEFESPKKKRKVSGGSRVSPREYRSSQESAQEASTITSLTHSQFDLSVDGEILPVPSDLDADAPALEPALDDGATHTLPSTTGNLAAVSDWVMSTVPVAPPRRRRGRILTVTCDEREGNITPMASVRFFRAELCPVVQETAETRDTAMSLQAPPSTATEPNHPPISFGASSETFPITFGDFNEGEIESLSSELLTFGDFLPGEVDDLTDSDWSTCSDTDDELRLDRAGGSGSETPGTSESATPESLFVPEEGSSEKESEDAPKTSPPTPGKHGLEQTGEEKVMVTVPDKNPPCPCCGTRVNSVLNLIEHLKVSHGKRGVCFRCAKCGKENSNYHSVVCHFKKCRGPETEKAPAGEWICEVCNRDFTTKIGLGQHKRLAHPAVRNQERIVASQPKETSNRGAHKRCWTKEEEELLIRLEAQFEGNKNINKLIAEHITTKTAKQISDKRRLLSRKPAEEPREEPGTCHHTRRAAASLRTEPEMSHHAQAEDRDNGPGRRPLPGRAAAGGRTMDEIRRHPDKGNGQQRPTKQKSEEQLQAYYKKTLEERLSAGALNTFPRAFKQVMEGRDIKLVINQTAQDCFGCLESISQIRTATRDKKDTVTREKHPKKPFQKWMKKRAIKKGNYLRFQRLFYLDRGKLAKIILDDIECLSCDIPLSEIYSVFKTRWETTGSFKSLGDFKTYGKADNTAFRELITAKEIEKNVQEMSKGSAPGPDGITLGDVVKMDPEFSRTMEIFNLWLTTGKIPDMVRGCRTVLIPKSSKPDRLKDINNWRPITIGSILLRLFSRIVTARLSKACPLNPRQRGFIRAAGCSENLKLLQTIIWSAKREHRPLGVVFVDIAKAFDTVSHQHIIHALQQREVDPHIVGLVSNMYENISTYITTKRNTHTDKIQIRVGVKQGDPMSPLLFNLAMDPLLCKLEESGKGYHRGQSSITAMAFADDLVLLSDSWENMNTNISILETFCNLTGLKTQGQKCHGFYIKPTKDSYTINDCAAWTINGTPLNMIDPGESEKYLGLQFDPWIGIARSGLSTKLDFWLQRIDQAPLKPLQKTDILKTYTIPRLIYIADHSEVKSALLETLDQKIRTAVKEWLHLPPCTCDAILYSSTRDGGLGITKLAGLIPSVQARRLHRIAQSSDDTMKCFMEKEKMEQLHKKLWIQAGGDRENIPSIWEAPPSSEPPNNVSTNSEWEAPTQKDKFPKPCNWRKNEFKKWTKLASQGRGIVNFERDKISNHWIQYYRRIPHRKLLTALQLRANVYPTREFLARGRQDQYIKACRHCDADNESCAHIIGNCPVTQDARIKRHNYICELLLEEAKKKDWVVFKEPHIRDSNKELYKPDLIFVKDARALVVDVTVRYEAAKSSLEEAAAEKVRKYKHLETEVRHLTNAKDVTFVGFPLGARGKWHQDNFKLLTELGLSKSRQVKMAETFSTVALFSSVDIVHMFASRARKSMVM

SEQ ID NO: 1766 - protein, 1640 aa, synthetic construct
MASCPKPGPPVSAGAMSLESGLTTHSVLAIERGPNSLANSGSDFGGGGLGLPLRLLRVSVGTQTSRSDWVDLVSWSHPGPTSKSQQVDLVSLFPKHRVDLLSKNDQVDLVAQFLPSKFPPNLAENDLALLVNLEFYRSDLHVYECVHFAAHWEGLSGLPEVYEQLAPQPCVGETLHSSLPRDSELFVPEEGSSEKESEDAPKTSPPTPGKHGLEQTGEEKVMVTVPDKNPPCPCCGTRVNSVLNLIEHLKVSHGKRGVCFRCAKCGKENSNYHSVVCHFKKCRGPETEKAPAGEWICEVCNRDFTTKIGLGQHKRLAHPAVRNQERIVASQPKETSNRGAHKRCWTKEEEELLIRLEAQFEGNKNINKLIAEHITTKTAKQISDKRRLLSRKPAEEPREEPGTCHHTRRAAASLRTEPEMSHHAQAEDRDNGPGRRPLPGRAAAGGRTMDEIRRHPDKGNGQQRPTKQKSEEQLQAYYKKTLEERLSAGALNTFPRAFKQVMEGRDIKLVINQTAQDCFGCLESISQIRTATRDKKDTVTREKHPKKPFQKWMKKRAIKKGNYLRFQRLFYLDRGKLAKIILDDIECLSCDIPLSEIYSVFKTRWETTGSFKSLGDFKTYGKADNTAFRELITAKEIEKNVQEMSKGSAPGPDGITLGDVVKMDPEFSRTMEIFNLWLTTGKIPDMVRGCRTVLIPKSSKPDRLKDINNWRPITIGSILLRLFSRIVTARLSKACPLNPRQRGFIRAAGCSENLKLLQTIIWSAKREHRPLGVVFVDIAKAFDTVSHQHIIHALQQREVDPHIVGLVSNMYENISTYITTKRNTHTDKIQIRVGVKQGDPMSPLLFNLAMDPLLCKLEESGKGYHRGQSSITAMAFADDLVLLSDSWENMNTNISILETFCNLTGLKTQGQKCHGFYIKPTKDSYTINDCAAWTINGTPLNMIDPGESEKYLGLQFDPWIGIARSGLSTKLDFWLQRIDQAPLKPLQKTDILKTYTIPRLIYIADHSEVKSALLETLDQKIRTAVKEWLHLPPCTCDAILYSSTRDGGLGITKLAGLIPSVQARRLHRIAQSSDDTMKCFMEKEKMEQLHKKLWIQAGGDRENIPSIWEAPPSSEPPNNVSTNSEWEAPTQKDKFPKPCNWRKNEFKKWTKLASQGRGIVNFERDKISNHWIQYYRRIPHRKLLTALQLRANVYPTREFLARGRQDQYIKACRHCDADNESCAHIIGNCPVTQDARIKRHNYICELLLEEAKKKDWVVFKEPHIRDSNKELYKPDLIFVKDARALVVDVTVRYEAAKSSLEEAAAEKVRKYKHLETEVRHLTNAKDVTFVGFPLGARGKWHQDNFKLLTELGLSKSRQVKMAETFSTVALFSSVDIVHMFASRARKSMVMSGSETPGTSESATPERVSPREYRSSQESAQEASTITSLTHSQFDLSVDGEILPVPSDLDADAPALEPALDDGATHTLPSTTGNLAAVSDWVMSTVPVAPPRRRRGRILTVTCDEREGNITPMASVRFFRAELCPVVQETAETRDTAMSLQAPPSTATEPNHPPISFGASSETFPITFGDFNEGEIESLSSELLTFGDFLPGEVDDLTDSDWSTCSDTDDELRLDRAGGSGGSKRTADGSEFESPKKKRKV

SEQ ID NO: 1767 - protein, 1895 aa, synthetic construct
MAKRTADGSEFESPKKKRKVSGGSGCVSIIGRLHVNQRGSGSASITAYAQQTRGLLGAIVVSMTGRDRTEQAGEVQILSTVSQSFLGTTISGVLWTVYHGAGNKTLAGLRGPVTQMYSSAEGDLVGWPSPPGTKSLEPCKCGAVDLYLVTRNADVIPARRRGDKRGALLSPRPISTLKGSSGGPVLCPRGHVVGLFRAAVCSRGVAKSIDFIPVETLDVVTRSPTFSDNSTPPAVPQTYQVGYLHAPTGSGKSTKVPVAYAAQGYKVLVLNPSVAATLGFGAYLSKAHGINPNIRTGVRTVMTGEAITYSTYGKFLADGGCASGAYDIIICDECHAVDATSILGIGTVLDQAETAGVRLTVLATATPPGSVTTPHPDIEEVGLGREGEIPFYGRAIPLSCIKGGRHLIFCHSKKKCDELAAALRGMGLNAVAYYRGLDVSIIPAQGDVVVVATDALMTGYTGDFDSVIDCNVAVTQAVDFSLDPTFTITTQTVPQDAVSRSQRRGRTGRGRQGTYRYVSTGERASGMFDSVVLCECYDAGAAWYDLTPAETTVRLRAYFNTPGLPVCQDHLEFWEAVFTGLTHIDAHFLSQTKQAGENFAYLVAYQATVCARAKAPPPSWDAMWKCLARLKPTLAGPTPLLYRLGPITNEVTLTHPGTKYIATCMQADLEVMTSGSETPGTSESATPESLFVPEEGSSEKESEDAPKTSPPTPGKHGLEQTGEEKVMVTVPDKNPPCPCCGTRVNSVLNLIEHLKVSHGKRGVCFRCAKCGKENSNYHSVVCHFKKCRGPETEKAPAGEWICEVCNRDFTTKIGLGQHKRLAHPAVRNQERIVASQPKETSNRGAHKRCWTKEEEELLIRLEAQFEGNKNINKLIAEHITTKTAKQISDKRRLLSRKPAEEPREEPGTCHHTRRAAASLRTEPEMSHHAQAEDRDNGPGRRPLPGRAAAGGRTMDEIRRHPDKGNGQQRPTKQKSEEQLQAYYKKTLEERLSAGALNTFPRAFKQVMEGRDIKLVINQTAQDCFGCLESISQIRTATRDKKDTVTREKHPKKPFQKWMKKRAIKKGNYLRFQRLFYLDRGKLAKIILDDIECLSCDIPLSEIYSVFKTRWETTGSFKSLGDFKTYGKADNTAFRELITAKEIEKNVQEMSKGSAPGPDGITLGDVVKMDPEFSRTMEIFNLWLTTGKIPDMVRGCRTVLIPKSSKPDRLKDINNWRPITIGSILLRLFSRIVTARLSKACPLNPRQRGFIRAAGCSENLKLLQTIIWSAKREHRPLGVVFVDIAKAFDTVSHQHIIHALQQREVDPHIVGLVSNMYENISTYITTKRNTHTDKIQIRVGVKQGDPMSPLLFNLAMDPLLCKLEESGKGYHRGQSSITAMAFADDLVLLSDSWENMNTNISILETFCNLTGLKTQGQKCHGFYIKPTKDSYTINDCAAWTINGTPLNMIDPGESEKYLGLQFDPWIGIARSGLSTKLDFWLQRIDQAPLKPLQKTDILKTYTIPRLIYIADHSEVKSALLETLDQKIRTAVKEWLHLPPCTCDAILYSSTRDGGLGITKLAGLIPSVQARRLHRIAQSSDDTMKCFMEKEKMEQLHKKLWIQAGGDRENIPSIWEAPPSSEPPNNVSTNSEWEAPTQKDKFPKPCNWRKNEFKKWTKLASQGRGIVNFERDKISNHWIQYYRRIPHRKLLTALQLRANVYPTREFLARGRQDQYIKACRHCDADNESCAHIIGNCPVTQDARIKRHNYICELLLEEAKKKDWVVFKEPHIRDSNKELYKPDLIFVKDARALVVDVTVRYEAAKSSLEEAAAEKVRKYKHLETEVRHLTNAKDVTFVGFPLGARGKWHQDNFKLLTELGLSKSRQVKMAETFSTVALFSSVDIVHMFASRARKSMVM

SEQ ID NO: 1768 - protein, 2077 aa, synthetic construct
MAKRTADGSEFESPKKKRKVSGGSLFVVRPGRKKNELEAFFIENEPEKLSQMQNLKADRIYRFIMREGRLFKVLEGSQYRNPKEIEKLLRQSRIVLVNADEWEDYFKRRLQNKRVEKAELCRLCLLEGRITVLTEGNRIKYHNEYICERCAEDELKRELRFRFKSIAMFDQAKKLLERFRDLDKVLYAFDPRFDPTKHPEITKWDELKAKHVKVEKIKVDELPVPEKFKEVLKSEGVRELLPVQSLAVKNGLLDGENLLVVSATASGKTLIGELAGVPKAMQGKKLLFLVPLVALANQKYEDFKRRYSKLGLRVAIRVGMSRIKTKDELVVVDTGIDADIIVGTYEGIDYLLRAGRKIGNVGTIVIDEIHTLDDEERGPRLDGLIARLRKLYPKAQFIGLSATVGNPDELAKELGLKLVLYDERPVDLERHIIIVRNESEKWRHIANLCRAEAMRKSKQGYKGQSIVFTFSRKRTHELAAYLTSKGLKAKPYHSGLPYKQRKLTEMEFLAQRLDVVVTTAALGAGVDFPASQVIFESLAMGNKWLSVREFHQMLGRAGRPLYHEKGKVYLLVEPGRKYSAQMEGTEDEVAFKLLTAPIEPVQVEWSDELEQDNVLAHSCVFNRLDVIEEVQSMCLGANQSAEKVLEKLEEFDFVKMKRPIVEVTPYGRAVSMSFLLPKEATFIRGNLGKREARWIAVKLLPFENIYLSGTLQRELEGAVRGRLSANVFSPSFASILEELDKVIPELSPNAAERLFTIYQEFFMCPEEDCTEYAMERVSNLIIELRRSGKHPTQIAEHFRKVYGLIVYPGDVFTWLDGIVRKLEAIERIARVFRVRKTEEGAKILKREIEEGRMIRSGSETPGTSESATPESLFVPEEGSSEKESEDAPKTSPPTPGKHGLEQTGEEKVMVTVPDKNPPCPCCGTRVNSVLNLIEHLKVSHGKRGVCFRCAKCGKENSNYHSVVCHFKKCRGPETEKAPAGEWICEVCNRDFTTKIGLGQHKRLAHPAVRNQERIVASQPKETSNRGAHKRCWTKEEEELLIRLEAQFEGNKNINKLIAEHITTKTAKQISDKRRLLSRKPAEEPREEPGTCHHTRRAAASLRTEPEMSHHAQAEDRDNGPGRRPLPGRAAAGGRTMDEIRRHPDKGNGQQRPTKQKSEEQLQAYYKKTLEERLSAGALNTFPRAFKQVMEGRDIKLVINQTAQDCFGCLESISQIRTATRDKKDTVTREKHPKKPFQKWMKKRAIKKGNYLRFQRLFYLDRGKLAKIILDDIECLSCDIPLSEIYSVFKTRWETTGSFKSLGDFKTYGKADNTAFRELITAKEIEKNVQEMSKGSAPGPDGITLGDVVKMDPEFSRTMEIFNLWLTTGKIPDMVRGCRTVLIPKSSKPDRLKDINNWRPITIGSILLRLFSRIVTARLSKACPLNPRQRGFIRAAGCSENLKLLQTIIWSAKREHRPLGVVFVDIAKAFDTVSHQHIIHALQQREVDPHIVGLVSNMYENISTYITTKRNTHTDKIQIRVGVKQGDPMSPLLFNLAMDPLLCKLEESGKGYHRGQSSITAMAFADDLVLLSDSWENMNTNISILETFCNLTGLKTQGQKCHGFYIKPTKDSYTINDCAAWTINGTPLNMIDPGESEKYLGLQFDPWIGIARSGLSTKLDFWLQRIDQAPLKPLQKTDILKTYTIPRLIYIADHSEVKSALLETLDQKIRTAVKEWLHLPPCTCDAILYSSTRDGGLGITKLAGLIPSVQARRLHRIAQSSDDTMKCFMEKEKMEQLHKKLWIQAGGDRENIPSIWEAPPSSEPPNNVSTNSEWEAPTQKDKFPKPCNWRKNEFKKWTKLASQGRGIVNFERDKISNHWIQYYRRIPHRKLLTALQLRANVYPTREFLARGRQDQYIKACRHCDADNESCAHIIGNCPVTQDARIKRHNYICELLLEEAKKKDWVVFKEPHIRDSNKELYKPDLIFVKDARALVVDVTVRYEAAKSSLEEAAAEKVRKYKHLETEVRHLTNAKDVTFVGFPLGARGKWHQDNFKLLTELGLSKSRQVKMAETFSTVALFSSVDIVHMFASRARKSMVM

SEQ ID NO: 1769 - protein, 1390 aa, synthetic construct; identical to SEQ ID NO: 234

SEQ ID NO: 1770 - protein, 1589 aa, synthetic construct
MAPKKKRKVPTLLGFHTASGKKVKIAKESLDKVKNLFDEKEQGGSGGGNISGSSCGSPNSADTSSDFKDLWTKLKECHDREVQGLQVKVTKLKQERILDAQRLEEFFTKNQQLREQQKVLHETIKVLEDRLRAGLCDRCAVTEEHMRKKQQEFENIRQQNLKLITELMNERNTLQEENKKLSEQLQQKIENDQQHQAAELECEEDVIPDSPITAFSFSGVNRLRRKENPHVRYIEQTHTKLEHSVCANEMRKVSKSSTHPQHNPNENEILVADTYDQSQSPMAKAHGTSSYTPDKSSFNLATVVAETLGLGVQEESETQGPMSPLGDELYHCLEGNHKKQPFESGSETPGTSESATPEGSYEQLAPQPCVGETLHSSLPRDSELFVPEEGSSEKESEDAPKTSPPTPGKHGLEQTGEEKVMVTVPDKNPPCPCCGTRVNSVLNLIEHLKVSHGKRGVCFRCAKCGKENSNYHSVVCHFKKCRGPETEKAPAGEWICEVCNRDFTTKIGLGQHKRLAHPAVRNQERIVASQPKETSNRGAHKRCWTKEEEELLIRLEAQFEGNKNINKLIAEHITTKTAKQISDKRRLLSRKPAEEPREEPGTCHHTRRAAASLRTEPEMSHHAQAEDRDNGPGRRPLPGRAAAGGRTMDEIRRHPDKGNGQQRPTKQKSEEQLQAYYKKTLEERLSAGALNTFPRAFKQVMEGRDIKLVINQTAQDCFGCLESISQIRTATRDKKDTVTREKHPKKPFQKWMKKRAIKKGNYLRFQRLFYLDRGKLAKIILDDIECLSCDIPLSEIYSVFKTRWETTGSFKSLGDFKTYGKADNTAFRELITAKEIEKNVQEMSKGSAPGPDGITLGDVVKMDPEFSRTMEIFNLWLTTGKIPDMVRGCRTVLIPKSSKPDRLKDINNWRPITIGSILLRLFSRIVTARLSKACPLNPRQRGFIRAAGCSENLKLLQTIIWSAKREHRPLGVVFVDIAKAFDTVSHQHIIHALQQREVDPHIVGLVSNMYENISTYITTKRNTHTDKIQIRVGVKQGDPMSPLLFNLAMDPLLCKLEESGKGYHRGQSSITAMAFADDLVLLSDSWENMNTNISILETFCNLTGLKTQGQKCHGFYIKPTKDSYTINDCAAWTINGTPLNMIDPGESEKYLGLQFDPWIGIARSGLSTKLDFWLQRIDQAPLKPLQKTDILKTYTIPRLIYIADHSEVKSALLETLDQKIRTAVKEWLHLPPCTCDAILYSSTRDGGLGITKLAGLIPSVQARRLHRIAQSSDDTMKCFMEKEKMEQLHKKLWIQAGGDRENIPSIWEAPPSSEPPNNVSTNSEWEAPTQKDKFPKPCNWRKNEFKKWTKLASQGRGIVNFERDKISNHWIQYYRRIPHRKLLTALQLRANVYPTREFLARGRQDQYIKACRHCDADNESCAHIIGNCPVTQDARIKRHNYICELLLEEAKKKDWVVFKEPHIRDSNKELYKPDLIFVKDGRALVVDVTVRYEAAKSSLEEAAAEKVRKYKHLETEVRHLTNAKDVTFVGFPLGARGKWHQDNFKLLTELGLSKSRQVKMAETFSTVALFSSVDIVHMFASRARKSMVM

SEQ ID NO: 1771 - protein, 1691 aa, synthetic construct
MAPKKKRKVESTVGPACPPGRTVTKRPWALAEDTPRGPDSPPKRPRPNSLPLTTTFRPLPPPPQTTSAVDPSSHSPVNPPRDQHATDTADEKPRAASPALSDASGPPTPDIPLSPGGTHARDPDADPDSPDLDSSGSETPGTSESATPESNISGSSCGSPNSADTSSDFKDLWTKLKECHDREVQGLQVKVTKLKQERILDAQRLEEFFTKNQQLREQQKVLHETIKVLEDRLRAGLCDRCAVTEEHMRKKQQEFENIRQQNLKLITELMNERNTLQEENKKLSEQLQQKIENDQQHQAAELECEEDVIPDSPITAFSFSGVNRLRRKENPHVRYIEQTHTKLEHSVCANEMRKVSKSSTHPQHNPNENEILVADTYDQSQSPMAKAHGTSSYTPDKSSFNLATVVAETLGLGVQEESETQGPMSPLGDELYHCLEGNHKKQPFESGSETPGTSESATPEGSYEQLAPQPCVGETLHSSLPRDSELFVPEEGSSEKESEDAPKTSPPTPGKHGLEQTGEEKVMVTVPDKNPPCPCCGTRVNSVLNLIEHLKVSHGKRGVCFRCAKCGKENSNYHSVVCHFKKCRGPETEKAPAGEWICEVCNRDFTTKIGLGQHKRLAHPAVRNQERIVASQPKETSNRGAHKRCWTKEEEELLIRLEAQFEGNKNINKLIAEHITTKTAKQISDKRRLLSRKPAEEPREEPGTCHHTRRAAASLRTEPEMSHHAQAEDRDNGPGRRPLPGRAAAGGRTMDEIRRHPDKGNGQQRPTKQKSEEQLQAYYKKTLEERLSAGALNTFPRAFKQVMEGRDIKLVINQTAQDCFGCLESISQIRTATRDKKDTVTREKHPKKPFQKWMKKRAIKKGNYLRFQRLFYLDRGKLAKIILDDIECLSCDIPLSEIYSVFKTRWETTGSFKSLGDFKTYGKADNTAFRELITAKEIEKNVQEMSKGSAPGPDGITLGDVVKMDPEFSRTMEIFNLWLTTGKIPDMVRGCRTVLIPKSSKPDRLKDINNWRPITIGSILLRLFSRIVTARLSKACPLNPRQRGFIRAAGCSENLKLLQTIIWSAKREHRPLGVVFVDIAKAFDTVSHQHIIHALQQREVDPHIVGLVSNMYENISTYITTKRNTHTDKIQIRVGVKQGDPMSPLLFNLAMDPLLCKLEESGKGYHRGQSSITAMAFADDLVLLSDSWENMNTNISILETFCNLTGLKTQGQKCHGFYIKPTKDSYTINDCAAWTINGTPLNMIDPGESEKYLGLQFDPWIGIARSGLSTKLDFWLQRIDQAPLKPLQKTDILKTYTIPRLIYIADHSEVKSALLETLDQKIRTAVKEWLHLPPCTCDAILYSSTRDGGLGITKLAGLIPSVQARRLHRIAQSSDDTMKCFMEKEKMEQLHKKLWIQAGGDRENIPSIWEAPPSSEPPNNVSTNSEWEAPTQKDKFPKPCNWRKNEFKKWTKLASQGRGIVNFERDKISNHWIQYYRRIPHRKLLTALQLRANVYPTREFLARGRQDQYIKACRHCDADNESCAHIIGNCPVTQDARIKRHNYICELLLEEAKKKDWVVFKEPHIRDSNKELYKPDLIFVKDGRALVVDVTVRYEAAKSSLEEAAAEKVRKYKHLETEVRHLTNAKDVTFVGFPLGARGKWHQDNFKLLTELGLSKSRQVKMAETFSTVALFSSVDIVHMFASRARKSMVM

SEQ ID NO: 1772 - protein, 1625 aa, synthetic construct; identical to SEQ ID NO: 629

SEQ ID NO: 1773 - protein, 1671 aa, synthetic construct
MGTALTPLLTKFATRYEMGTTPEEVANTLKQTCFKGQVNDSQMVALLIVADQYKLNPFTKELYAFPDKNNGIVPVVGVDGWARIINENPQFDGMEFSMDQQGTECTCKIYRKDRSHAISATEYMAECKRNTQPWQSHPRRMLRHKAMIQCARLAFGFAGIYDQDEAERIVERDVTPAEQYEDVSEAICLIKDSPTMEDLQAAFSNAWKAYKTKGARDQLTAAKDQRKKELLDAPIDVEFEETGDDRAASGGSSGGSSGSETPGTSESATPESSGGSSGGSSMASCPKPGPPVSAGAMSLESGLTTHSVLAIERGPNSLANSGSDFGGGGLGLPLRLLRVSVGTQTSRSDWVDLVSWSHPGPTSKSQQVDLVSLFPKHRVDLLSKNDQVDLVAQFLPSKFPPNLAENDLALLVNLEFYRSDLHVYECVHKAAHWEGLSGLPEVYEQLAPQPCVGETLHSSLPRDSELFVPEEGSSEKESEDAPKTSPPTPGKHGLEQTGEEKVMVTVPDKNPPCPCCGTRVNSVLNLIEHLKVSHGKRRVCFRCAKCGKENSNYHSVVCHFPKCRGPETEKAPAGEWICEVCNRDFTTKIGLGQHKRLAHPAVRNQERIVASQPKETSNRGAHKRCWTKEEEELLIRLEAQFEGHKNINKLIAEHITTKTAKQISDKRRLLSRKPAEEPRMEPGTCHHTRRAAASLRTEPEMSHHAQAEDRDNGPGRRPLPGRPAAGGRTMDEIRRHPDKGNGQQRPTKQKSEEQLQAYYKKTLEERLSAGALNTFPRAFKQVMEGRDIKLVINQTAQDCFGCLESISQIRTATRDKKYTGTREKHPKRPFQKWMKDRAIKKGNYLRFQRLFYLDRGKLAKIILDDIECLSCDIPLSEIYSVFKTRWETTGSFKSLGDFKTYGKADNTAFRELITAKEIEKNVQEMSKGSAPGPDGITLGDVVKMDPEFSLTMEIFNLWLTTGKIPDMVRGCRTVLIPKSSKPDRLKDINNWRPITIGSILLRLFSRIVTARLSKACPLNPRQRGFIRAAGCSENLKLLQTIIWSAKREHRPLGVVFVDIAKAFDTVSHQHIIHALQQREVDPHIVGLVSNMYENISTYITTKRNTHTDKIQIRVGVKQGDPMSPLLFNLAMDPLLCKLEESGKGYHRGQSSITAMAFADDLVLLSDSWENMNTNISILETFCNLTGLKTQGQKCHGFYIKPTKDSYTINDCAAWTINGTPLNMIDPGESEKYLGLQFDPWIGIARSGLSTKLDEWLQRIDQAPLKPLQKTDILKTYTIPRLIYIADHSEVKAALLETLDQKIRTAVKEWLHLPPCTCDAILYSSTRDGGLGITKLAGLIPSVQARRLHRIAQSSDDTMKCFMEKERMEQLHKKLWIQAGGDRENIPSIWEAPPSSEPPNNVSTNSEWEAPTQKPKFPKPCNWRKNEFKKWTKLASQGRGIVNFERDKISNHWIQYYRRIPHRKLLTALQLRANVYPTREFLARGRQDQYIKACRHCDADIESCAHIIGNCPVTQDARIKRHNYICELLLEEAKKKDWVVFKEPHIRDSNKELYKPDLIFVKDGRALVVDVTVRYEAAKSSLEEAAAEKVRKYKHLETEVRHLTNAKDVTFVGFPLGARGKWHQDNFKLLTELGLSKSRQVKMAETFSTVALFSSVDIVHMFASRARKSMVM

SEQ ID NO: 1774 - protein, 1671 aa, synthetic construct
MGTALTPLLTKFATRYEMGTTPEEVANTLKQTCFKGQVNDSQMVALLIVADQYKLNPFTKELYAFPDKNNGIVPVVGVDGWARIINENPQFDGMEFSMDQQGTECTCKIYRKDRSHAISATEYMAECKRNTQPWQSHPRRMLRHKAMIQCARLAFGFAGIYDQDEAERIVERDVTPAEQYEDVSEAICLIKDSPTMEDLQAAFSNAWKAYKTKGARDQLTAAKDQRKKELLDAPIDVEFEETGDDRAASGGSSGGSSGSETPGTSESATPESSGGSSGGSSMASCPKPGPPVSAGAMSLESGLTTHSVLAIERGPNSLANSGSDFGGGGLGLPLRLLRVSVGTQTSRSDWVDLVSWSHPGPTSKSQQVDLVSLFPKHRVDLLSKNDQVDLVAQFLPSKFPPNLAENDLALLVNLEFYRSDLHVYECVHKAAHWEGLSGLPEVYEQLAPQPCVGETLHSSLPRDSELFVPEEGSSEKESEDAPKTSPPTPGKHGLEQTGEEKVMVTVPDKNPPCPCCGTRVNSVLNLIEHLKVSHGKRGVCFRCAKCGKENSNYHSVVCHFKKCRGPETEKAPAGEWICEVCNRDFTTKIGLGQHKRLAHPAVRNQERIVASQPKETSNRGAHKRCWTKEEEELLIRLEAQFEGHKNINKLIAEHITTKTAKQISDKRRLLSRKPAEEPREEPGTCHHTRRAAASLRTEPEMSHHAQAEDRDNGPGRRPLPGRAAAGGRTMDEIRRHPDKGNGQQRPTKQKSEEQLQAYYKKTLEERLSAGALNTFPRAFKQVMEGRDIKLVINQTAQDCFGCLESISQIRTATRDKKYTVTREKHPKRPFQKWMKKRAIKKGNYLRFQRLFYLDRGKLAKIILDDIECLSCDIPLSEIYSVFKTRWETTGSFKSLGDFKTYGKADNTAFRELITAKEIEKNVQEMSKGSAPGPDGITLGDVVKMDPEFSLTMEIFNLWLTTGKIPDMVRGCRTVLIPKSSKPDRLKDINNWRPITIGSILLRLFSRIVTARLSKACPLNPRQRGFIRAAGCSENLKLLQTIIWSAKREHRPLGVVFVDIAKAFDTVSHQHIIHALQQREVDPHIVGLVSNMYENISTYITTKRNTHTDKIQIRVGVKQGDPMSPLLFNLAMDPLLCKLEESGKGYHRGQSSITAMAFADDLVLLSDSWENMNTNISILETFCNLTGLKTQGQKCHGFYIKPTKDSYTINDCAAWTINGTPLNMIDPGESEKYLGLQFDPWIGIARSGLSTKLDEWLQRIDQAPLKPLQKTDILKTYTIPRLIYIADHSEVKAALLETLDQKIRTAVKEWLHLPPCTCDAILYSSTRDGGLGITKLAGLIPSVQARRLHRIAQSSDDTMKCFMEKERMEQLHKKLWIQAGGDRENIPSIWEAPPSSEPPNNVSTNSEWEAPTQKPKFPKPCNWRKNEFKKWTKLASQGRGIVNFERDKISNHWIQYYRRIPHRKLLTALQLRANVYPTREFLARGRQDQYIKACRHCDADIESCAHIIGNCPVTQDARIKRHNYICELLLEEAKKKDWVVFKEPHIRDSNKELYKPDLIFVKDARALVVDVTVRYEAAKSSLEEAAAEKVRKYKHLETEVRHLTNAKDVTFVGFPLGARGKWHQDNFKLLTELGLSKSRQVKMAETFSTVALFSSVDIVHMFASRARKSMVM

SEQ ID NO: 1775 - protein, 1390 aa, synthetic construct
MASCPKPGPPVSAGAMSLESGLTTHSVLAIERGPNSLANSGSDFGGGGLGLPLRLLRVSVGTQTSRSDWVDLVSWSHPGPTSKSQQVDLVSLFPKHRVDLLSKNDQVDLVAQFLPSKFPPNLAENDLALLVNLEFYRSDLHVYEGVHKAAHWEGLSGLPEVYEQLAPQPCVGETLHSSLPRDSELFVPEEGSSEKESEDAPKTSPPTPGKHGLRQTGEEKVMVTVPDKNPPCPCCGTRVNSVLNLIEHLKVSHGKRGVCFRCAKCGKENSNYHSVVCHFKKCRGPETEKAPAGEWICEVCNRDFTTKIGLGQHKRLAHPAVRNQERIVASQPKETSNRGAHKRCWTKEEEELLIRLEAQFEGNKNINKLIAEHITTKTAKQISDKRRLLSRKPAEEPRMEPGTCHHTRRAAASLRTEPEMSHHAQAEDRDNGPGRRPLPGRAAAGGRTMDEIRRHPDKGNGQQRPTKQKSEEQLQAYYKKTLEERLSAGALNTFPRAFKQVMEGRDIKLVINQTAQDCFGCLESISQIRTATRDKKYTVTREKHPKKPFQKWMKKRAIKKGNYLRFQRLFYLDRGKLAKIILDDIECLSCDIPLSEIYSVFKTRWETTGSFKSLGDFKTYGKADNTAFRELITAKEIEKNVQEMSKGSAPGPDGITLGDVVKMDPEFSRTMEIFNLWLTTGKIPDMVRGCRTVLIPKSSDPDRLKDINNWRPITIGSILLRLFSRIVTARLSKACPLNPRQRGFIRAAGCSENLKLLQTIIWSAKREHRPLGVVFVDIAKAFDTVSHQHIIHALQQREVDPHIVGLVSNMYENISTYITTKRNTHTDKIQIRVGVKQGDPMSPLLFNLAMDPLLCKLEESGKGYHRGQSSITAMAFADDLVLLSDSWENMNTNIKILETFCNLTGLKTQGQKCHGFYIKPTKKSYTINDCAAWTINGTPLNMIDPGESEKYLGLQFDPWIGIARSGLSTKLDFWLQRIDQAPLKPLQKLDILKTYTIPRLIYIADHSEVKSALLETLDQKIRTAVKEWLHLPPCTCDAILYSSTRDGGLGITKLAGLIPSVQARRLHRIAQSSDDTMKCFMEKEKMEQLHKKLWIQAGGDRENIPSIWEAPPSSEPPNNVSTNSEWEAPTQKDKFPKPCNWRKNEFKKWTKLASQGRGIVNFERDKISNHWIQYYRRIPHRKLLTALQLRANVYPTREFLARGRQDQYIKACRHCDADNESCAHIIGNCPVTQDARIKRHNKICELLLEEAKKKDWVVFKEPHIRDSNKELYKPDLIFVKDGRALVVDVTVRYEAAKSSLEEAAAEKVRKYKHLETEVRHLTNAKDVTFVGFPLGARGKWHQDNFKLLTELGLSKSRQVKMAETFSTVALFSSVDIVHMFASRARKSMVM

SEQ ID NO: 1776 - protein, 1390 aa, synthetic construct
MASCPKPGPPVSAGAMSLESGLTTHSVLAIERGPNSLANSGSDFGGGGLGLPLRLLRVSVGTQTSRSDWVDLVSWSHPGPTSKSQQVDLVSLFPKHRVDLLSKNDQVDLVAQFLPSKFPPNLAENDLALLVNLEFYRSDLHVYEGVHKAAHWEGLSGLPEVYEQLAPQPCVGETLHSSLPRDSELFVPEEGSSEKESEDAPKTSPPTPGKHGLEQTGEEKVMVTVPDKNPPCPCCGTRVNSVLNLIEHLKVSHGKRGVCFRCAKCGKENSNYHSVVCHFKKCRGPETEKAPAGEWICEVCNRDFTTKIGLGQHKRRAHPAVRNQERIVASQPKETSNRGAHKRCWTKEEEELLIRLEAQFEGNKNINKLIAEHITTKTAKQISDKRRLLSRKPAEEPREMPGTCHHTRRAAASLRTEPEMSHHAQAEDRDNGPGRRPLPGRAAAGGRTMDEIRRHPDKGNGQQRPTKQKSEEQLQAYYKKTLEERLSAGALNTFPRAFKQVMEGRDIKLVINQTAQDYFGCLESISQIRTATRDKKDTVTRKKHPKKPFQKWMKKRAIKKGNYLRFQRLFHLDRGKLAKIILDDIECLSCDIPLSEIYSVFKTRWETTGSFKSLGDFKTYGKADNTAFRDLITAKEIEKNVQEMSKGSAPGPDGITLGDVVKMDPEGSRTMEIFNLWLTTGKIPDMVRGCRTVLIPKSSDPDRLKDINNWRPITIGSILLRLFSRIVTARLSKACPLNPRQRGFIRAAGCSENLKLLQTIIWSAKREHRPLGVVFVDIAKAFDTVSHQHIIHALQQREVDPHIVGLVSNMYENISTYITTKRNTHTDKIQIRVGVKQGDPMSPLLFNLAMDPLLCKLEESGKGYHRGQSSITAMAFADDLVLLSDSWEGMNTNISILETFCNLTGLKTQGQKCHGFYIKPTKKSYTINDCAAWTINGTPLNMIDPGESEKYLGLQFDPWIGIARSGLSTKLDFWLQRIDQAPLKPLQKLDILKTYTIPRLIYIADHSEVKTALLETLDQKIRTAVKEWLHLPPCTCDAILYSSTRDGGLGITKLAGLIPSVQARRLHRIAQSSDETMKCFMEKEKMEQLHKKLWIQAGGDRENIPSIWEAPPSSEPPNNVSTNSEWEAPTQKDKFPKPCNWRKNEFKKWTKLASQGRGIVNFERDKISNHWIQYYRRIPHRKLLTALQLRANVYPTREFLARGRQDQYIKACRHCDADIESCAHIIGNCPVTQDARIKRHNKICELLLEEAKKKDWVVFKEPHIRDSNKELYKPDLIFVKDARALVVDVTVRYEAAKSSLEEAAAEKVRKYKHLETEVRHLTNAKDVTFVGFPLGARGKWHQDNFKLLTELGLSKSRQVKMAETFSTVALFSSVDIVHMFASRARKSMVM

SEQ ID NO: 1777 - protein, 1390 aa, synthetic construct
MASCPKPGPPVSAGAMSLESGLTTHSVLAIERGPNSLANSGSDFGGGGLGLPLRLLRVSVGTQTSRSDWVDLVSWSHPGPTSKSQQVDLVSLFPKHRVDLLSKNDQVDLVAQFLPSKFPPNLAENDLALLVNLEFYRSDLHVYEGVHKAAHWEGLSGLPEVYEQLAPQPCVGETLHSSLPRDSELFVPEEGSSEKESEDAPKTSPPTPGKHGKRQTGEEKVMVTVPDKNPPCPCCGTRVNSVLNLIEHLKVSHGKRRVCFRCAKCGKENSNYHSVVCHFKKCRGPETEKAPAGEWICEVCNRDFTTKIGLGQHKRLAHPAVRNQERIVASQPKETSNRGAHKRCWTKEEEELLIRLEAQFEGNKNINKLIAEHITTKTAKQISDKRRLLSRKPAEEPREEPGTCHHTRRAAASLRTEPEMSHHAQAEDRDNGPGRRPLPGRAAAGGRTMDEIRRHPDKGNGQQRPTKQKSEEQLQAYYKKTLEERLSAGALNTFPRAFKQVMEGRDIKLVINQTAQDYFGCLESISQIRTATRDKKYTVTRKKHPKKPFQKWMKKRAIKKGNYLRFQRLFYLDRGKLAKIILDDIECLSCDIPLSEIYSVFKTRWETTGSFKSLGDFKTYGKADNTAFRELITAKEIEKNVQEMSKGSAPGPDGITLGDVVKMDPEGSRTMEIFNLWLTTGKIPDMVRGCRTVLIPKSSDPDRLKDINNWRPITIGSILLRLFSRIVTARLSKACPLNPRQRGFIRAAGCSENLKLLQTIIWSAKREHRPLGVVFVDIAKAFDTVSHQHIIHALQQREVDPHIVGLVSNMYENISTYITTKRNTHTDKIQIRVGVKQGDPMSPLLFNLAMDPLLCKLEESGKGYHRGQSSITAMAFADDLVLLSDSWEGMNTNISILETFCNLTGLKTQGQKCHGFYIKPTKKSYTINDCAAWTINGTPLNMIDPGESEKYLGLQFDPWIGIARSGLSTKLDFWLQRIDQAPLKPLQKLDILKTYTIPRLIYIADHSEVKTALLETLDQKIRTAVKEWLHLPPCTCDAILYSSTRDGGLGITKLAGLIPSVQARRLHRIAQSSDDTMKCFMEKEKMEQLHKKLWIQAGGDRENIPSIWEAPPSSEPPNNVSTNSEWEAPTQKDKFPKPCNWRKNEFKKWTKLASQGRGIVNFERDKISNHWIQYYRRIPHRKLLTALQLRANVYPTREFLARGRQDQYIKACRHCDADIESCAHIIGNCPVTQDARIKRHNKICELLLEEAKKKDWVVFKEPHIRDSNKELYKPDLIFVKDGRALVVDVTVRYEAAKSSLEEAAAEKVRKYKHLETEVRHLTNAKDVTFVGFPLGARGKWHQDNFKLLTELGLSKSRQVKMAETFSTVALFSSVDIVHMFASRARKSMVM

SEQ ID NO: 1778 - protein, 1390 aa, synthetic construct
MASCPKPGPPVSAGAMSLESGLTTHSVLAIERGPNSLANSGSDFGGGGLGLPLRLLRVSVGTQTSRSDWVDLVSWSHPGPTSKSQQVDLVSLFPKHRVDLLSKNDQVDLVAQFLPSKFPPNLAENDLALLVNLEFYRSDLHVYECVHKAAHWEGLSGLPEVYEQLAPQPCVGETLHSSLPRDSELFVPEEGSSEKESEDAPKTSPPTPGKHGLEQTGEEKVMVTVPDKNPPCPCCGTRVNSVLNLIEHLKVSHGKRRVCFRCAKCGKENSNYHSVVCHFPKCRGPETEKAPAGEWICEVCNRDFTTKIGLGQHKRLAHPAVRNQERIVASQPKETSNRGAHKRCWTKEEEELLIRLEAQFEGHKNINKLIAEHITTKTAKQISDKRRLLSRKPAEEPRMEPGTCHHTRRAAASLRTEPEMSHHAQAEDRDNGPGRRPLPGRPAAGGRTMDEIRRHPDKGNGQQRPTKQKSEEQLQAYYKKTLEERLSAGALNTFPRAFKQVMEGRDIKLVINQTAQDCFGCLESISQIRTATRDKKYTVTREKHPKRPFQKWMKDRAIKKGNYLRFQRLFYLDRGKLAKIILDDIECLSCDIPLSEIYSVFKTRWETTGSFKSLGDFKTYGKADNTAFRELITAKEIEKNVQEMSKGSAPGPDGITLGDVVKMDPEFSLTMEIFNLWLTTGKIPDMVRGCRTVLIPKSSKPDRLKDINNWRPITIGSILLRLFSRIVTARLSKACPLNPRQRGFIRAAGCSENLKLLQTIIWSAKREHRPLGVVFVDIAKAFDTVSHQHIIHALQQREVDPHIVGLVSNMYENISTYITTKRNTHTDKIQIRVGVKQGDPMSPLLFNLAMDPLLCKLEESGKGYHRGQSSITAMAFADDLVLLSDSWENMNTNISILETFCNLTGLKTQGQKCHGFYIKPTKDSYTINDCAAWTINGTPLNMIDPGESEKYLGLQFDPWIGIARSGLSTKLDEWLQRIDQAPLKPLQKTDILKTYTIPRLIYIADHSEVKAALLETLDQKIRTAVKEWLHLPPCTCDAILYSSTRDGGLGITKLAGLIPSVQARRLHRIAQSSDDTMKCFMEKERMEQLHKKLWIQAGGDRENIPSIWEAPPSSEPPNNVSTNSEWEAPTQKPKFPKPCNWRKNEFKKWTKLASQGRGIVNFERDKISNHWIQYYRRIPHRKLLTALQLRANVYPTREFLARGRQDQYIKACRHCDADIESCAHIIGNCPVTQDARIKRHNYICELLLEEAKKKDWVVFKEPHIRDSNKELYKPDLIFVKDGRALVVDVTVRYEAAKSSLEEAAAEKVRKYKHLETEVRHLTNAKDVTFVGFPLGARGKWHQDNFKLLTELGLSKSRQVKMAETFSTVALFSSVDIVHMFASRARKSMVM

SEQ ID NO: 1779 - protein, 1904 aa, synthetic construct
MASCPKPGPPVSAGAMSLESGLTTHSVLAIERGPNSLANSGSDFGGGGLGLPLRLLRVSVGTQTSRSDWVDLVSWSHPGPTSKSQQVDLVSLFPKHRVDLLSKNDQVDLVAQFLPSKFPPNLAENDLALLVNLEFYRSDLHVYECVHKAAHWEGLSGLPEVYEQLAPQPCVGETLHSSLPRDSELFVPEEGSSEKESEDAPKTSPPTPGKHGLEQTGEEKVMVTVPDKNPPCPCCGTRVNSVLNLIEHLKVSHGKRGVCFRCAKCGKENSNYHSVVCHFKKCRGPETEKAPAGEWICEVCNRDFTTKIGLGQHKRLAHPAVRNQERIVASQPKETSNRGAHKRCWTKEEEELLIRLEAQFEGNKNINKLIAEHITTKTAKQISDKRRLLSRKPAEEPREEPGTCHHTRRAAASLRTEPEMSHHAQAEDRDNGPGRRPLPGRAAAGGRTMDEIRRHPDKGNGQQRPTKQKSEEQLQAYYKKTLEERLSAGALNTFPRAFKQVMEGRDIKLVINQTAQDCFGCLESISQIRTATRDKKDTVTREKHPKKPFQKWMKKRAIKKGNYLRFQRLFYLDRGKLAKIILDDIECLSCDIPLSEIYSVFKTRWETTGSFKSLGDFKTYGKADNTAFRELITAKEIEKNVQEMSKGSAPGPDGITLGDVVKMDPEFSRTMEIFNLWLTTGKIPDMVRGCRTVLIILDTDYITEDGKPVIRIFKKENGEFKIEYDRTFEPYLYALLKDDSAIEEVKKITAERHGTVVTVKRVEKVQKKFLGRPVEVWKLYFTHPQDVPAIMDKIREHPAVIDIYEYDIPFAIRYLIDKGLVPMEGDEELKLLAFDIETLYHEGEEFAEGPILMISYADEEGARVITWKNVDLPYVDVVSTEREMIKRFLRVVKEKDPDVLITYNGDNFDFAYLKKRCEKLGINFALGRDGSEPKIQRMGDRFAVEVKGRIHFDLYPVIRRTINLPTYTLEAVYEAVFGQPKEKVYAEEITTAWETGENLERVARYSMEDAKVTYELGKEFLPMEAQLSRLIGQSLWDVSRSSTGNLVEWFLLRKAYERNELAPNKPDEKELARRHQSHEGGYIKEPERGLWENIVYLDFRSLYPSIIITHNVSPDTLNREGCKEYDVAPQVGHRFCKDFPGFIPSLLGDLLEERQKIKKRMKATIDPIERKLLDYRQRAIKILANSLYGYYGYARARWYCKECAESVIAWGREYLTMTIKEIEEKYGFKVIYSDTDGFFATIPGADAETVKKKAMEFLKYINAKLPGALELEYEGFYKRGLFVTKKKYAVIDEEGKITTRGLEIVRRDWSEIAKETQARVLEALLKDGDVEKAVRIVKEVTEKLSKYEVPPEKLVIHKQITRDLKDYKATGPHVAVAKRLAARGVKIRPGTVISYIVLKGSGRIVDRAIPFDEFDPTKHKYDAEYYIEKQVLPAVERILRAFGYRKEDLRYQKTRQVGLSARLKPKGTQFDPWIGIARSGLSTKLDFWLQRIDQAPLKPLQKTDILKTYTIPRLIYIADHSEVKSALLETLDQKIRTAVKEWLHLPPCTCDAILYSSTRDGGLGITKLAGLIPSVQARRLHRIAQSSDDTMKCFMEKEKMEQLHKKLWIQAGGDRENIPSIWEAPPSSEPPNNVSTNSEWEAPTQKDKFPKPCNWRKNEFKKWTKLASQGRGIVNFERDKISNHWIQYYRRIPHRKLLTALQLRANVYPTREFLARGRQDQYIKACRHCDADNESCAHIIGNCPVTQDARIKRHNYICELLLEEAKKKDWVVFKEPHIRDSNKELYKPDLIFVKDARALVVDVTVRYEAAKSSLEEAAAEKVRKYKHLETEVRHLTNAKDVTFVGFPLGARGKWHQDNFKLLTELGLSKSRQVKMAETFSTVALFSSVDIVHMFASRARKSMVM

SEQ ID NO: 1780 - protein, 2064 aa, synthetic construct
MAPKKKRKVNISGSSCGSPNSADTSSDFKDLWTKLKECHDREVQGLQVKVTKLKQERILDAQRLEEFFTKNQQLREQQKVLHETIKVLEDRLRAGLCDRCAVTEEHMRKKQQEFENIRQQNLKLITELMNERNTLQEENKKLSEQLQQKIENDQQHQAAELECEEDVIPDSPITAFSFSGVNRLRRKENPHVRYIEQTHTKLEHSVCANEMRKVSKSSTHPQHNPNENEILVADTYDQSQSPMAKAHGTSSYTPDKSSFNLATVVAETLGLGVQEESETQGPMSPLGDELYHCLEGNHKKQPFESGSETPGTSESATPEGSYEQLAPQPCVGETLHSSLPRDSELFVPEEGSSEKESEDAPKTSPPTPGKHGLEQTGEEKVMVTVPDKNPPCPCCGTRVNSVLNLIEHLKVSHGKRGVCFRCAKCGKENSNYHSVVCHFKKCRGPETEKAPAGEWICEVCNRDFTTKIGLGQHKRLAHPAVRNQERIVASQPKETSNRGAHKRCWTKEEEELLIRLEAQFEGNKNINKLIAEHITTKTAKQISDKRRLLSRKPAEEPREEPGTCHHTRRAAASLRTEPEMSHHAQAEDRDNGPGRRPLPGRAAAGGRTMDEIRRHPDKGNGQQRPTKQKSEEQLQAYYKKTLEERLSAGALNTFPRAFKQVMEGRDIKLVINQTAQDCFGCLESISQIRTATRDKKDTVTREKHPKKPFQKWMKKRAIKKGNYLRFQRLFYLDRGKLAKIILDDIECLSCDIPLSEIYSVFKTRWETTGSFKSLGDFKTYGKADNTAFRELITAKEIEKNVQEMSKGSAPGPDGITLGDVVKMDPEFSRTMEIFNLWLTTGKIPDMVRGCRTVLIILDTDYITEDGKPVIRIFKKENGEFKIEYDRTFEPYLYALLKDDSAIEEVKKITAERHGTVVTVKRVEKVQKKFLGRPVEVWKLYFTHPQDVPAIMDKIREHPAVIDIYEYDIPFAIRYLIDKGLVPMEGDEELKLLAFDIETLYHEGEEFAEGPILMISYADEEGARVITWKNVDLPYVDVVSTEREMIKRFLRVVKEKDPDVLITYNGDNFDFAYLKKRCEKLGINFALGRDGSEPKIQRMGDRFAVEVKGRIHFDLYPVIRRTINLPTYTLEAVYEAVFGQPKEKVYAEEITTAWETGENLERVARYSMEDAKVTYELGKEFLPMEAQLSRLIGQSLWDVSRSSTGNLVEWFLLRKAYERNELAPNKPDEKELARRHQSHEGGYIKEPERGLWENIVYLDFRSLYPSIIITHNVSPDTLNREGCKEYDVAPQVGHRFCKDFPGFIPSLLGDLLEERQKIKKRMKATIDPIERKLLDYRQRAIKILANSLYGYYGYARARWYCKECAESVIAWGREYLTMTIKEIEEKYGFKVIYSDTDGFFATIPGADAETVKKKAMEFLKYINAKLPGALELEYEGFYKRGLFVTKKKYAVIDEEGKITTRGLEIVRRDWSEIAKETQARVLEALLKDGDVEKAVRIVKEVTEKLSKYEVPPEKLVIHKQITRDLKDYKATGPHVAVAKRLAARGVKIRPGTVISYIVLKGSGRIVDRAIPFDEFDPTKHKYDAEYYIEKQVLPAVERILRAFGYRKEDLRYQKTRQVGLSARLKPKGTQFDPWIGIARSGLSTKLDFWLQRIDQAPLKPLQKTDILKTYTIPRLIYIADHSEVKSALLETLDQKIRTAVKEWLHLPPCTCDAILYSSTRDGGLGITKLAGLIPSVQARRLHRIAQSSDDTMKCFMEKEKMEQLHKKLWIQAGGDRENIPSIWEAPPSSEPPNNVSTNSEWEAPTQKDKFPKPCNWRKNEFKKWTKLASQGRGIVNFERDKISNHWIQYYRRIPHRKLLTALQLRANVYPTREFLARGRQDQYIKACRHCDADNESCAHIIGNCPVTQDARIKRHNYICELLLEEAKKKDWVVFKEPHIRDSNKELYKPDLIFVKDARALVVDVTVRYEAAKSSLEEAAAEKVRKYKHLETEVRHLTNAKDVTFVGFPLGARGKWHQDNFKLLTELGLSKSRQVKMAETFSTVALFSSVDIVHMFASRARKSMVM

SEQ ID NO: 1781 - protein, 1390 aa, synthetic construct
MASCPKPGPPVSAGAMSLESGLTTHSVLAIERGPNSLANSGSDFGGGGLGLPLRLLRVSVGTQTSRSDWVDLVSWSHPGPTSKSQQVDLVSLFPKHRVDLLSKNDQVDLVAQFLPSKFPPNLAENDLALLVNLEFYRSDLHVYECVHKAAHWEGLSGLPEVYEQLAPQPCVGETLHSSLPRDSELFVPEEGSSEKESEDAPKTSPPTPGKHGLEQTGEEKVMVTVPDKNPPCPCCGTRVNSVLNLIEHLKVSHGKRGVCFRCAKCGKENSNYHSVVCHFKKCRGPETEKAPAGEWICEVCNRDFTTKIGLGQHKRLAHPAVRNQERIVASQPKETSNRGAHKRCWTKEEEELLIRLEAQFEGNKNINKLIAEHITTKTAKQISDKRRLLSRKPAEEPREEPGTCHHTRRAAASLRTEPEMSHHAQAEDRDNGPGRRPLPGRAAAGGRTMDEIRRHPDKGNGQQRPTKQKSEEQLQAYYKKTLEERLSAGALNTFPRAFKQVMEGRDIKLVINQTAQDYFGCLESISQIRTATRDKKDTVTREKHPKKPFQKWMKKRAIKKGNYLRFQRLFYLDRGKLAKIILDDIECLSCDIPLSEIYSVFKTRWETTGSFKSLGDFKTYGKADNTAFRELITAKEIEKNVQEMSKGSAPGPDGITLGDVVKMDPEFSRTMEIFNLWLTTGKIPDMVRGCRTVLIPKSSDPDRLKDINNWRPITIGSILLRLFSRIVTARLSKACPLNPRQRGFIRAAGCSENLKLLQTIIWSAKREHRPLGVVFVDIAKAFDTVSHQHIIHALQQREVDPHIVGLVSNMYENISTYITTKRNTHTDKIQIRVGVKQGDPMSPLLFNLAMDPLLCKLEESGKGYHRGQSSITAMAFADDLVLLSDSWENMNTNISILETFCNLTGLKTQGQKCHGFYIKPTKDSYTINDCAAWTINGTPLNMIDPGESEKYLGLQFDPWIGIARSGLSTKLDFWLQRIDQAPLKPLQKLDILKTYTIPRLIYIADHSEVKSALLETLDQKIRTAVKEWLHLPPCTCDAILYSSTRDGGLGITKLAGLIPSVQARRLHRIAQSSDDTMKCFMEKEKMEQLHKKLWIQAGGDRENIPSIWEAPPSSEPPNNVSTNSEWEAPTQKDKFPKPCNWRKNEFKKWTKLASQGRGIVNFERDKISNHWIQYYRRIPHRKLLTALQLRANVYPTREFLARGRQDQYIKACRHCDADNESCAHIIGNCPVTQDARIKRHNYICELLLEEAKKKDWVVFKEPHIRDSNKELYKPDLIFVKDGRALVVDVTVRYEAAKSSLEEAAAEKVRKYKHLETEVRHLTNAKDVTFVGFPLGARGKWHQDNFKLLTELGLSKSRQVKMAETFSTVALFSSVDIVHMFASRARKSMVM

SEQ ID NO: 1782 - protein, 1625 aa, synthetic construct
MAPKKKRKVNISGSSCGSPNSADTSSDFKDLWTKLKECHDREVQGLQVKVTKLKQERILDAQRLEEFFTKNQQLREQQKVLHETIKVLEDRLRAGLCDRCAVTEEHMRKKQQEFENIRQQNLKLITELMNERNTLQEENKKLSEQLQQKIENDQQHQAAELECEEDVIPDSPITAFSFSGVNRLRRKENPHVRYIEQTHTKLEHSVCANEMRKVSKSSTHPQHNPNENEILVADTYDQSQSPMAKAHGTSSYTPDKSSFNLATVVAETLGLGVQEESETQGPMSPLGDELYHCLEGNHKKQPFESGSETPGTSESATPEGSVTVKFKYKGEEKEVDISKIKKVWRVGKMISFTYDDNGKTGRGAVSEKDAPKELLQMLEKSGSETPGTSESATPESYEQLAPQPCVGETLHSSLPRDSELFVPEEGSSEKESEDAPKTSPPTPGKHGLRQTGEEKVMVTVPDKNPPCPCCGTRVNSVLNLIEHLKVSHGKRGVCFRCAKCGKENSNYHSVVCHFKKCRGPETEKAPAGEWICEVCNRDFTTKIGLGQHKRLAHPAVRNQERIVASQPKETSNRGAHKRCWTKEEEELLIRLEAQFEGNKNINKLIAEHITTKTAKQISDKRRLLSRKPAEEPREEPGTCHHTRRAAASLRTEPEMSHHAQAEDRDNGPGRRPLPGRAAAGGRTMDEIRRHPDKGNGQQRPTKQKSEEQLQAYYKKTLEERLSAGALNTFPRAFKQVMEGRDIKLVINQTAQDCFGCLESISQIRTATRDKKDTVTREKHPKKPFQKWMKKRAIKKGNYLRFQRLFYLDRGKLAKIILDDIECLSCDIPLSEIYSVFKTRWETTGSFKSLGDFKTYGKADNTAFRELITAKEIEKNVQEMSKGSAPGPDGITLGDVVKMDPEFSRTMEIFNLWLTTGKIPDMVRGCRTVLIPKSSKPDRLKDINNWRPITIGSILLRLFSRIVTARLSKACPLNPRQRGFIRAAGCSENLKLLQTIIWSAKREHRPLGVVFVDIAKAFDTVSHQHIIHALQQREVDPHIVGLVSNMYENISTYITTKRNTHTDKIQIRVGVKQGDPMSPLLFNLAMDPLLCKLEESGKGYHRGQSSITAMAFADDLVLLSDSWENMNTNISILETFCNLTGLKTQGQKCHGFYIKPTKDSYTINDCAAWTINGTPLNMIDPGESEKYLGLQFDPWIGIARSGLSTKLDFWLQRIDQAPLKPLQKTDILKTYTIPRLIYIADHSEVKSALLETLDQKIRTAVKEWLHLPPCTCDAILYSSTRDGGLGITKLAGLIPSVQARRLHRIAQSSDDTMKCFMEKEKMEQLHKKLWIQAGGDRENIPSIWEAPPSSEPPNNVSTNSEWEAPTQKDKFPKPCNWRKNEFKKWTKLASQGRGIVNFERDKISNHWIQYYRRIPHRKLLTALQLRANVYPTREFLARGRQDQYIKACRHCDADNESCAHIIGNCPVTQDARIKRHNYICELLLEEAKKKDWVVFKEPHIRDSNKELYKPDLIFVKDGRALVVDVTVRYEAAKSSLEEAAAEKVRKYKHLETEVRHLTNAKDVTFVGFPLGARGKWHQDNFKLLTELGLSKSRQVKMAETFSTVALFSSVDIVHMFASRARKSMVM

SEQ ID NO: 1783 - protein, 1405 aa, synthetic construct
MAPKKKRKVVTVKFKYKGEEKEVDISKIKKVWRVGKMISFTYDDNGKTGRGAVSEKDAPKELLQMLEKSGSETPGTSESATPESPKRKVSSAEGAAKEEPKRRSARLSAKPPAKVEAKPKKAAAKDKSSDKKVQTKGKRGAKGKQAEVANQETKEDLPAENGETKTEESPASDEAGEKEAKSDSGSETPGTSESATPESLFVPEEGSSEKESEDAPKTSPPTPGKHGLRQTGEEKVMVTVPDKNPPCPCCGTRVNSVLNLIEHLKVSHGKRGVCFRCAKCGKENSNYHSVVCHFKKCRGPETEKAPAGEWICEVCNRDFTTKIGLGQHKRLAHPAVRNQERIVASQPKETSNRGAHKRCWTKEEEELLIRLEAQFEGNKNINKLIAEHITTKTAKQISDKRRLLSRKPAEEPREEPGTCHHTRRAAASLRTEPEMSHHAQAEDRDNGPGRRPLPGRAAAGGRTMDEIRRHPDKGNGQQRPTKQKSEEQLQAYYKKTLEERLSAGALNTFPRAFKQVMEGRDIKLVINQTAQDCFGCLESISQIRTATRDKKDTVTREKHPKKPFQKWMKKRAIKKGNYLRFQRLFYLDRGKLAKIILDDIECLSCDIPLSEIYSVFKTRWETTGSFKSLGDFKTYGKADNTAFRELITAKEIEKNVQEMSKGSAPGPDGITLGDVVKMDPEFSRTMEIFNLWLTTGKIPDMVRGCRTVLIPKSSKPDRLKDINNWRPITIGSILLRLFSRIVTARLSKACPLNPRQRGFIRAAGCSENLKLLQTIIWSAKREHRPLGVVFVDIAKAFDTVSHQHIIHALQQREVDPHIVGLVSNMYENISTYITTKRNTHTDKIQIRVGVKQGDPMSPLLFNLAMDPLLCKLEESGKGYHRGQSSITAMAFADDLVLLSDSWENMNTNISILETFCNLTGLKTQGQKCHGFYIKPTKDSYTINDCAAWTINGTPLNMIDPGESEKYLGLQFDPWIGIARSGLSTKLDFWLQRIDQAPLKPLQKTDILKTYTIPRLIYIADHSEVKSALLETLDQKIRTAVKEWLHLPPCTCDAILYSSTRDGGLGITKLAGLIPSVQARRLHRIAQSSDDTMKCFMEKEKMEQLHKKLWIQAGGDRENIPSIWEAPPSSEPPNNVSTNSEWEAPTQKDKFPKPCNWRKNEFKKWTKLASQGRGIVNFERDKISNHWIQYYRRIPHRKLLTALQLRANVYPTREFLARGRQDQYIKACRHCDADNESCAHIIGNCPVTQDARIKRHNYICELLLEEAKKKDWVVFKEPHIRDSNKELYKPDLIFVKDGRALVVDVTVRYEAAKSSLEEAAAEKVRKYKHLETEVRHLTNAKDVTFVGFPLGARGKWHQDNFKLLTELGLSKSRQVKMAETFSTVALFSSVDIVHMFASRARKSMVM

SEQ ID NO: 1784 - protein, 1625 aa, synthetic construct
MAPKKKRKVVTVKFKYKGEEKEVDISKIKKVWRVGKMISFTYDDNGKTGRGAVSEKDAPKELLQMLEKSGSETPGTSESATPESNISGSSCGSPNSADTSSDFKDLWTKLKECHDREVQGLQVKVTKLKQERILDAQRLEEFFTKNQQLREQQKVLHETIKVLEDRLRAGLCDRCAVTEEHMRKKQQEFENIRQQNLKLITELMNERNTLQEENKKLSEQLQQKIENDQQHQAAELECEEDVIPDSPITAFSFSGVNRLRRKENPHVRYIEQTHTKLEHSVCANEMRKVSKSSTHPQHNPNENEILVADTYDQSQSPMAKAHGTSSYTPDKSSFNLATVVAETLGLGVQEESETQGPMSPLGDELYHCLEGNHKKQPFESGSETPGTSESATPEGSYEQLAPQPCVGETLHSSLPRDSELFVPEEGSSEKESEDAPKTSPPTPGKHGLEQTGEEKVMVTVPDKNPPCPCCGTRVNSVLNLIEHLKVSHGKRRVCFRCAKCGKENSNYHSVVCHFKKCRGPETEKAPAGEWICEVCNRDFTTKIGLGQHKRLAHPAVRNQERIVASQPKETSNRGAHKRCWTKEEEELLIRLEAQFEGNKNINKLIAEHITTKTAKQISDKRRLLSRKPAEEPREEPGTCHHTRRAAASLRTEPEMSHHAQAEDRDNGPGRRPLPGRAAAGGRTMDEIRRHPDKGNGQQRPTKQKSEEQLQAYYKKTLEERLSAGALNTFPRAFKQVMEGRDIKLVINQTAQDCFGCLESISQIRTATRDKKDTVTREKHPKKPFQKWMKKRAIKKGNYLRFQRLFYLDRGKLAKIILDDIECLSCDIPLSEIYSVFKTRWETTGSFKSLGDFKTYGKADNTAFRELITAKEIEKNVQEMSKGSAPGPDGITLGDVVKMDPEFSRTMEIFNLWLTTGKIPDMVRGCRTVLIPKSSKPDRLKDINNWRPITIGSILLRLFSRIVTARLSKACPLNPRQRGFIRAAGCSENLKLLQTIIWSAKREHRPLGVVFVDIAKAFDTVSHQHIIHALQQREVDPHIVGLVSNMYENISTYITTKRNTHTDKIQIRVGVKQGDPMSPLLFNLAMDPLLCKLEESGKGYHRGQSSITAMAFADDLVLLSDSWENMNTNISILETFCNLTGLKTQGQKCHGFYIKPTKDSYTINDCAAWTINGTPLNMIDPGESEKYLGLQFDPWIGIARSGLSTKLDFWLQRIDQAPLKPLQKTDILKTYTIPRLIYIADHSEVKSALLETLDQKIRTAVKEWLHLPPCTCDAILYSSTRDGGLGITKLAGLIPSVQARRLHRIAQSSDDTMKCFMEKEKMEQLHKKLWIQAGGDRENIPSIWEAPPSSEPPNNVSTNSEWEAPTQKDKFPKPCNWRKNEFKKWTKLASQGRGIVNFERDKISNHWIQYYRRIPHRKLLTALQLRANVYPTREFLARGRQDQYIKACRHCDADNESCAHIIGNCPVTQDARIKRHNYICELLLEEAKKKDWVVFKEPHIRDSNKELYKPDLIFVKDGRALVVDVTVRYEAAKSSLEEAAAEKVRKYKHLETEVRHLTNAKDVTFVGFPLGARGKWHQDNFKLLTELGLSKSRQVKMAETFSTVALFSSVDIVHMFASRARKSMVM

SEQ ID NO: 1785 - protein, 1625 aa, synthetic construct
MAPKKKRKVVTVKFKYKGEEKEVDISKIKKVWRVGKMISFTYDDNGKTGRGAVSEKDAPKELLQMLEKSGSETPGTSESATPESNISGSSCGSPNSADTSSDFKDLWTKLKECHDREVQGLQVKVTKLKQERILDAQRLEEFFTKNQQLREQQKVLHETIKVLEDRLRAGLCDRCAVTEEHMRKKQQEFENIRQQNLKLITELMNERNTLQEENKKLSEQLQQKIENDQQHQAAELECEEDVIPDSPITAFSFSGVNRLRRKENPHVRYIEQTHTKLEHSVCANEMRKVSKSSTHPQHNPNENEILVADTYDQSQSPMAKAHGTSSYTPDKSSFNLATVVAETLGLGVQEESETQGPMSPLGDELYHCLEGNHKKQPFESGSETPGTSESATPEGSYEQLAPQPCVGETLHSSLPRDSELFVPEEGSSEKESEDAPKTSPPTPGKHGLEQTGEEKVMVTVPDKNPPCPCCGTRVNSVLNLIEHLKVSHGKRGVCFRCAKCGKENSNYHSVVCHFKKCRGPETEKAPAGEWICEVCNRDFTTKIGLGQHKRLAHPAVRNQERIVASQPKETSNRGAHKRCWTKEEEELLIRLEAQFEGNKNINKLIAEHITTKTAKQISDKRRLLSRKPAEEPRMEPGTCHHTRRAAASLRTEPEMSHHAQAEDRDNGPGRRPLPGRAAAGGRTMDEIRRHPDKGNGQQRPTKQKSEEQLQAYYKKTLEERLSAGALNTFPRAFKQVMEGRDIKLVINQTAQDCFGCLESISQIRTATRDKKDTVTREKHPKKPFQKWMKKRAIKKGNYLRFQRLFYLDRGKLAKIILDDIECLSCDIPLSEIYSVFKTRWETTGSFKSLGDFKTYGKADNTAFRELITAKEIEKNVQEMSKGSAPGPDGITLGDVVKMDPEFSRTMEIFNLWLTTGKIPDMVRGCRTVLIPKSSKPDRLKDINNWRPITIGSILLRLFSRIVTARLSKACPLNPRQRGFIRAAGCSENLKLLQTIIWSAKREHRPLGVVFVDIAKAFDTVSHQHIIHALQQREVDPHIVGLVSNMYENISTYITTKRNTHTDKIQIRVGVKQGDPMSPLLFNLAMDPLLCKLEESGKGYHRGQSSITAMAFADDLVLLSDSWENMNTNISILETFCNLTGLKTQGQKCHGFYIKPTKDSYTINDCAAWTINGTPLNMIDPGESEKYLGLQFDPWIGIARSGLSTKLDFWLQRIDQAPLKPLQKTDILKTYTIPRLIYIADHSEVKSALLETLDQKIRTAVKEWLHLPPCTCDAILYSSTRDGGLGITKLAGLIPSVQARRLHRIAQSSDDTMKCFMEKEKMEQLHKKLWIQAGGDRENIPSIWEAPPSSEPPNNVSTNSEWEAPTQKDKFPKPCNWRKNEFKKWTKLASQGRGIVNFERDKISNHWIQYYRRIPHRKLLTALQLRANVYPTREFLARGRQDQYIKACRHCDADNESCAHIIGNCPVTQDARIKRHNYICELLLEEAKKKDWVVFKEPHIRDSNKELYKPDLIFVKDGRALVVDVTVRYEAAKSSLEEAAAEKVRKYKHLETEVRHLTNAKDVTFVGFPLGARGKWHQDNFKLLTELGLSKSRQVKMAETFSTVALFSSVDIVHMFASRARKSMVM

SEQ ID NO: 1786 - protein, 1657 aa, synthetic construct
MPKRKVSSAEGAAKEEPKRRSARLSAKPPAKVEAKPKKAAAKDKSSDKKVQTKGKRGAKGKQAEVANQETKEDLPAENGETKTEESPASDEAGEKEAKSDSGSETPGTSESATPESNISGSSCGSPNSADTSSDFKDLWTKLKECHDREVQGLQVKVTKLKQERILDAQRLEEFFTKNQQLREQQKVLHETIKVLEDRLRAGLCDRCAVTEEHMRKKQQEFENIRQQNLKLITELMNERNTLQEENKKLSEQLQQKIENDQQHQAAELECEEDVIPDSPITAFSFSGVNRLRRKENPHVRYIEQTHTKLEHSVCANEMRKVSKSSTHPQHNPNENEILVADTYDQSQSPMAKAHGTSSYTPDKSSFNLATVVAETLGLGVQEESETQGPMSPLGDELYHCLEGNHKKQPFESGSETPGTSESATPEGSYEQLAPQPCVGETLHSSLPRDSELFVPEEGSSEKESEDAPKTSPPTPGKHGLEQTGEEKVMVTVPDKNPPCPCCGTRVNSVLNLIEHLKVSHGKRGVCFRCAKCGKENSNYHSVVCHFKKCRGPETEKAPAGEWICEVCNRDFTTKIGLGQHKRLAHPAVRNQERIVASQPKETSNRGAHKRCWTKEEEELLIRLEAQFEGNKNINKLIAEHITTKTAKQISDKRRLLSRKPAEEPREEPGTCHHTRRAAASLRTEPEMSHHAQAEDRDNGPGRRPLPGRAAAGGRTMDEIRRHPDKGNGQQRPTKQKSEEQLQAYYKKTLEERLSAGALNTFPRAFKQVMEGRDIKLVINQTAQDCFGCLESISQIRTATRDKKDTVTREKHPKKPFQKWMKKRAIKKGNYLRFQRLFYLDRGKLAKIILDDIECLSCDIPLSEIYSVFKTRWETTGSFKSLGDFKTYGKADNTAFRELITAKEIEKNVQEMSKGSAPGPDGITLGDVVKMDPEFSRTMEIFNLWLTTGKIPDMVRGCRTVLIPKSSDPDRLKDINNWRPITIGSILLRLFSRIVTARLSKACPLNPRQRGFIRAAGCSENLKLLQTIIWSAKREHRPLGVVFVDIAKAFDTVSHQHIIHALQQREVDPHIVGLVSNMYENISTYITTKRNTHTDKIQIRVGVKQGDPMSPLLFNLAMDPLLCKLEESGKGYHRGQSSITAMAFADDLVLLSDSWENMNTNISILETFCNLTGLKTQGQKCHGFYIKPTKDSYTINDCAAWTINGTPLNMIDPGESEKYLGLQFDPWIGIARSGLSTKLDFWLQRIDQAPLKPLQKTDILKTYTIPRLIYIADHSEVKSALLETLDQKIRTAVKEWLHLPPCTCDAILYSSTRDGGLGITKLAGLIPSVQARRLHRIAQSSDDTMKCFMEKEKMEQLHKKLWIQAGGDRENIPSIWEAPPSSEPPNNVSTNSEWEAPTQKDKFPKPCNWRKNEFKKWTKLASQGRGIVNFERDKISNHWIQYYRRIPHRKLLTALQLRANVYPTREFLARGRQDQYIKACRHCDADNESCAHIIGNCPVTQDARIKRHNYICELLLEEAKKKDWVVFKEPHIRDSNKELYKPDLIFVKDGRALVVDVTVRYEAAKSSLEEAAAEKVRKYKHLETEVRHLTNAKDVTFVGFPLGARGKWHQDNFKLLTELGLSKSRQVKMAETFSTVALFSSVDIVHMFASRARKSMVM

SEQ ID NO: 1787 - protein, 1665 aa, synthetic construct
MAPKKKRKVNISGSSCGSPNSADTSSDFKDLWTKLKECHDREVQGLQVKVTKLKQERILDAQRLEEFFTKNQQLREQQKVLHETIKVLEDRLRAGLCDRCAVTEEHMRKKQQEFENIRQQNLKLITELMNERNTLQEENKKLSEQLQQKIENDQQHQAAELECEEDVIPDSPITAFSFSGVNRLRRKENPHVRYIEQTHTKLEHSVCANEMRKVSKSSTHPQHNPNENEILVADTYDQSQSPMAKAHGTSSYTPDKSSFNLATVVAETLGLGVQEESETQGPMSPLGDELYHCLEGNHKKQPFESGSETPGTSESATPEGSPKRKVSSAEGAAKEEPKRRSARLSAKPPAKVEAKPKKAAAKDKSSDKKVQTKGKRGAKGKQAEVANQETKEDLPAENGETKTEESPASDEAGEKEAKSDSGSETPGTSESATPESYEQLAPQPCVGETLHSSLPRDSELFVPEEGSSEKESEDAPKTSPPTPGKHGLEQTGEEKVMVTVPDKNPPCPCCGTRVNSVLNLIEHLKVSHGKRRVCFRCAKCGKENSNYHSVVCHFKKCRGPETEKAPAGEWICEVCNRDFTTKIGLGQHKRLAHPAVRNQERIVASQPKETSNRGAHKRCWTKEEEELLIRLEAQFEGNKNINKLIAEHITTKTAKQISDKRRLLSRKPAEEPREEPGTCHHTRRAAASLRTEPEMSHHAQAEDRDNGPGRRPLPGRAAAGGRTMDEIRRHPDKGNGQQRPTKQKSEEQLQAYYKKTLEERLSAGALNTFPRAFKQVMEGRDIKLVINQTAQDCFGCLESISQIRTATRDKKDTVTREKHPKKPFQKWMKKRAIKKGNYLRFQRLFYLDRGKLAKIILDDIECLSCDIPLSEIYSVFKTRWETTGSFKSLGDFKTYGKADNTAFRELITAKEIEKNVQEMSKGSAPGPDGITLGDVVKMDPEFSRTMEIFNLWLTTGKIPDMVRGCRTVLIPKSSKPDRLKDINNWRPITIGSILLRLFSRIVTARLSKACPLNPRQRGFIRAAGCSENLKLLQTIIWSAKREHRPLGVVFVDIAKAFDTVSHQHIIHALQQREVDPHIVGLVSNMYENISTYITTKRNTHTDKIQIRVGVKQGDPMSPLLFNLAMDPLLCKLEESGKGYHRGQSSITAMAFADDLVLLSDSWENMNTNISILETFCNLTGLKTQGQKCHGFYIKPTKDSYTINDCAAWTINGTPLNMIDPGESEKYLGLQFDPWIGIARSGLSTKLDFWLQRIDQAPLKPLQKTDILKTYTIPRLIYIADHSEVKSALLETLDQKIRTAVKEWLHLPPCTCDAILYSSTRDGGLGITKLAGLIPSVQARRLHRIAQSSDDTMKCFMEKEKMEQLHKKLWIQAGGDRENIPSIWEAPPSSEPPNNVSTNSEWEAPTQKDKFPKPCNWRKNEFKKWTKLASQGRGIVNFERDKISNHWIQYYRRIPHRKLLTALQLRANVYPTREFLARGRQDQYIKACRHCDADNESCAHIIGNCPVTQDARIKRHNYICELLLEEAKKKDWVVFKEPHIRDSNKELYKPDLIFVKDGRALVVDVTVRYEAAKSSLEEAAAEKVRKYKHLETEVRHLTNAKDVTFVGFPLGARGKWHQDNFKLLTELGLSKSRQVKMAETFSTVALFSSVDIVHMFASRARKSMVM

SEQ ID NO: 1788 - protein, 1657 aa, synthetic construct
MPKRKVSSAEGAAKEEPKRRSARLSAKPPAKVEAKPKKAAAKDKSSDKKVQTKGKRGAKGKQAEVANQETKEDLPAENGETKTEESPASDEAGEKEAKSDSGSETPGTSESATPESNISGSSCGSPNSADTSSDFKDLWTKLKECHDREVQGLQVKVTKLKQERILDAQRLEEFFTKNQQLREQQKVLHETIKVLEDRLRAGLCDRCAVTEEHMRKKQQEFENIRQQNLKLITELMNERNTLQEENKKLSEQLQQKIENDQQHQAAELECEEDVIPDSPITAFSFSGVNRLRRKENPHVRYIEQTHTKLEHSVCANEMRKVSKSSTHPQHNPNENEILVADTYDQSQSPMAKAHGTSSYTPDKSSFNLATVVAETLGLGVQEESETQGPMSPLGDELYHCLEGNHKKQPFESGSETPGTSESATPEGSYEQLAPQPCVGETLHSSLPRDSELFVPEEGSSEKESEDAPKTSPPTPGKHGLEQTGEEKVMVTVPDKNPPCPCCGTRVNSVLNLIEHLKVSHGKRGVCFRCAKCGKENSNYHSVVCHFKKCRGPETEKAPAGEWICEVCNRDFTTKIGLGQHKRLAHPAVRNQERIVASQPKETSNRGAHKRCWTKEEEELLIRLEAQFEGNKNINKLIAEHITTKTAKQISDKRRLLSRKPAEEPREEPGTCHHTRRAAASLRTEPEMSHHAQAEDRDNGPGRRPLPGRAAAGGRTMDEIRRHPDKGNGQQRPTKQKSEEQLQAYYKKTLEERLSAGALNTFPRAFKQVMEGRDIKLVINQTAQDYFGCLESISQIRTATRDKKDTVTREKHPKKPFQKWMKKRAIKKGNYLRFQRLFYLDRGKLAKIILDDIECLSCDIPLSEIYSVFKTRWETTGSFKSLGDFKTYGKADNTAFRELITAKEIEKNVQEMSKGSAPGPDGITLGDVVKMDPEFSRTMEIFNLWLTTGKIPDMVRGCRTVLIPKSSKPDRLKDINNWRPITIGSILLRLFSRIVTARLSKACPLNPRQRGFIRAAGCSENLKLLQTIIWSAKREHRPLGVVFVDIAKAFDTVSHQHIIHALQQREVDPHIVGLVSNMYENISTYITTKRNTHTDKIQIRVGVKQGDPMSPLLFNLAMDPLLCKLEESGKGYHRGQSSITAMAFADDLVLLSDSWENMNTNISILETFCNLTGLKTQGQKCHGFYIKPTKKSYTINDCAAWTINGTPLNMIDPGESEKYLGLQFDPWIGIARSGLSTKLDFWLQRIDQAPLKPLQKTDILKTYTIPRLIYIADHSEVKSALLETLDQKIRTAVKEWLHLPPCTCDAILYSSTRDGGLGITKLAGLIPSVQARRLHRIAQSSDDTMKCFMEKEKMEQLHKKLWIQAGGDRENIPSIWEAPPSSEPPNNVSTNSEWEAPTQKDKFPKPCNWRKNEFKKWTKLASQGRGIVNFERDKISNHWIQYYRRIPHRKLLTALQLRANVYPTREFLARGRQDQYIKACRHCDADNESCAHIIGNCPVTQDARIKRHNYICELLLEEAKKKDWVVFKEPHIRDSNKELYKPDLIFVKDGRALVVDVTVRYEAAKSSLEEAAAEKVRKYKHLETEVRHLTNAKDVTFVGFPLGARGKWHQDNFKLLTELGLSKSRQVKMAETFSTVALFSSVDIVHMFASRARKSMVM

SEQ ID NO: 1789 - protein, 1397 aa, synthetic construct
MPKRKVSSAEGAAKEEPKRRSARLSAKPPAKVEAKPKKAAAKDKSSDKKVQTKGKRGAKGKQAEVANQETKEDLPAENGETKTEESPASDEAGEKEAKSDSGSETPGTSESATPESVTVKFKYKGEEKEVDISKIKKVWRVGKMISFTYDDNGKTGRGAVSEKDAPKELLQMLEKSGSETPGTSESATPESLFVPEEGSSEKESEDAPKTSPPTPGKHGLEQTGEEKVMVTVPDKNPPCPCCGTRVNSVLNLIEHLKVSHGKRRVCFRCAKCGKENSNYHSVVCHFKKCRGPETEKAPAGEWICEVCNRDFTTKIGLGQHKRLAHPAVRNQERIVASQPKETSNRGAHKRCWTKEEEELLIRLEAQFEGNKNINKLIAEHITTKTAKQISDKRRLLSRKPAEEPREEPGTCHHTRRAAASLRTEPEMSHHAQAEDRDNGPGRRPLPGRAAAGGRTMDEIRRHPDKGNGQQRPTKQKSEEQLQAYYKKTLEERLSAGALNTFPRAFKQVMEGRDIKLVINQTAQDCFGCLESISQIRTATRDKKDTVTREKHPKKPFQKWMKKRAIKKGNYLRFQRLFYLDRGKLAKIILDDIECLSCDIPLSEIYSVFKTRWETTGSFKSLGDFKTYGKADNTAFRELITAKEIEKNVQEMSKGSAPGPDGITLGDVVKMDPEFSRTMEIFNLWLTTGKIPDMVRGCRTVLIPKSSKPDRLKDINNWRPITIGSILLRLFSRIVTARLSKACPLNPRQRGFIRAAGCSENLKLLQTIIWSAKREHRPLGVVFVDIAKAFDTVSHQHIIHALQQREVDPHIVGLVSNMYENISTYITTKRNTHTDKIQIRVGVKQGDPMSPLLFNLAMDPLLCKLEESGKGYHRGQSSITAMAFADDLVLLSDSWENMNTNISILETFCNLTGLKTQGQKCHGFYIKPTKDSYTINDCAAWTINGTPLNMIDPGESEKYLGLQFDPWIGIARSGLSTKLDFWLQRIDQAPLKPLQKTDILKTYTIPRLIYIADHSEVKSALLETLDQKIRTAVKEWLHLPPCTCDAILYSSTRDGGLGITKLAGLIPSVQARRLHRIAQSSDDTMKCFMEKEKMEQLHKKLWIQAGGDRENIPSIWEAPPSSEPPNNVSTNSEWEAPTQKDKFPKPCNWRKNEFKKWTKLASQGRGIVNFERDKISNHWIQYYRRIPHRKLLTALQLRANVYPTREFLARGRQDQYIKACRHCDADNESCAHIIGNCPVTQDARIKRHNYICELLLEEAKKKDWVVFKEPHIRDSNKELYKPDLIFVKDGRALVVDVTVRYEAAKSSLEEAAAEKVRKYKHLETEVRHLTNAKDVTFVGFPLGARGKWHQDNFKLLTELGLSKSRQVKMAETFSTVALFSSVDIVHMFASRARKSMVM

SEQ ID NO: 1790 - protein, 1405 aa, synthetic construct
MAPKKKRKVVTVKFKYKGEEKEVDISKIKKVWRVGKMISFTYDDNGKTGRGAVSEKDAPKELLQMLEKSGSETPGTSESATPESPKRKVSSAEGAAKEEPKRRSARLSAKPPAKVEAKPKKAAAKDKSSDKKVQTKGKRGAKGKQAEVANQETKEDLPAENGETKTEESPASDEAGEKEAKSDSGSETPGTSESATPESLFVPEEGSSEKESEDAPKTSPPTPGKHGLEQTGEEKVMVTVPDKNPPCPCCGTRVNSVLNLIEHLKVSHGKRRVCFRCAKCGKENSNYHSVVCHFKKCRGPETEKAPAGEWICEVCNRDFTTKIGLGQHKRLAHPAVRNQERIVASQPKETSNRGAHKRCWTKEEEELLIRLEAQFEGNKNINKLIAEHITTKTAKQISDKRRLLSRKPAEEPREEPGTCHHTRRAAASLRTEPEMSHHAQAEDRDNGPGRRPLPGRAAAGGRTMDEIRRHPDKGNGQQRPTKQKSEEQLQAYYKKTLEERLSAGALNTFPRAFKQVMEGRDIKLVINQTAQDCFGCLESISQIRTATRDKKDTVTREKHPKKPFQKWMKKRAIKKGNYLRFQRLFYLDRGKLAKIILDDIECLSCDIPLSEIYSVFKTRWETTGSFKSLGDFKTYGKADNTAFRELITAKEIEKNVQEMSKGSAPGPDGITLGDVVKMDPEFSRTMEIFNLWLTTGKIPDMVRGCRTVLIPKSSKPDRLKDINNWRPITIGSILLRLFSRIVTARLSKACPLNPRQRGFIRAAGCSENLKLLQTIIWSAKREHRPLGVVFVDIAKAFDTVSHQHIIHALQQREVDPHIVGLVSNMYENISTYITTKRNTHTDKIQIRVGVKQGDPMSPLLFNLAMDPLLCKLEESGKGYHRGQSSITAMAFADDLVLLSDSWENMNTNISILETFCNLTGLKTQGQKCHGFYIKPTKDSYTINDCAAWTINGTPLNMIDPGESEKYLGLQFDPWIGIARSGLSTKLDFWLQRIDQAPLKPLQKTDILKTYTIPRLIYIADHSEVKSALLETLDQKIRTAVKEWLHLPPCTCDAILYSSTRDGGLGITKLAGLIPSVQARRLHRIAQSSDDTMKCFMEKEKMEQLHKKLWIQAGGDRENIPSIWEAPPSSEPPNNVSTNSEWEAPTQKDKFPKPCNWRKNEFKKWTKLASQGRGIVNFERDKISNHWIQYYRRIPHRKLLTALQLRANVYPTREFLARGRQDQYIKACRHCDADNESCAHIIGNCPVTQDARIKRHNYICELLLEEAKKKDWVVFKEPHIRDSNKELYKPDLIFVKDGRALVVDVTVRYEAAKSSLEEAAAEKVRKYKHLETEVRHLTNAKDVTFVGFPLGARGKWHQDNFKLLTELGLSKSRQVKMAETFSTVALFSSVDIVHMFASRARKSMVM

SEQ ID NO: 1791 - protein, 1625 aa, synthetic construct
MAPKKKRKVNISGSSCGSPNSADTSSDFKDLWTKLKECHDREVQGLQVKVTKLKQERILDAQRLEEFFTKNQQLREQQKVLHETIKVLEDRLRAGLCDRCAVTEEHMRKKQQEFENIRQQNLKLITELMNERNTLQEENKKLSEQLQQKIENDQQHQAAELECEEDVIPDSPITAFSFSGVNRLRRKENPHVRYIEQTHTKLEHSVCANEMRKVSKSSTHPQHNPNENEILVADTYDQSQSPMAKAHGTSSYTPDKSSFNLATVVAETLGLGVQEESETQGPMSPLGDELYHCLEGNHKKQPFESGSETPGTSESATPEGSVTVKFKYKGEEKEVDISKIKKVWRVGKMISFTYDDNGKTGRGAVSEKDAPKELLQMLEKSGSETPGTSESATPESYEQLAPQPCVGETLHSSLPRDSELFVPEEGSSEKESEDAPKTSPPTPGKHGLEQTGEEKVMVTVPDKNPPCPCCGTRVNSVLNLIEHLKVSHGKRRVCFRCAKCGKENSNYHSVVCHFKKCRGPETEKAPAGEWICEVCNRDFTTKIGLGQHKRLAHPAVRNQERIVASQPKETSNRGAHKRCWTKEEEELLIRLEAQFEGNKNINKLIAEHITTKTAKQISDKRRLLSRKPAEEPREEPGTCHHTRRAAASLRTEPEMSHHAQAEDRDNGPGRRPLPGRAAAGGRTMDEIRRHPDKGNGQQRPTKQKSEEQLQAYYKKTLEERLSAGALNTFPRAFKQVMEGRDIKLVINQTAQDCFGCLESISQIRTATRDKKDTVTREKHPKKPFQKWMKKRAIKKGNYLRFQRLFYLDRGKLAKIILDDIECLSCDIPLSEIYSVFKTRWETTGSFKSLGDFKTYGKADNTAFRELITAKEIEKNVQEMSKGSAPGPDGITLGDVVKMDPEFSRTMEIFNLWLTTGKIPDMVRGCRTVLIPKSSKPDRLKDINNWRPITIGSILLRLFSRIVTARLSKACPLNPRQRGFIRAAGCSENLKLLQTIIWSAKREHRPLGVVFVDIAKAFDTVSHQHIIHALQQREVDPHIVGLVSNMYENISTYITTKRNTHTDKIQIRVGVKQGDPMSPLLFNLAMDPLLCKLEESGKGYHRGQSSITAMAFADDLVLLSDSWENMNTNISILETFCNLTGLKTQGQKCHGFYIKPTKDSYTINDCAAWTINGTPLNMIDPGESEKYLGLQFDPWIGIARSGLSTKLDFWLQRIDQAPLKPLQKTDILKTYTIPRLIYIADHSEVKSALLETLDQKIRTAVKEWLHLPPCTCDAILYSSTRDGGLGITKLAGLIPSVQARRLHRIAQSSDDTMKCFMEKEKMEQLHKKLWIQAGGDRENIPSIWEAPPSSEPPNNVSTNSEWEAPTQKDKFPKPCNWRKNEFKKWTKLASQGRGIVNFERDKISNHWIQYYRRIPHRKLLTALQLRANVYPTREFLARGRQDQYIKACRHCDADNESCAHIIGNCPVTQDARIKRHNYICELLLEEAKKKDWVVFKEPHIRDSNKELYKPDLIFVKDGRALVVDVTVRYEAAKSSLEEAAAEKVRKYKHLETEVRHLTNAKDVTFVGFPLGARGKWHQDNFKLLTELGLSKSRQVKMAETFSTVALFSSVDIVHMFASRARKSMVM

SEQ ID NO: 1792 - protein, 1625 aa, synthetic construct
MAPKKKRKVNISGSSCGSPNSADTSSDFKDLWTKLKECHDREVQGLQVKVTKLKQERILDAQRLEEFFTKNQQLREQQKVLHETIKVLEDRLRAGLCDRCAVTEEHMRKKQQEFENIRQQNLKLITELMNERNTLQEENKKLSEQLQQKIENDQQHQAAELECEEDVIPDSPITAFSFSGVNRLRRKENPHVRYIEQTHTKLEHSVCANEMRKVSKSSTHPQHNPNENEILVADTYDQSQSPMAKAHGTSSYTPDKSSFNLATVVAETLGLGVQEESETQGPMSPLGDELYHCLEGNHKKQPFESGSETPGTSESATPEGSVTVKFKYKGEEKEVDISKIKKVWRVGKMISFTYDDNGKTGRGAVSEKDAPKELLQMLEKSGSETPGTSESATPESYEQLAPQPCVGETLHSSLPRDSELFVPEEGSSEKESEDAPKTSPPTPGKHGLEQTGEEKVMVTVPDKNPPCPCCGTRVNSVLNLIEHLKVSHGKRGVCFRCAKCGKENSNYHSVVCHFKKCRGPETEKAPAGEWICEVCNRDFTTKIGLGQHKRLAHPAVRNQERIVASQPKETSNRGAHKRCWTKEEEELLIRLEAQFEGNKNINKLIAEHITTKTAKQISDKRRLLSRKPAEEPRMEPGTCHHTRRAAASLRTEPEMSHHAQAEDRDNGPGRRPLPGRAAAGGRTMDEIRRHPDKGNGQQRPTKQKSEEQLQAYYKKTLEERLSAGALNTFPRAFKQVMEGRDIKLVINQTAQDCFGCLESISQIRTATRDKKDTVTREKHPKKPFQKWMKKRAIKKGNYLRFQRLFYLDRGKLAKIILDDIECLSCDIPLSEIYSVFKTRWETTGSFKSLGDFKTYGKADNTAFRELITAKEIEKNVQEMSKGSAPGPDGITLGDVVKMDPEFSRTMEIFNLWLTTGKIPDMVRGCRTVLIPKSSKPDRLKDINNWRPITIGSILLRLFSRIVTARLSKACPLNPRQRGFIRAAGCSENLKLLQTIIWSAKREHRPLGVVFVDIAKAFDTVSHQHIIHALQQREVDPHIVGLVSNMYENISTYITTKRNTHTDKIQIRVGVKQGDPMSPLLFNLAMDPLLCKLEESGKGYHRGQSSITAMAFADDLVLLSDSWENMNTNISILETFCNLTGLKTQGQKCHGFYIKPTKDSYTINDCAAWTINGTPLNMIDPGESEKYLGLQFDPWIGIARSGLSTKLDFWLQRIDQAPLKPLQKTDILKTYTIPRLIYIADHSEVKSALLETLDQKIRTAVKEWLHLPPCTCDAILYSSTRDGGLGITKLAGLIPSVQARRLHRIAQSSDDTMKCFMEKEKMEQLHKKLWIQAGGDRENIPSIWEAPPSSEPPNNVSTNSEWEAPTQKDKFPKPCNWRKNEFKKWTKLASQGRGIVNFERDKISNHWIQYYRRIPHRKLLTALQLRANVYPTREFLARGRQDQYIKACRHCDADNESCAHIIGNCPVTQDARIKRHNYICELLLEEAKKKDWVVFKEPHIRDSNKELYKPDLIFVKDGRALVVDVTVRYEAAKSSLEEAAAEKVRKYKHLETEVRHLTNAKDVTFVGFPLGARGKWHQDNFKLLTELGLSKSRQVKMAETFSTVALFSSVDIVHMFASRARKSMVM

SEQ ID NO: 1793 - protein, 1405 aa, synthetic construct
MAPKKKRKVVTVKFKYKGEEKEVDISKIKKVWRVGKMISFTYDDNGKTGRGAVSEKDAPKELLQMLEKSGSETPGTSESATPESPKRKVSSAEGAAKEEPKRRSARLSAKPPAKVEAKPKKAAAKDKSSDKKVQTKGKRGAKGKQAEVANQETKEDLPAENGETKTEESPASDEAGEKEAKSDSGSETPGTSESATPESLFVPEEGSSEKESEDAPKTSPPTPGKHGLEQTGEEKVMVTVPDKNPPCPCCGTRVNSVLNLIEHLKVSHGKRGVCFRCAKCGKENSNYHSVVCHFKKCRGPETEKAPAGEWICEVCNRDFTTKIGLGQHKRLAHPAVRNQERIVASQPKETSNRGAHKRCWTKEEEELLIRLEAQFEGNKNINKLIAEHITTKTAKQISDKRRLLSRKPAEEPRMEPGTCHHTRRAAASLRTEPEMSHHAQAEDRDNGPGRRPLPGRAAAGGRTMDEIRRHPDKGNGQQRPTKQKSEEQLQAYYKKTLEERLSAGALNTFPRAFKQVMEGRDIKLVINQTAQDCFGCLESISQIRTATRDKKDTVTREKHPKKPFQKWMKKRAIKKGNYLRFQRLFYLDRGKLAKIILDDIECLSCDIPLSEIYSVFKTRWETTGSFKSLGDFKTYGKADNTAFRELITAKEIEKNVQEMSKGSAPGPDGITLGDVVKMDPEFSRTMEIFNLWLTTGKIPDMVRGCRTVLIPKSSKPDRLKDINNWRPITIGSILLRLFSRIVTARLSKACPLNPRQRGFIRAAGCSENLKLLQTIIWSAKREHRPLGVVFVDIAKAFDTVSHQHIIHALQQREVDPHIVGLVSNMYENISTYITTKRNTHTDKIQIRVGVKQGDPMSPLLFNLAMDPLLCKLEESGKGYHRGQSSITAMAFADDLVLLSDSWENMNTNISILETFCNLTGLKTQGQKCHGFYIKPTKDSYTINDCAAWTINGTPLNMIDPGESEKYLGLQFDPWIGIARSGLSTKLDFWLQRIDQAPLKPLQKTDILKTYTIPRLIYIADHSEVKSALLETLDQKIRTAVKEWLHLPPCTCDAILYSSTRDGGLGITKLAGLIPSVQARRLHRIAQSSDDTMKCFMEKEKMEQLHKKLWIQAGGDRENIPSIWEAPPSSEPPNNVSTNSEWEAPTQKDKFPKPCNWRKNEFKKWTKLASQGRGIVNFERDKISNHWIQYYRRIPHRKLLTALQLRANVYPTREFLARGRQDQYIKACRHCDADNESCAHIIGNCPVTQDARIKRHNYICELLLEEAKKKDWVVFKEPHIRDSNKELYKPDLIFVKDGRALVVDVTVRYEAAKSSLEEAAAEKVRKYKHLETEVRHLTNAKDVTFVGFPLGARGKWHQDNFKLLTELGLSKSRQVKMAETFSTVALFSSVDIVHMFASRARKSMVM

SEQ ID NO: 1794 - protein, 1625 aa, synthetic construct; identical to SEQ ID NO: 629

SEQ ID NO: 1795 - protein, 1670 aa, synthetic construct
MAPKKKRKVNISGSSCGSPNSADTSSDFKDLWTKLKECHDREVQGLQVKVTKLKQERILDAQRLEEFFTKNQQLREQQKVLHETIKVLEDRLRAGLCDRCAVTEEHMRKKQQEFENIRQQNLKLITELMNERNTLQEENKKLSEQLQQKIENDQQHQAAELECEEDVIPDSPITAFSFSGVNRLRRKENPHVRYIEQTHTKLEHSVCANEMRKVSKSSTHPQHNPNENEILVADTYDQSQSPMAKAHGTSSYTPDKSSFNLATVVAETLGLGVQEESETQGPMSPLGDELYHCLEGNHKKQPFESGSETPGTSESATPEGSYEQLAPQPCVGETLHSSLPRDSELFVPEEGSSEKESEDAPKTSPPTPGKHGLEQTGEEKVMVTVPDKNPPCPCCGTRVNSVLNLIEHLKVSHGKRGVCFRCAKCGKENSNYHSVVCHFKKCRGPETEKAPAGEWICEVCNRDFTTKIGLGQHKRLAHPAVRNQERIVASQPKETSNRGAHKRCWTKEEEELLIRLEAQFEGNKNINKLIAEHITTKTAKQISDKRRLLSRKPAEEPREEPGTCHHTRRAAASLRTEPEMSHHAQAEDRDNGPGRRPLPGRAAAGGRTMDEIRRHPDKGNGQQRPTKQKSEEQLQAYYKKTLEERLSAGALNTFPRAFKQVMEGRDIKLVINQTAQDCFGCLESISQIRTATRDKKDTVTREKHPKKPFQKWMKKRAIKKGNYLRFQRLFYLDRGKLAKIILDDIECLSCDIPLSEIYSVFKTRWETTGSFKSLGDFKTYGKADNTAFRELITAKEIEKNVQEMSKGSAPGPDGITLGDVVKMDPEFSRTMEIFNLWLTTGKIPDMVRGCRTVLIPKSSKPDRLKDINNWRPITIGSILLRLFSRIVTARLSKACPLNPRQRGFIRAAGCSENLKLLQTIIWSAKREHRPLGVVFVDIAKAFDTVSHQHIIHALQQREVDPHIVGLVSNMYENISTYITTKRNTHTDKIQIRVGVKQGDPMSPLLFNLAMDPLLCKLEESGKGYHRGQSSITAMAFADDLVLLSDSWENMNTNISILETFCNLTGLKTQGQKCHGFYIKPTKDSYTINDCAAWTINGTPLNMIDPGESEKYLGLQFDPWIGIARSGLSTKLDFWLQRIDQAPLKPLQKTDILKTYTIPRLIYIADHSEVKSALLETLDQKIRTAVKEWLHLPPCTCDAILYSSTRDGGLGITKLAGLIPSVQARRLHRIAQSSDDTMKCFMEKEKMEQLHKKLWIQAGGDRENIPSIWEAPPSSEPPNNVSTNSEWEAPTQKDKFPKPCNWRKNEFKKWTKLASQGRGIVNFERDKISNHWIQYYRRIPHRKLLTALQLRANVYPTREFLARGRQDQYIKACRHCDADNESCAHIIGNCPVTQDARIKRHNYICELLLEEAKKKDWVVFKEPHIRDSNKELYKPDLIFVKDGRALVVDVTVRYEAAKSSLEEAAAEKVRKYKHLETEVRHLTNAKDVTFVGFPLGARGKWHQDNFKLLTELGLSKSRQVKMAETFSTVALFSSVDIVHMFASRARKSMVMSGSETPGTSESATPEGKGDPKKPRGKMSSYAFFVQTCREEHKKKHPDASVNFSEFSKKCSERWKTMSAKEKGKFEDMAKADKARYEREMKTYIPPKGEGGSGKRTADGSEFESPKKKRKV

SEQ ID NO: 1796 - protein, 2018 aa, synthetic construct
MAPKKKRKVAMASIEDNPEIEDDIFRKKRLTIMDLHPGAGKTKRYLPAIVREAIKRGLRTLILAPTRVVAAEMEEALRGLPIRYQTPAIRAEHTGREIVDLMCHATFTMRLLSPIRVPNYNLIIMDEAHFTDPASIAARGYISTRVEMGEAAGIFMTATPPGSRDPFPQSNAPIMDEEREIPERSWNSGHEWVTDFKGKTVWFVPSIKAGNDIAACLRKNGKKVIQLSRKTFDSEYIKTRTNDWDFVVTTDISEMGANFKAERVIDPRRCMKPVILTDGEERVILAGPMPVTHSSAAQRRGRVGRNPKNENDQYIYMGEPLENDEDCAHWKEAKMLLDNINTPEGIIPSMFEPEREKVDAIDGEYRLRGEARKTFVDLMRRGDLPVWLAYRVAAEGINYADRRWCFDGVKNNQILEENVEVEIWTKEGERKKLKPRWLDARIYSDPLALKEFKEFAAGRKSGSETPGTSESATPEGSNISGSSCGSPNSADTSSDFKDLWTKLKECHDREVQGLQVKVTKLKQERILDAQRLEEFFTKNQQLREQQKVLHETIKVLEDRLRAGLCDRCAVTEEHMRKKQQEFENIRQQNLKLITELMNERNTLQEENKKLSEQLQQKIENDQQHQAAELECEEDVIPDSPITAFSFSGVNRLRRKENPHVRYIEQTHTKLEHSVCANEMRKVSKSSTHPQHNPNENEILVADTYDQSQSPMAKAHGTSSYTPDKSSFNLATVVAETLGLGVQEESETQGPMSPLGDELYHCLEGNHKKQPFESGSETPGTSESATPEGSYEQLAPQPCVGETLHSSLPRDSELFVPEEGSSEKESEDAPKTSPPTPGKHGLEQTGEEKVMVTVPDKNPPCPCCGTRVNSVLNLIEHLKVSHGKRGVCFRCAKCGKENSNYHSVVCHFKKCRGPETEKAPAGEWICEVCNRDFTTKIGLGQHKRLAHPAVRNQERIVASQPKETSNRGAHKRCWTKEEEELLIRLEAQFEGNKNINKLIAEHITTKTAKQISDKRRLLSRKPAEEPREEPGTCHHTRRAAASLRTEPEMSHHAQAEDRDNGPGRRPLPGRAAAGGRTMDEIRRHPDKGNGQQRPTKQKSEEQLQAYYKKTLEERLSAGALNTFPRAFKQVMEGRDIKLVINQTAQDCFGCLESISQIRTATRDKKDTVTREKHPKKPFQKWMKKRAIKKGNYLRFQRLFYLDRGKLAKIILDDIECLSCDIPLSEIYSVFKTRWETTGSFKSLGDFKTYGKADNTAFRELITAKEIEKNVQEMSKGSAPGPDGITLGDVVKMDPEFSRTMEIFNLWLTTGKIPDMVRGCRTVLIPKSSKPDRLKDINNWRPITIGSILLRLFSRIVTARLSKACPLNPRQRGFIRAAGCSENLKLLQTIIWSAKREHRPLGVVFVDIAKAFDTVSHQHIIHALQQREVDPHIVGLVSNMYENISTYITTKRNTHTDKIQIRVGVKQGDPMSPLLFNLAMDPLLCKLEESGKGYHRGQSSITAMAFADDLVLLSDSWENMNTNISILETFCNLTGLKTQGQKCHGFYIKPTKDSYTINDCAAWTINGTPLNMIDPGESEKYLGLQFDPWIGIARSGLSTKLDFWLQRIDQAPLKPLQKTDILKTYTIPRLIYIADHSEVKSALLETLDQKIRTAVKEWLHLPPCTCDAILYSSTRDGGLGITKLAGLIPSVQARRLHRIAQSSDDTMKCFMEKEKMEQLHKKLWIQAGGDRENIPSIWEAPPSSEPPNNVSTNSEWEAPTQKDKFPKPCNWRKNEFKKWTKLASQGRGIVNFERDKISNHWIQYYRRIPHRKLLTALQLRANVYPTREFLARGRQDQYIKACRHCDADNESCAHIIGNCPVTQDARIKRHNYICELLLEEAKKKDWVVFKEPHIRDSNKELYKPDLIFVKDGRALVVDVTVRYEAAKSSLEEAAAEKVRKYKHLETEVRHLTNAKDVTFVGFPLGARGKWHQDNFKLLTELGLSKSRQVKMAETFSTVALFSSVDIVHMFASRARKSMVM

SEQ ID NO: 1797 - protein, 2038 aa, synthetic construct
MAPKKKRKVNISGSSCGSPNSADTSSDFKDLWTKLKECHDREVQGLQVKVTKLKQERILDAQRLEEFFTKNQQLREQQKVLHETIKVLEDRLRAGLCDRCAVTEEHMRKKQQEFENIRQQNLKLITELMNERNTLQEENKKLSEQLQQKIENDQQHQAAELECEEDVIPDSPITAFSFSGVNRLRRKENPHVRYIEQTHTKLEHSVCANEMRKVSKSSTHPQHNPNENEILVADTYDQSQSPMAKAHGTSSYTPDKSSFNLATVVAETLGLGVQEESETQGPMSPLGDELYHCLEGNHKKQPFESGSETPGTSESATPEGSYEQLAPQPCVGETLHSSLPRDSELFVPEEGSSEKESEDAPKTSPPTPGKHGLEQTGEEKVMVTVPDKNPPCPCCGTRVNSVLNLIEHLKVSHGKRGVCFRCAKCGKENSNYHSVVCHFKKCRGPETEKAPAGEWICEVCNRDFTTKIGLGQHKRLAHPAVRNQERIVASQPKETSNRGAHKRCWTKEEEELLIRLEAQFEGNKNINKLIAEHITTKTAKQISDKRRLLSRKPAEEPREEPGTCHHTRRAAASLRTEPEMSHHAQAEDRDNGPGRRPLPGRAAAGGRTMDEIRRHPDKGNGQQRPTKQKSEEQLQAYYKKTLEERLSAGALNTFPRAFKQVMEGRDIKLVINQTAQDCFGCLESISQIRTATRDKKDTVTREKHPKKPFQKWMKKRAIKKGNYLRFQRLFYLDRGKLAKIILDDIECLSCDIPLSEIYSVFKTRWETTGSFKSLGDFKTYGKADNTAFRELITAKEIEKNVQEMSKGSAPGPDGITLGDVVKMDPEFSRTMEIFNLWLTTGKIPDMVRGCRTVLIPKSSKPDRLKDINNWRPITIGSILLRLFSRIVTARLSKACPLNPRQRGFIRAAGCSENLKLLQTIIWSAKREHRPLGVVFVDIAKAFDTVSHQHIIHALQQREVDPHIVGLVSNMYENISTYITTKRNTHTDKIQIRVGVKQGDPMSPLLFNLAMDPLLCKLEESGKGYHRGQSSITAMAFADDLVLLSDSWENMNTNISILETFCNLTGLKTQGQKCHGFYIKPTKDSYTINDCAAWTINGTPLNMIDPGESEKYLGLQFDPWIGIARSGLSTKLDFWLQRIDQAPLKPLQKTDILKTYTIPRLIYIADHSEVKSALLETLDQKIRTAVKEWLHLPPCTCDAILYSSTRDGGLGITKLAGLIPSVQARRLHRIAQSSDDTMKCFMEKEKMEQLHKKLWIQAGGDRENIPSIWEAPPSSEPPNNVSTNSEWEAPTQKDKFPKPCNWRKNEFKKWTKLASQGRGIVNFERDKISNHWIQYYRRIPHRKLLTALQLRANVYPTREFLARGRQDQYIKACRHCDADNESCAHIIGNCPVTQDARIKRHNYICELLLEEAKKKDWVVFKEPHIRDSNKELYKPDLIFVKDGRALVVDVTVRYEAAKSSLEEAAAEKVRKYKHLETEVRHLTNAKDVTFVGFPLGARGKWHQDNFKLLTELGLSKSRQVKMAETFSTVALFSSVDIVHMFASRARKSMVMSGSETPGTSESATPEAMASIEDNPEIEDDIFRKKRLTIMDLHPGAGKTKRYLPAIVREAIKRGLRTLILAPTRVVAAEMEEALRGLPIRYQTPAIRAEHTGREIVDLMCHATFTMRLLSPIRVPNYNLIIMDEAHFTDPASIAARGYISTRVEMGEAAGIFMTATPPGSRDPFPQSNAPIMDEEREIPERSWNSGHEWVTDFKGKTVWFVPSIKAGNDIAACLRKNGKKVIQLSRKTFDSEYIKTRTNDWDFVVTTDISEMGANFKAERVIDPRRCMKPVILTDGEERVILAGPMPVTHSSAAQRRGRVGRNPKNENDQYIYMGEPLENDEDCAHWKEAKMLLDNINTPEGIIPSMFEPEREKVDAIDGEYRLRGEARKTFVDLMRRGDLPVWLAYRVAAEGINYADRRWCFDGVKNNQILEENVEVEIWTKEGERKKLKPRWLDARIYSDPLALKEFKEFAAGRKGGSGKRTADGSEFESPKKKRKV

SEQ ID NO: 1798 - protein, 1658 aa, synthetic construct
MAPKRKVSSAEGAAKEEPKRRSARLSAKPPAKVEAKPKKAAAKDKSSDKKVQTKGKRGAKGKQAEVANQETKEDLPAENGETKTEESPASDEAGEKEAKSDSGSETPGTSESATPESNISGSSCGSPNSADTSSDFKDLWTKLKECHDREVQGLQVKVTKLKQERILDAQRLEEFFTKNQQLREQQKVLHETIKVLEDRLRAGLCDRCAVTEEHMRKKQQEFENIRQQNLKLITELMNERNTLQEENKKLSEQLQQKIENDQQHQAAELECEEDVIPDSPITAFSFSGVNRLRRKENPHVRYIEQTHTKLEHSVCANEMRKVSKSSTHPQHNPNENEILVADTYDQSQSPMAKAHGTSSYTPDKSSFNLATVVAETLGLGVQEESETQGPMSPLGDELYHCLEGNHKKQPFESGSETPGTSESATPEGSYEQLAPQPCVGETLHSSLPRDSELFVPEEGSSEKESEDAPKTSPPTPGKHGLEQTGEEKVMVTVPDKNPPCPCCGTRVNSVLNLIEHLKVSHGKRGVCFRCAKCGKENSNYHSVVCHFKKCRGPETEKAPAGEWICEVCNRDFTTKIGLGQHKRLAHPAVRNQERIVASQPKETSNRGAHKRCWTKEEEELLIRLEAQFEGNKNINKLIAEHITTKTAKQISDKRRLLSRKPAEEPREEPGTCHHTRRAAASLRTEPEMSHHAQAEDRDNGPGRRPLPGRAAAGGRTMDEIRRHPDKGNGQQRPTKQKSEEQLQAYYKKTLEERLSAGALNTFPRAFKQVMEGRDIKLVINQTAQDCFGCLESISQIRTATRDKKDTVTREKHPKKPFQKWMKKRAIKKGNYLRFQRLFYLDRGKLAKIILDDIECLSCDIPLSEIYSVFKTRWETTGSFKSLGDFKTYGKADNTAFRELITAKEIEKNVQEMSKGSAPGPDGITLGDVVKMDPEFSRTMEIFNLWLTTGKIPDMVRGCRTVLIPKSSKPDRLKDINNWRPITIGSILLRLFSRIVTARLSKACPLNPRQRGFIRAAGCSENLKLLQTIIWSAKREHRPLGVVFVDIAKAFDTVSHQHIIHALQQREVDPHIVGLVSNMYENISTYITTKRNTHTDKIQIRVGVKQGDPMSPLLFNLAMDPLLCKLEESGKGYHRGQSSITAMAFADDLVLLSDSWENMNTNISILETFCNLTGLKTQGQKCHGFYIKPTKDSYTINDCAAWTINGTPLNMIDPGESEKYLGLQFDPWIGIARSGLSTKLDFWLQRIDQAPLKPLQKTDILKTYTIPRLIYIADHSEVKSALLETLDQKIRTAVKEWLHLPPCTCDAILYSSTRDGGLGITKLAGLIPSVQARRLHRIAQSSDDTMKCFMEKEKMEQLHKKLWIQAGGDRENIPSIWEAPPSSEPPNNVSTNSEWEAPTQKDKFPKPCNWRKNEFKKWTKLASQGRGIVNFERDKISNHWIQYYRRIPHRKLLTALQLRANVYPTREFLARGRQDQYIKACRHCDADNESCAHIIGNCPVTQDARIKRHNYICELLLEEAKKKDWVVFKEPHIRDSNKELYKPDLIFVKDGRALVVDVTVRYEAAKSSLEEAAAEKVRKYKHLETEVRHLTNAKDVTFVGFPLGARGKWHQDNFKLLTELGLSKSRQVKMAETFSTVALFSSVDIVHMFASRARKSMVM

SEQ ID NO: 1799 - protein, 1946 aa, synthetic construct
MAPKKKRKVNISGSSCGSPNSADTSSDFKDLWTKLKECHDREVQGLQVKVTKLKQERILDAQRLEEFFTKNQQLREQQKVLHETIKVLEDRLRAGLCDRCAVTEEHMRKKQQEFENIRQQNLKLITELMNERNTLQEENKKLSEQLQQKIENDQQHQAAELECEEDVIPDSPITAFSFSGVNRLRRKENPHVRYIEQTHTKLEHSVCANEMRKVSKSSTHPQHNPNENEILVADTYDQSQSPMAKAHGTSSYTPDKSSFNLATVVAETLGLGVQEESETQGPMSPLGDELYHCLEGNHKKQPFESGSETPGTSESATPEGSPKRKVSSAEGAAKEEPKRRSARLSAKPPAKVEAKPKKAAAKDKSSDKKVQTKGKRGAKGKQAEVANQETKEDLPAENGETKTEESPASDEAGEKEAKSDSGSETPGTSESATPESYEQLAPQPCVGETLHSSLPRDSELFVPEEGSSEKESEDAPKTSPPTPGKHGLEQTGEEKVMVTVPDKNPPCPCCGTRVNSVLNLIEHLKVSHGKRGVCFRCAKCGKENSNYHSVVCHFKKCRGPETEKAPAGEWICEVCNRDFTTKIGLGQHKRLAHPAVRNQERIVASQPKETSNRGAHKRCWTKEEEELLIRLEAQFEGNKNINKLIAEHITTKTAKQISDKRRLLSRKPAEEPREEPGTCHHTRRAAASLRTEPEMSHHAQAEDRDNGPGRRPLPGRAAAGGRTMDEIRRHPDKGNGQQRPTKQKSEEQLQAYYKKTLEERLSAGALNTFPRAFKQVMEGRDIKLVINQTAQDCFGCLESISQIRTATRDKKDTVTREKHPKKPFQKWMKKRAIKKGNYLRFQRLFYLDRGKLAKIILDDIECLSCDIPLSEIYSVFKTRWETTGSFKSLGDFKTYGKADNTAFRELITAKEIEKNVQEMSKGSAPGPDGITLGDVVKMDPEFSRTMEIFNLWLTTGKIPDMVRGCRTVLIPKSSKPDRLKDINNWRPITIGSILLRLFSRIVTARLSKACPLNPRQRGFIRAAGCSENLKLLQTIIWSAKREHRPLGVVFVDIAKAFDTVSHQHIIHALQQREVDPHIVGLVSNMYENISTYITTKRNTHTDKIQIRVGVKQGDPMSPLLFNLAMDPLLCKLEESGKGYHRGQSSITAMAFADDLVLLSDSWENMNTNISILETFCNLTGLKTQGQKCHGFYIKPTKDSYTINDCAAWTINGTPLNMIDPGESEKYLGLQFDPWIGIARSGLSTKLDFWLQRIDQAPLKPLQKTDILKTYTIPRLIYIADHSEVKSALLETLDQKIRTAVKEWLHLPPCTCDAILYSSTRDGGLGITKLAGLIPSVQARRLHRIAQSSDDTMKCFMEKEKMEQLHKKLWIQAGGDRENIPSIWEAPPSSEPPNNVSTNSEWEAPTQKDKFPKPCNWRKNEFKKWTKLASQGRGIVNFERDKISNHWIQYYRRIPHRKLLTALQLRANVYPTREFLARGRQDQYIKACRHCDADNESCAHIIGNCPVTQDARIKRHNYICELLLEEAKKKDWVVFKEPHIRDSNKELYKPDLIFVKDGRALVVDVTVRYEAAKSSLEEAAAEKVRKYKHLETEVRHLTNAKDVTFVGFPLGARGKWHQDNFKLLTELGLSKSRQVKMAETFSTVALFSSVDIVHMFASRARKSMVMSGGSSGGSSGSETPGTSESATPESSGGSSGGSSMGTALTPLLTKFATRYEMGTTPEEVANTLKQTCFKGQVNDSQMVALLIVADQYKLNPFTKELYAFPDKNNGIVPVVGVDGWARIINENPQFDGMEFSMDQQGTECTCKIYRKDRSHAISATEYMAECKRNTQPWQSHPRRMLRHKAMIQCARLAFGFAGIYDQDEAERIVERDVTPAEQYEDVSEAICLIKDSPTMEDLQAAFSNAWKAYKTKGARDQLTAAKDQRKKELLDAPIDVEFEETGDDRAA

SEQ ID NO: 1800 - protein, 1485 aa, synthetic construct
MASCPKPGPPVSAGAMSLESGLTTHSVLAIERGPNSLANSGSDFGGGGLGLPLRLLRVSVGTQTSRSDWVDLVSWSHPGPTSKSQQVDLVSLFPKHRVDLLSKNDQVDLVAQFLPSKFPPNLAENDLALLVNLEFYRSDLHVYECVHFAAHWEGLSGLPEVYEQLAPQPCVGETLHSSLPRDSELFVPEEGSSEKESEDAPKTSPPTPGKHGLEQTGEEKVMVTVPDKNPPCPCCGTRVNSVLNLIEHLKVSHGKRGVCFRCAKCGKENSNYHSVVCHFKKCRGPETEKAPAGEWICEVCNRDFTTKIGLGQHKRLAHPAVRNQERIVASQPKETSNRGAHKRCWTKEEEELLIRLEAQFEGNKNINKLIAEHITTKTAKQISDKRRLLSRKPAEEPREEPGTCHHTRRAAASLRTEPEMSHHAQAEDRDNGPGRRPLPGRAAAGGRTMDEIRRHPDKGNGQQRPTKQKSEEQLQAYYKKTLEERLSAGALNTFPRAFKQVMEGRDIKLVINQTAQDCFGCLESISQIRTATRDKKDTVTREKHPKKPFQKWMKKRAIKKGNYLRFQRLFYLDRGKLAKIILDDIECLSCDIPLSEIYSVFKTRWETTGSFKSLGDFKTYGKADNTAFRELITAKEIEKNVQEMSKGSAPGPDGITLGDVVKMDPEFSRTMEIFNLWLTTGKIPDMVRGCRTVLIPKSSKPDRLKDINNWRPITIGSILLRLFSRIVTARLSKACPLNPRQRGFIRAAGCSENLKLLQTIIWSAKREHRPLGVVFVDIAKAFDTVSHQHIIHALQQREVDPHIVGLVSNMYENISTYITTKRNTHTDKIQIRVGVKQGDPMSPLLFNLAMDPLLCKLEESGKGYHRGQSSITAMAFADDLVLLSDSWENMNTNISILETFCNLTGLKTQGQKCHGFYIKPTKDSYTINDCAAWTINGTPLNMIDPGESEKYLGLQFDPWIGIARSGLSTKLDFWLQRIDQAPLKPLQKTDILKTYTIPRLIYIADHSEVKSALLETLDQKIRTAVKEWLHLPPCTCDAILYSSTRDGGLGITKLAGLIPSVQARRLHRIAQSSDDTMKCFMEKEKMEQLHKKLWIQAGGDRENIPSIWEAPPSSEPPNNVSTNSEWEAPTQKDKFPKPCNWRKNEFKKWTKLASQGRGIVNFERDKISNHWIQYYRRIPHRKLLTALQLRANVYPTREFLARGRQDQYIKACRHCDADNESCAHIIGNCPVTQDARIKRHNYICELLLEEAKKKDWVVFKEPHIRDSNKELYKPDLIFVKDARALVVDVTVRYEAAKSSLEEAAAEKVRKYKHLETEVRHLTNAKDVTFVGFPLGARGKWHQDNFKLLTELGLSKSRQVKMAETFSTVALFSSVDIVHMFASRARKSMVMSGSETPGTSESATPESTNPKPQKKNKRNTNRRPQDVKFPGGGQIVGGVYLLPRRGPRLGVRATRKTSERSQPRSGGSKRTADGSEFESPKKKRKV

SEQ ID NO: 1801 - protein, 2076 aa, synthetic construct
MASCPKPGPPVSAGAMSLESGLTTHSVLAIERGPNSLANSGSDFGGGGLGLPLRLLRVSVGTQTSRSDWVDLVSWSHPGPTSKSQQVDLVSLFPKHRVDLLSKNDQVDLVAQFLPSKFPPNLAENDLALLVNLEFYRSDLHVYECVHFAAHWEGLSGLPEVYEQLAPQPCVGETLHSSLPRDSELFVPEEGSSEKESEDAPKTSPPTPGKHGLEQTGEEKVMVTVPDKNPPCPCCGTRVNSVLNLIEHLKVSHGKRGVCFRCAKCGKENSNYHSVVCHFKKCRGPETEKAPAGEWICEVCNRDFTTKIGLGQHKRLAHPAVRNQERIVASQPKETSNRGAHKRCWTKEEEELLIRLEAQFEGNKNINKLIAEHITTKTAKQISDKRRLLSRKPAEEPREEPGTCHHTRRAAASLRTEPEMSHHAQAEDRDNGPGRRPLPGRAAAGGRTMDEIRRHPDKGNGQQRPTKQKSEEQLQAYYKKTLEERLSAGALNTFPRAFKQVMEGRDIKLVINQTAQDCFGCLESISQIRTATRDKKDTVTREKHPKKPFQKWMKKRAIKKGNYLRFQRLFYLDRGKLAKIILDDIECLSCDIPLSEIYSVFKTRWETTGSFKSLGDFKTYGKADNTAFRELITAKEIEKNVQEMSKGSAPGPDGITLGDVVKMDPEFSRTMEIFNLWLTTGKIPDMVRGCRTVLIPKSSKPDRLKDINNWRPITIGSILLRLFSRIVTARLSKACPLNPRQRGFIRAAGCSENLKLLQTIIWSAKREHRPLGVVFVDIAKAFDTVSHQHIIHALQQREVDPHIVGLVSNMYENISTYITTKRNTHTDKIQIRVGVKQGDPMSPLLFNLAMDPLLCKLEESGKGYHRGQSSITAMAFADDLVLLSDSWENMNTNISILETFCNLTGLKTQGQKCHGFYIKPTKDSYTINDCAAWTINGTPLNMIDPGESEKYLGLQFDPWIGIARSGLSTKLDFWLQRIDQAPLKPLQKTDILKTYTIPRLIYIADHSEVKSALLETLDQKIRTAVKEWLHLPPCTCDAILYSSTRDGGLGITKLAGLIPSVQARRLHRIAQSSDDTMKCFMEKEKMEQLHKKLWIQAGGDRENIPSIWEAPPSSEPPNNVSTNSEWEAPTQKDKFPKPCNWRKNEFKKWTKLASQGRGIVNFERDKISNHWIQYYRRIPHRKLLTALQLRANVYPTREFLARGRQDQYIKACRHCDADNESCAHIIGNCPVTQDARIKRHNYICELLLEEAKKKDWVVFKEPHIRDSNKELYKPDLIFVKDARALVVDVTVRYEAAKSSLEEAAAEKVRKYKHLETEVRHLTNAKDVTFVGFPLGARGKWHQDNFKLLTELGLSKSRQVKMAETFSTVALFSSVDIVHMFASRARKSMVMSGSETPGTSESATPEGCVSIIGRLHVNQRGSGSASITAYAQQTRGLLGAIVVSMTGRDRTEQAGEVQILSTVSQSFLGTTISGVLWTVYHGAGNKTLAGLRGPVTQMYSSAEGDLVGWPSPPGTKSLEPCKCGAVDLYLVTRNADVIPARRRGDKRGALLSPRPISTLKGSSGGPVLCPRGHVVGLFRAAVCSRGVAKSIDFIPVETLDVVTRSPTFSDNSTPPAVPQTYQVGYLHAPTGSGKSTKVPVAYAAQGYKVLVLNPSVAATLGFGAYLSKAHGINPNIRTGVRTVMTGEAITYSTYGKFLADGGCASGAYDIIICDECHAVDATSILGIGTVLDQAETAGVRLTVLATATPPGSVTTPHPDIEEVGLGREGEIPFYGRAIPLSCIKGGRHLIFCHSKKKCDELAAALRGMGLNAVAYYRGLDVSIIPAQGDVVVVATDALMTGYTGDFDSVIDCNVAVTQAVDFSLDPTFTITTQTVPQDAVSRSQRRGRTGRGRQGTYRYVSTGERASGMFDSVVLCECYDAGAAWYDLTPAETTVRLRAYFNTPGLPVCQDHLEFWEAVFTGLTHIDAHFLSQTKQAGENFAYLVAYQATVCARAKAPPPSWDAMWKCLARLKPTLAGPTPLLYRLGPITNEVTLTHPGTKYIATCMQADLEVMTSGGSKRTADGSEFESPKKKRKV

SEQ ID NO: 1802 - protein, 2258 aa, synthetic construct
MASCPKPGPPVSAGAMSLESGLTTHSVLAIERGPNSLANSGSDFGGGGLGLPLRLLRVSVGTQTSRSDWVDLVSWSHPGPTSKSQQVDLVSLFPKHRVDLLSKNDQVDLVAQFLPSKFPPNLAENDLALLVNLEFYRSDLHVYECVHFAAHWEGLSGLPEVYEQLAPQPCVGETLHSSLPRDSELFVPEEGSSEKESEDAPKTSPPTPGKHGLEQTGEEKVMVTVPDKNPPCPCCGTRVNSVLNLIEHLKVSHGKRGVCFRCAKCGKENSNYHSVVCHFKKCRGPETEKAPAGEWICEVCNRDFTTKIGLGQHKRLAHPAVRNQERIVASQPKETSNRGAHKRCWTKEEEELLIRLEAQFEGNKNINKLIAEHITTKTAKQISDKRRLLSRKPAEEPREEPGTCHHTRRAAASLRTEPEMSHHAQAEDRDNGPGRRPLPGRAAAGGRTMDEIRRHPDKGNGQQRPTKQKSEEQLQAYYKKTLEERLSAGALNTFPRAFKQVMEGRDIKLVINQTAQDCFGCLESISQIRTATRDKKDTVTREKHPKKPFQKWMKKRAIKKGNYLRFQRLFYLDRGKLAKIILDDIECLSCDIPLSEIYSVFKTRWETTGSFKSLGDFKTYGKADNTAFRELITAKEIEKNVQEMSKGSAPGPDGITLGDVVKMDPEFSRTMEIFNLWLTTGKIPDMVRGCRTVLIPKSSKPDRLKDINNWRPITIGSILLRLFSRIVTARLSKACPLNPRQRGFIRAAGCSENLKLLQTIIWSAKREHRPLGVVFVDIAKAFDTVSHQHIIHALQQREVDPHIVGLVSNMYENISTYITTKRNTHTDKIQIRVGVKQGDPMSPLLFNLAMDPLLCKLEESGKGYHRGQSSITAMAFADDLVLLSDSWENMNTNISILETFCNLTGLKTQGQKCHGFYIKPTKDSYTINDCAAWTINGTPLNMIDPGESEKYLGLQFDPWIGIARSGLSTKLDFWLQRIDQAPLKPLQKTDILKTYTIPRLIYIADHSEVKSALLETLDQKIRTAVKEWLHLPPCTCDAILYSSTRDGGLGITKLAGLIPSVQARRLHRIAQSSDDTMKCFMEKEKMEQLHKKLWIQAGGDRENIPSIWEAPPSSEPPNNVSTNSEWEAPTQKDKFPKPCNWRKNEFKKWTKLASQGRGIVNFERDKISNHWIQYYRRIPHRKLLTALQLRANVYPTREFLARGRQDQYIKACRHCDADNESCAHIIGNCPVTQDARIKRHNYICELLLEEAKKKDWVVFKEPHIRDSNKELYKPDLIFVKDARALVVDVTVRYEAAKSSLEEAAAEKVRKYKHLETEVRHLTNAKDVTFVGFPLGARGKWHQDNFKLLTELGLSKSRQVKMAETFSTVALFSSVDIVHMFASRARKSMVMSGSETPGTSESATPELFVVRPGRKKNELEAFFIENEPEKLSQMQNLKADRIYRFIMREGRLFKVLEGSQYRNPKEIEKLLRQSRIVLVNADEWEDYFKRRLQNKRVEKAELCRLCLLEGRITVLTEGNRIKYHNEYICERCAEDELKRELRFRFKSIAMFDQAKKLLERFRDLDKVLYAFDPRFDPTKHPEITKWDELKAKHVKVEKIKVDELPVPEKFKEVLKSEGVRELLPVQSLAVKNGLLDGENLLVVSATASGKTLIGELAGVPKAMQGKKLLFLVPLVALANQKYEDFKRRYSKLGLRVAIRVGMSRIKTKDELVVVDTGIDADIIVGTYEGIDYLLRAGRKIGNVGTIVIDEIHTLDDEERGPRLDGLIARLRKLYPKAQFIGLSATVGNPDELAKELGLKLVLYDERPVDLERHIIIVRNESEKWRHIANLCRAEAMRKSKQGYKGQSIVFTFSRKRTHELAAYLTSKGLKAKPYHSGLPYKQRKLTEMEFLAQRLDVVVTTAALGAGVDFPASQVIFESLAMGNKWLSVREFHQMLGRAGRPLYHEKGKVYLLVEPGRKYSAQMEGTEDEVAFKLLTAPIEPVQVEWSDELEQDNVLAHSCVFNRLDVIEEVQSMCLGANQSAEKVLEKLEEFDFVKMKRPIVEVTPYGRAVSMSFLLPKEATFIRGNLGKREARWIAVKLLPFENIYLSGTLQRELEGAVRGRLSANVFSPSFASILEELDKVIPELSPNAAERLFTIYQEFFMCPEEDCTEYAMERVSNLIIELRRSGKHPTQIAEHFRKVYGLIVYPGDVFTWLDGIVRKLEAIERIARVFRVRKTEEGAKILKREIEEGRMIRSGGSKRTADGSEFESPKKKRKV

SEQ ID NO: 1803 - protein, 1337 aa, synthetic construct; identical to SEQ ID NO: 441

SEQ ID NO: 1804 - DNA, 2086 bp, synthetic construct
  source 1..2086: mol_type = other DNA
gagtaactatgactctcttaagtctagttacaactgggcatcgctgcagagatcgcacctcctcgtggtcccgctggtagcccttcgaagggtgactaagtcgatctctgccccaggtacggagccgttgggactcaccagtccaacgtaatactcgacggatcgatccgaacaaacgacccaacacccgtgcgttttattctgtctttttattgccgatcccctcagaagaactcgtcaagaaggcgatagaaggcgatgcgctgcgaatcgggagcggcgataccgtaaagcacgaggaagcggtcagcccattcgccgccaagctcttcagcaatatcacgggtagccaacgctatgtcctgatagcggtcggccgctttacttgtacagctcgtccatgccgagagtgatcccggcggcggtcacgaactccagcaggaccatgtgatcgcgcttctcgttggggtctttgctcagggcggactgggtgctcaggtagtggttgtcgggcagcagcacggggccgtcgccgatgggggtgttctgctggtagtggtcggccagctgcacgctgccgtcctcgatgttgtggcggatcttgaagttcaccttgatgccgttcttctgcttgtcggccatgatatagacgttgtggctgttgtagttgtactccagcttgtgccccaggatgttgccgtcctccttgaagtcgatgcccttcagctcgatgcggttcaccagggtgtcgccctcgaacttcacctcggcgcgggtcttgtagttgccgtcgtccttgaagaagatggtgcgctcctggacgtagccttcgggcatggcggacttgaagaagtcgtgctgcttcatgtggtcggggtagcggctgaagcactgcacgccgtaggtcagggtggtcacgagggtgggccagggcacgggcagcttgccggtggtgcagatgaacttcagggtcagcttgccgtaggtggcatcgccctcgccctcgccggacacgctgaacttgtggccgtttacgtcgccgtccagctcgaccaggatgggcaccaccccggtgaacagctcctcgcccttgctcaccatggtggcgaattcgaagcttgagctcgagatctgagtccggtagcgctagcggatctgacggttcactaaaccagctctgcttatatagacctcccaccgtacacgcctaccgcccatttgcgtcaatggggcggagttgttacgacattttggaaagtcccgttgattttggtgccaaaacaaactcccattgacgtcaatggggtggagacttggaaatccccgtgagtcaaaccgctatccacgcccattgatgtactgccaaaaccgcatcaccatggtaatagcgatgactaatacgtagatgtactgccaagtaggaaagtcccataaggtcatgtactgggcataatgccaggcgggccatttaccgtcattgacgtcaatagggggcgtacttggcatatgatacacttgatgtactgccaagtgggcagtttaccgtaaatactccacccattgacgtcaatggaaagtccctattggcgttactatgggaacatacgtcattattgacgtcaatgggcgggggtcgttgggcggtcagccaggcgggccatttaccgtaagttatgtaacgcggaactccatatatgggctatgaactaatgaccccgtaattgattactattaaattcctgcagttcaggttatttagatgcttagtttttgtacctttcttgttttgtttaggattttgatagtgttagtatttttatatttttgtacgattgcataatgttcttttttatacagttctgttttaataaaatagacgatagctagagacgttagggcagccacaagccagttaggtagcggatagtaggtaggaacagacttttactatttcataacgcgtcaattaccacctgatttggaccaattcacgggatttgtccaaggtggacgggccacctttacttaacccggaaaaggaacatatataatttatgtgtgttcgataaatagccaaatgcctcgt

SEQ ID NO: 1805 - DNA, 2070 bp, synthetic construct
  source 1..2070: mol_type = other DNA
gagtaactatgactctcttaagtctagttacaactgggcatcgctgcagagatcgcacctcctcgtggtcccgctggtagcccttcgaagggtgactaagtcgatctctgccccaggtacggagccgttgggactcaccagtccaacgtaatactcgacggatcgatccgaacaaacgacccaacacccgtgcgttttattctgtctttttattgccgatcccctcagaagaactcgtcaagaaggcgatagaaggcgatgcgctgcgaatcgggagcggcgataccgtaaagcacgaggaagcggtcagcccattcgccgccaagctcttcagcaatatcacgggtagccaacgctatgtcctgatagcggtcggccgctttacttgtacagctcgtccatgccgagagtgatcccggcggcggtcacgaactccagcaggaccatgtgatcgcgcttctcgttggggtctttgctcagggcggactgggtgctcaggtagtggttgtcgggcagcagcacggggccgtcgccgatgggggtgttctgctggtagtggtcggccagctgcacgctgccgtcctcgatgttgtggcggatcttgaagttcaccttgatgccgttcttctgcttgtcggccatgatatagacgttgtggctgttgtagttgtactccagcttgtgccccaggatgttgccgtcctccttgaagtcgatgcccttcagctcgatgcggttcaccagggtgtcgccctcgaacttcacctcggcgcgggtcttgtagttgccgtcgtccttgaagaagatggtgcgctcctggacgtagccttcgggcatggcggacttgaagaagtcgtgctgcttcatgtggtcggggtagcggctgaagcactgcacgccgtaggtcagggtggtcacgagggtgggccagggcacgggcagcttgccggtggtgcagatgaacttcagggtcagcttgccgtaggtggcatcgccctcgccctcgccggacacgctgaacttgtggccgtttacgtcgccgtccagctcgaccaggatgggcaccaccccggtgaacagctcctcgcccttgctcaccatggtggcgaattcgaagcttgagctcgagatctgagtccggtagcgctagcggatctgacggttcactaaaccagctctgcttatatagacctcccaccgtacacgcctaccgcccatttgcgtcaatggggcggagttgttacgacattttggaaagtcccgttgattttggtgccaaaacaaactcccattgacgtcaatggggtggagacttggaaatccccgtgagtcaaaccgctatccacgcccattgatgtactgccaaaaccgcatcaccatggtaatagcgatgactaatacgtagatgtactgccaagtaggaaagtcccataaggtcatgtactgggcataatgccaggcgggccatttaccgtcattgacgtcaatagggggcgtacttggcatatgatacacttgatgtactgccaagtgggcagtttaccgtaaatactccacccattgacgtcaatggaaagtccctattggcgttactatgggaacatacgtcattattgacgtcaatgggcgggggtcgttgggcggtcagccaggcgggccatttaccgtaagttatgtaacgcggaactccatatatgggctatgaactaatgaccccgtaattgattactattaaattcctgcagttcaggttatttagatgcttagtttttgtacctttcttgttttgtttaggattttgatagtgttagtatttttatatttttgtacgattgcataatgttcttttttatacagttctgttttaataaaatagacgatagctagagacgttagggcagccacaagccagttaggtagcggatagtaggtaggaacagacttttactatttcataacgcgtcaattaccacctgatttggaccaattcacgggatttgtccaaggtggacgggccacctttacttaacccggaaaaggaacatatataatttatgtgtgttcgataaa

SEQ ID NO: 1806 - protein, 1625 aa, synthetic construct
MAPKKKRKVNISGSSCGSPNSADTSSDFKDLWTKLKECHDREVQGLQVKVTKLKQERILDAQRLEEFFTKNQQLREQQKVLHETIKVLEDRLRAGLCDRCAVTEEHMRKKQQEFENIRQQNLKLITELMNERNTLQEENKKLSEQLQQKIENDQQHQAAELECEEDVIPDSPITAFSFSGVNRLRRKENPHVRYIEQTHTKLEHSVCANEMRKVSKSSTHPQHNPNENEILVADTYDQSQSPMAKAHGTSSYTPDKSSFNLATVVAETLGLGVQEESETQGPMSPLGDELYHCLEGNHKKQPFESGSETPGTSESATPEGSVTVKFKYKGEEKEVDISKIKKVWRVGKMISFTYDDNGKTGRGAVSEKDAPKELLQMLEKSGSETPGTSESATPESYEQLAPQPCVGETLHSSLPRDSELFVPEEGSSEKESEDAPKTSPPTPGKHGLEQTGEEKVMVTVPDKNPPCPCCGTRVNSVLNLIEHLKVSHGKRGVCFRCAKCGKENSNYHSVVCHFKKCRGPETEKAPAGEWICEVCNRDFTTKIGLGQHKRLAHPAVRNQERIVASQPKETSNRGAHKRCWTKEEEELLIRLEAQFEGNKNINKLIAEHITTKTAKQISDKRRLLSRKPAEEPREEPGTCHHTRRAAASLRTEPEMSHHAQAEDRDNGPGRRPLPGRAAAGGRTMDEIRRHPDKGNGQQRPTKQKSEEQLQAYYKKTLEERLSAGALNTFPRAFKQVMEGRDIKLVINQTAQDYFGCLESISQIRTATRDKKDTVTREKHPKKPFQKWMKKRAIKKGNYLRFQRLFYLDRGKLAKIILDDIECLSCDIPLSEIYSVFKTRWETTGSFKSLGDFKTYGKADNTAFRELITAKEIEKNVQEMSKGSAPGPDGITLGDVVKMDPEFSRTMEIFNLWLTTGKIPDMVRGCRTVLIPKSSKPDRLKDINNWRPITIGSILLRLFSRIVTARLSKACPLNPRQRGFIRAAGCSENLKLLQTIIWSAKREHRPLGVVFVDIAKAFDTVSHQHIIHALQQREVDPHIVGLVSNMYENISTYITTKRNTHTDKIQIRVGVKQGDPMSPLLFNLAMDPLLCKLEESGKGYHRGQSSITAMAFADDLVLLSDSWENMNTNISILETFCNLTGLKTQGQKCHGFYIKPTKKSYTINDCAAWTINGTPLNMIDPGESEKYLGLQFDPWIGIARSGLSTKLDFWLQRIDQAPLKPLQKTDILKTYTIPRLIYIADHSEVKSALLETLDQKIRTAVKEWLHLPPCTCDAILYSSTRDGGLGITKLAGLIPSVQARRLHRIAQSSDDTMKCFMEKEKMEQLHKKLWIQAGGDRENIPSIWEAPPSSEPPNNVSTNSEWEAPTQKDKFPKPCNWRKNEFKKWTKLASQGRGIVNFERDKISNHWIQYYRRIPHRKLLTALQLRANVYPTREFLARGRQDQYIKACRHCDADNESCAHIIGNCPVTQDARIKRHNYICELLLEEAKKKDWVVFKEPHIRDSNKELYKPDLIFVKDGRALVVDVTVRYEAAKSSLEEAAAEKVRKYKHLETEVRHLTNAKDVTFVGFPLGARGKWHQDNFKLLTELGLSKSRQVKMAETFSTVALFSSVDIVHMFASRARKSMVM

SEQ ID NO: 1807 - protein, 1405 aa, synthetic construct
MAPKKKRKVVTVKFKYKGEEKEVDISKIKKVWRVGKMISFTYDDNGKTGRGAVSEKDAPKELLQMLEKSGSETPGTSESATPESPKRKVSSAEGAAKEEPKRRSARLSAKPPAKVEAKPKKAAAKDKSSDKKVQTKGKRGAKGKQAEVANQETKEDLPAENGETKTEESPASDEAGEKEAKSDSGSETPGTSESATPESLFVPEEGSSEKESEDAPKTSPPTPGKHGLEQTGEEKVMVTVPDKNPPCPCCGTRVNSVLNLIEHLKVSHGKRGVCFRCAKCGKENSNYHSVVCHFKKCRGPETEKAPAGEWICEVCNRDFTTKIGLGQHKRLAHPAVRNQERIVASQPKETSNRGAHKRCWTKEEEELLIRLEAQFEGNKNINKLIAEHITTKTAKQISDKRRLLSRKPAEEPREEPGTCHHTRRAAASLRTEPEMSHHAQAEDRDNGPGRRPLPGRAAAGGRTMDEIRRHPDKGNGQQRPTKQKSEEQLQAYYKKTLEERLSAGALNTFPRAFKQVMEGRDIKLVINQTAQDYFGCLESISQIRTATRDKKDTVTREKHPKKPFQKWMKKRAIKKGNYLRFQRLFYLDRGKLAKIILDDIECLSCDIPLSEIYSVFKTRWETTGSFKSLGDFKTYGKADNTAFRELITAKEIEKNVQEMSKGSAPGPDGITLGDVVKMDPEFSRTMEIFNLWLTTGKIPDMVRGCRTVLIPKSSKPDRLKDINNWRPITIGSILLRLFSRIVTARLSKACPLNPRQRGFIRAAGCSENLKLLQTIIWSAKREHRPLGVVFVDIAKAFDTVSHQHIIHALQQREVDPHIVGLVSNMYENISTYITTKRNTHTDKIQIRVGVKQGDPMSPLLFNLAMDPLLCKLEESGKGYHRGQSSITAMAFADDLVLLSDSWEGMNTNISILETFCNLTGLKTQGQKCHGFYIKPTKDSYTINDCAAWTINGTPLNMIDPGESEKYLGLQFDPWIGIARSGLSTKLDFWLQRIDQAPLKPLQKTDILKTYTIPRLIYIADHSEVKSALLETLDQKIRTAVKEWLHLPPCTCDAILYSSTRDGGLGITKLAGLIPSVQARRLHRIAQSSDDTMKCFMEKEKMEQLHKKLWIQAGGDRENIPSIWEAPPSSEPPNNVSTNSEWEAPTQKDKFPKPCNWRKNEFKKWTKLASQGRGIVNFERDKISNHWIQYYRRIPHRKLLTALQLRANVYPTREFLARGRQDQYIKACRHCDADNESCAHIIGNCPVTQDARIKRHNYICELLLEEAKKKDWVVFKEPHIRDSNKELYKPDLIFVKDGRALVVDVTVRYEAAKSSLEEAAAEKVRKYKHLETEVRHLTNAKDVTFVGFPLGARGKWHQDNFKLLTELGLSKSRQVKMAETFSTVALFSSVDIVHMFASRARKSMVM

SEQ ID NO: 1808 - protein, 1625 aa, synthetic construct
MAPKKKRKVVTVKFKYKGEEKEVDISKIKKVWRVGKMISFTYDDNGKTGRGAVSEKDAPKELLQMLEKSGSETPGTSESATPESNISGSSCGSPNSADTSSDFKDLWTKLKECHDREVQGLQVKVTKLKQERILDAQRLEEFFTKNQQLREQQKVLHETIKVLEDRLRAGLCDRCAVTEEHMRKKQQEFENIRQQNLKLITELMNERNTLQEENKKLSEQLQQKIENDQQHQAAELECEEDVIPDSPITAFSFSGVNRLRRKENPHVRYIEQTHTKLEHSVCANEMRKVSKSSTHPQHNPNENEILVADTYDQSQSPMAKAHGTSSYTPDKSSFNLATVVAETLGLGVQEESETQGPMSPLGDELYHCLEGNHKKQPFESGSETPGTSESATPEGSYEQLAPQPCVGETLHSSLPRDSELFVPEEGSSEKESEDAPKTSPPTPGKHGLEQTGEEKVMVTVPDKNPPCPCCGTRVNSVLNLIEHLKVSHGKRGVCFRCAKCGKENSNYHSVVCHFKKCRGPETEKAPAGEWICEVCNRDFTTKIGLGQHKRLAHPAVRNQERIVASQPKETSNRGAHKRCWTKEEEELLIRLEAQFEGNKNINKLIAEHITTKTAKQISDKRRLLSRKPAEEPREEPGTCHHTRRAAASLRTEPEMSHHAQAEDRDNGPGRRPLPGRAAAGGRTMDEIRRHPDKGNGQQRPTKQKSEEQLQAYYKKTLEERLSAGALNTFPRAFKQVMEGRDIKLVINQTAQDYFGCLESISQIRTATRDKKDTVTREKHPKKPFQKWMKKRAIKKGNYLRFQRLFYLDRGKLAKIILDDIECLSCDIPLSEIYSVFKTRWETTGSFKSLGDFKTYGKADNTAFRELITAKEIEKNVQEMSKGSAPGPDGITLGDVVKMDPEFSRTMEIFNLWLTTGKIPDMVRGCRTVLIPKSSKPDRLKDINNWRPITIGSILLRLFSRIVTARLSKACPLNPRQRGFIRAAGCSENLKLLQTIIWSAKREHRPLGVVFVDIAKAFDTVSHQHIIHALQQREVDPHIVGLVSNMYENISTYITTKRNTHTDKIQIRVGVKQGDPMSPLLFNLAMDPLLCKLEESGKGYHRGQSSITAMAFADDLVLLSDSWEGMNTNISILETFCNLTGLKTQGQKCHGFYIKPTKDSYTINDCAAWTINGTPLNMIDPGESEKYLGLQFDPWIGIARSGLSTKLDFWLQRIDQAPLKPLQKTDILKTYTIPRLIYIADHSEVKSALLETLDQKIRTAVKEWLHLPPCTCDAILYSSTRDGGLGITKLAGLIPSVQARRLHRIAQSSDDTMKCFMEKEKMEQLHKKLWIQAGGDRENIPSIWEAPPSSEPPNNVSTNSEWEAPTQKDKFPKPCNWRKNEFKKWTKLASQGRGIVNFERDKISNHWIQYYRRIPHRKLLTALQLRANVYPTREFLARGRQDQYIKACRHCDADNESCAHIIGNCPVTQDARIKRHNYICELLLEEAKKKDWVVFKEPHIRDSNKELYKPDLIFVKDGRALVVDVTVRYEAAKSSLEEAAAEKVRKYKHLETEVRHLTNAKDVTFVGFPLGARGKWHQDNFKLLTELGLSKSRQVKMAETFSTVALFSSVDIVHMFASRARKSMVM

SEQ ID NO: 1809 - protein, 1397 aa, synthetic construct
MPKRKVSSAEGAAKEEPKRRSARLSAKPPAKVEAKPKKAAAKDKSSDKKVQTKGKRGAKGKQAEVANQETKEDLPAENGETKTEESPASDEAGEKEAKSDSGSETPGTSESATPESVTVKFKYKGEEKEVDISKIKKVWRVGKMISFTYDDNGKTGRGAVSEKDAPKELLQMLEKSGSETPGTSESATPESLFVPEEGSSEKESEDAPKTSPPTPGKHGLEQTGEEKVMVTVPDKNPPCPCCGTRVNSVLNLIEHLKVSHGKRGVCFRCAKCGKENSNYHSVVCHFKKCRGPETEKAPAGEWICEVCNRDFTTKIGLGQHKRLAHPAVRNQERIVASQPKETSNRGAHKRCWTKEEEELLIRLEAQFEGNKNINKLIAEHITTKTAKQISDKRRLLSRKPAEEPREEPGTCHHTRRAAASLRTEPEMSHHAQAEDRDNGPGRRPLPGRAAAGGRTMDEIRRHPDKGNGQQRPTKQKSEEQLQAYYKKTLEERLSAGALNTFPRAFKQVMEGRDIKLVINQTAQDCFGCLESISQIRTATRDKKDTVTREKHPKKPFQKWMKKRAIKKGNYLRFQRLFYLDRGKLAKIILDDIECLSCDIPLSEIYSVFKTRWETTGSFKSLGDFKTYGKADNTAFRELITAKEIEKNVQEMSKGSAPGPDGITLGDVKKMDPEFSRTMEIFNLWLTTGKIPDMVRGCRTVLIPKSSKPDRLKDINNWRPITIGSILLRLFSRIVTARLSKACPLNPRQRGFIRAAGCSENLKLLQTIIWSAKREHRPLGVVFVDIAKAFDTVSHQHIIHALQQREVDPHIVGLVSNMYENISTYITTKRNTHTDKIQIRVGVKQGDPMSPLLFNLAMDPLLCKLEESGKGYHRGQSSITAMAFADDLVLLSDSWENMNTNISILETFCNLTGLKTQGQKCHGFYIKPTKDSYTINDCAAWTINGTPLNMIDPGESEKYLGLQFDPWIGIARSGLSTKLDFWLQRIDQAPLKPLQKTDILKTYTIPRLIYIADHSEVKSALLETLDQKIRTAVKEWLHLPPCTCDAILYSSTRDGGLGITKLAGLIPSVQARRLHRIAQSSDDTMKCFMEKEKMEQLHKKLWIQAGGDRENIPSIWEAPPSSEPPNNVSTNSEWEAPTQKDKFPKPCNWRKNEFKKWTKLASQGRGIVNFERDKISNHWIQYYRRIPHRKLLTALQLRANVYPTREFLARGRQDQYIKACRHCDADNESCAHIIGNCPVTQDARIKRHNYICELLLEEAKKKDWVVFKEPHIRDSNKELYKPDLIFVKDGRALVVDVTVRYEAAKSSLEEAAAEKVRKYKHLETEVRHLTNAKDVTFVGFPLGARGKWHQDNFKLLTELGLSKSRQVKMAETFSTVALFSSVDIVHMFASRARKSMVM

SEQ ID NO: 1810 - protein, 1657 aa, synthetic construct
MPKRKVSSAEGAAKEEPKRRSARLSAKPPAKVEAKPKKAAAKDKSSDKKVQTKGKRGAKGKQAEVANQETKEDLPAENGETKTEESPASDEAGEKEAKSDSGSETPGTSESATPESNISGSSCGSPNSADTSSDFKDLWTKLKECHDREVQGLQVKVTKLKQERILDAQRLEEFFTKNQQLREQQKVLHETIKVLEDRLRAGLCDRCAVTEEHMRKKQQEFENIRQQNLKLITELMNERNTLQEENKKLSEQLQQKIENDQQHQAAELECEEDVIPDSPITAFSFSGVNRLRRKENPHVRYIEQTHTKLEHSVCANEMRKVSKSSTHPQHNPNENEILVADTYDQSQSPMAKAHGTSSYTPDKSSFNLATVVAETLGLGVQEESETQGPMSPLGDELYHCLEGNHKKQPFESGSETPGTSESATPEGSYEQLAPQPCVGETLHSSLPRDSELFVPEEGSSEKESEDAPKTSPPTPGKHGLEQTGEEKVMVTVPDKNPPCPCCGTRVNSVLNLIEHLKVSHGKRGVCFRCAKCGKENSNYHSVVCHFKKCRGPETEKAPAGEWICEVCNRDFTTKIGLGQHKRLAHPAVRNQERIVASQPKETSNRGAHKRCWTKEEEELLIRLEAQFEGNKNINKLIAEHITTKTAKQISDKRRLLSRKPAEEPREEPGTCHHTRRAAASLRTEPEMSHHAQAEDRDNGPGRRPLPGRAAAGGRTMDEIRRHPDKGNGQQRPTKQKSEEQLQAYYKKTLEERLSAGALNTFPRAFKQVMEGRDIKLVINQTAQDYFGCLESISQIRTATRDKKDTVTREKHPKKPFQKWMKKRAIKKGNYLRFQRLFYLDRGKLAKIILDDIECLSCDIPLSEIYSVFKTRWETTGSFKSLGDFKTYGKADNTAFRELITAKEIEKNVQEMSKGSAPGPDGITLGDVVKMDPEFSRTMEIFNLWLTTGKIPDMVRGCRTVLIPKSSDPDRLKDINNWRPITIGSILLRLFSRIVTARLSKACPLNPRQRGFIRAAGCSENLKLLQTIIWSAKREHRPLGVVFVDIAKAFDTVSHQHIIHALQQREVDPHIVGLVSNMYENISTYITTKRNTHTDKIQIRVGVKQGDPMSPLLFNLAMDPLLCKLEESGKGYHRGQSSITAMAFADDLVLLSDSWENMNTNISILETFCNLTGLKTQGQKCHGFYIKPTKDSYTINDCAAWTINGTPLNMIDPGESEKYLGLQFDPWIGIARSGLSTKLDFWLQRIDQAPLKPLQKTDILKTYTIPRLIYIADHSEVKSALLETLDQKIRTAVKEWLHLPPCTCDAILYSSTRDGGLGITKLAGLIPSVQARRLHRIAQSSDDTMKCFMEKEKMEQLHKKLWIQAGGDRENIPSIWEAPPSSEPPNNVSTNSEWEAPTQKDKFPKPCNWRKNEFKKWTKLASQGRGIVNFERDKISNHWIQYYRRIPHRKLLTALQLRANVYPTREFLARGRQDQYIKACRHCDADNESCAHIIGNCPVTQDARIKRHNYICELLLEEAKKKDWVVFKEPHIRDSNKELYKPDLIFVKDGRALVVDVTVRYEAAKSSLEEAAAEKVRKYKHLETEVRHLTNAKDVTFVGFPLGARGKWHQDNFKLLTELGLSKSRQVKMAETFSTVALFSSVDIVHMFASRARKSMVM

SEQ ID NO: 1811 - protein, 1665 aa, synthetic construct
MAPKKKRKVNISGSSCGSPNSADTSSDFKDLWTKLKECHDREVQGLQVKVTKLKQERILDAQRLEEFFTKNQQLREQQKVLHETIKVLEDRLRAGLCDRCAVTEEHMRKKQQEFENIRQQNLKLITELMNERNTLQEENKKLSEQLQQKIENDQQHQAAELECEEDVIPDSPITAFSFSGVNRLRRKENPHVRYIEQTHTKLEHSVCANEMRKVSKSSTHPQHNPNENEILVADTYDQSQSPMAKAHGTSSYTPDKSSFNLATVVAETLGLGVQEESETQGPMSPLGDELYHCLEGNHKKQPFESGSETPGTSESATPEGSPKRKVSSAEGAAKEEPKRRSARLSAKPPAKVEAKPKKAAAKDKSSDKKVQTKGKRGAKGKQAEVANQETKEDLPAENGETKTEESPASDEAGEKEAKSDSGSETPGTSESATPESYEQLAPQPCVGETLHSSLPRDSELFVPEEGSSEKESEDAPKTSPPTPGKHGLEQTGEEKVMVTVPDKNPPCPCCGTRVNSVLNLIEHLKVSHGKRGVCFRCAKCGKENSNYHSVVCHFKKCRGPETEKAPAGEWICEVCNRDFTTKIGLGQHKRLAHPAVRNQERIVASQPKETSNRGAHKRCWTKEEEELLIRLEAQFEGNKNINKLIAEHITTKTAKQISDKRRLLSRKPAEEPREEPGTCHHTRRAAASLRTEPEMSHHAQAEDRDNGPGRRPLPGRAAAGGRTMDEIRRHPDKGNGQQRPTKQKSEEQLQAYYKKTLEERLSAGALNTFPRAFKQVMEGRDIKLVINQTAQDCFGCLESISQIRTATRDKKDTVTREKHPKKPFQKWMKKRAIKKGNYLRFQRLFYLDRGKLAKIILDDIECLSCDIPLSEIYSVFKTRWETTGSFKSLGDFKTYGKADNTAFRELITAKEIEKNVQEMSKGSAPGPDGITLGDVVKMDPEFSRTMEIFNLWLTTGKIPDMVRGCRTVLIPKSSKPDRLKDINNWRPITIGSILLRLFSRIVTARLSKACPLNPRQRGFIRAAGCSENLKLLQTIIWSAKREHRPLGVVFVDIAKAFDTVSHQHIIHALQQREVDPHIVGLVSNMYENISTYITTKRNTHTDKIQIRVGVKQGDPMSPLLFNLAMDPLLCKLEESGKGYHRGQSSITAMAFADDLVLLSDSWENMNTNISILETFCNLTGLKTQGQKCHGFYIKPTKDSYTINDCAAWTINGTPLNMIDPGESEKYLGLQFDPWIGIARSGLSTKLDFWLQRIDQAPLKPLQKLDILKTYTIPRLIYIADHSEVKSALLETLDQKIRTAVKEWLHLPPCTCDAILYSSTRDGGLGITKLAGLIPSVQARRLHRIAQSSDDTMKCFMEKEKMEQLHKKLWIQAGGDRENIPSIWEAPPSSEPPNNVSTNSEWEAPTQKDKFPKPCNWRKNEFKKWTKLASQGRGIVNFERDKISNHWIQYYRRIPHRKLLTALQLRANVYPTREFLARGRQDQYIKACRHCDADNESCAHIIGNCPVTQDARIKRHNYICELLLEEAKKKDWVVFKEPHIRDSNKELYKPDLIFVKDGRALVVDVTVRYEAAKSSLEEAAAEKVRKYKHLETEVRHLTNAKDVTFVGFPLGARGKWHQDNFKLLTELGLSKSRQVKMAETFSTVALFSSVDIVHMFASRARKSMVM

SEQ ID NO: 1812 - protein, 1665 aa, synthetic construct
MAPKKKRKVNISGSSCGSPNSADTSSDFKDLWTKLKECHDREVQGLQVKVTKLKQERILDAQRLEEFFTKNQQLREQQKVLHETIKVLEDRLRAGLCDRCAVTEEHMRKKQQEFENIRQQNLKLITELMNERNTLQEENKKLSEQLQQKIENDQQHQAAELECEEDVIPDSPITAFSFSGVNRLRRKENPHVRYIEQTHTKLEHSVCANEMRKVSKSSTHPQHNPNENEILVADTYDQSQSPMAKAHGTSSYTPDKSSFNLATVVAETLGLGVQEESETQGPMSPLGDELYHCLEGNHKKQPFESGSETPGTSESATPEGSPKRKVSSAEGAAKEEPKRRSARLSAKPPAKVEAKPKKAAAKDKSSDKKVQTKGKRGAKGKQAEVANQETKEDLPAENGETKTEESPASDEAGEKEAKSDSGSETPGTSESATPESYEQLAPQPCVGETLHSSLPRDSELFVPEEGSSEKESEDAPKTSPPTPGKHGLEQTGEEKVMVTVPDKNPPCPCCGTRVNSVLNLIEHLKVSHGKRGVCFRCAKCGKENSNYHSVVCHFKKCRGPETEKAPAGEWICEVCNRDFTTKIGLGQHKRLAHPAVRNQERIVASQPKETSNRGAHKRCWTKEEEELLIRLEAQFEGNKNINKLIAEHITTKTAKQISDKRRLLSRKPAEEPRMEPGTCHHTRRAAASLRTEPEMSHHAQAEDRDNGPGRRPLPGRAAAGGRTMDEIRRHPDKGNGQQRPTKQKSEEQLQAYYKKTLEERLSAGALNTFPRAFKQVMEGRDIKLVINQTAQDCFGCLESISQIRTATRDKKDTVTREKHPKKPFQKWMKKRAIKKGNYLRFQRLFYLDRGKLAKIILDDIECLSCDIPLSEIYSVFKTRWETTGSFKSLGDFKTYGKADNTAFRELITAKEIEKNVQEMSKGSAPGPDGITLGDVVKMDPEFSRTMEIFNLWLTTGKIPDMVRGCRTVLIPKSSKPDRLKDINNWRPITIGSILLRLFSRIVTARLSKACPLNPRQRGFIRAAGCSENLKLLQTIIWSAKREHRPLGVVFVDIAKAFDTVSHQHIIHALQQREVDPHIVGLVSNMYENISTYITTKRNTHTDKIQIRVGVKQGDPMSPLLFNLAMDPLLCKLEESGKGYHRGQSSITAMAFADDLVLLSDSWENMNTNISILETFCNLTGLKTQGQKCHGFYIKPTKDSYTINDCAAWTINGTPLNMIDPGESEKYLGLQFDPWIGIARSGLSTKLDFWLQRIDQAPLKPLQKTDILKTYTIPRLIYIADHSEVKSALLETLDQKIRTAVKEWLHLPPCTCDAILYSSTRDGGLGITKLAGLIPSVQARRLHRIAQSSDDTMKCFMEKEKMEQLHKKLWIQAGGDRENIPSIWEAPPSSEPPNNVSTNSEWEAPTQKDKFPKPCNWRKNEFKKWTKLASQGRGIVNFERDKISNHWIQYYRRIPHRKLLTALQLRANVYPTREFLARGRQDQYIKACRHCDADNESCAHIIGNCPVTQDARIKRHNYICELLLEEAKKKDWVVFKEPHIRDSNKELYKPDLIFVKDGRALVVDVTVRYEAAKSSLEEAAAEKVRKYKHLETEVRHLTNAKDVTFVGFPLGARGKWHQDNFKLLTELGLSKSRQVKMAETFSTVALFSSVDIVHMFASRARKSMVM

SEQ ID NO: 1813 - protein, 1665 aa, synthetic construct
MAPKKKRKVNISGSSCGSPNSADTSSDFKDLWTKLKECHDREVQGLQVKVTKLKQERILDAQRLEEFFTKNQQLREQQKVLHETIKVLEDRLRAGLCDRCAVTEEHMRKKQQEFENIRQQNLKLITELMNERNTLQEENKKLSEQLQQKIENDQQHQAAELECEEDVIPDSPITAFSFSGVNRLRRKENPHVRYIEQTHTKLEHSVCANEMRKVSKSSTHPQHNPNENEILVADTYDQSQSPMAKAHGTSSYTPDKSSFNLATVVAETLGLGVQEESETQGPMSPLGDELYHCLEGNHKKQPFESGSETPGTSESATPEGSPKRKVSSAEGAAKEEPKRRSARLSAKPPAKVEAKPKKAAAKDKSSDKKVQTKGKRGAKGKQAEVANQETKEDLPAENGETKTEESPASDEAGEKEAKSDSGSETPGTSESATPESYEQLAPQPCVGETLHSSLPRDSELFVPEEGSSEKESEDAPKTSPPTPGKHGLEQTGEEKVMVTVPDKNPPCPCCGTRVNSVLNLIEHLKVSHGKRGVCFRCAKCGKENSNYHSVVCHFKKCRGPETEKAPAGEWICEVCNRDFTTKIGLGQHKRLAHPAVRNQERIVASQPKETSNRGAHKRCWTKEEEELLIRLEAQFEGNKNINKLIAEHITTKTAKQISDKRRLLSRKPAEEPREEPGTCHHTRRAAASLRTEPEMSHHAQAEDRDNGPGRRPLPGRAAAGGRTMDEIRRHPDKGNGQQRPTKQKSEEQLQAYYKKTLEERLSAGALNTFPRAFKQVMEGRDIKLVINQTAQDYFGCLESISQIRTATRDKKDTVTREKHPKKPFQKWMKKRAIKKGNYLRFQRLFYLDRGKLAKIILDDIECLSCDIPLSEIYSVFKTRWETTGSFKSLGDFKTYGKADNTAFRELITAKEIEKNVQEMSKGSAPGPDGITLGDVVKMDPEFSRTMEIFNLWLTTGKIPDMVRGCRTVLIPKSSDPDRLKDINNWRPITIGSILLRLFSRIVTARLSKACPLNPRQRGFIRAAGCSENLKLLQTIIWSAKREHRPLGVVFVDIAKAFDTVSHQHIIHALQQREVDPHIVGLVSNMYENISTYITTKRNTHTDKIQIRVGVKQGDPMSPLLFNLAMDPLLCKLEESGKGYHRGQSSITAMAFADDLVLLSDSWENMNTNISILETFCNLTGLKTQGQKCHGFYIKPTKDSYTINDCAAWTINGTPLNMIDPGESEKYLGLQFDPWIGIARSGLSTKLDFWLQRIDQAPLKPLQKLDILKTYTIPRLIYIADHSEVKSALLETLDQKIRTAVKEWLHLPPCTCDAILYSSTRDGGLGITKLAGLIPSVQARRLHRIAQSSDDTMKCFMEKEKMEQLHKKLWIQAGGDRENIPSIWEAPPSSEPPNNVSTNSEWEAPTQKDKFPKPCNWRKNEFKKWTKLASQGRGIVNFERDKISNHWIQYYRRIPHRKLLTALQLRANVYPTREFLARGRQDQYIKACRHCDADNESCAHIIGNCPVTQDARIKRHNYICELLLEEAKKKDWVVFKEPHIRDSNKELYKPDLIFVKDGRALVVDVTVRYEAAKSSLEEAAAEKVRKYKHLETEVRHLTNAKDVTFVGFPLGARGKWHQDNFKLLTELGLSKSRQVKMAETFSTVALFSSVDIVHMFASRARKSMVM

SEQ ID NO: 1814 - protein, 1671 aa, synthetic construct
MGTALTPLLTKFATRYEMGTTPEEVANTLKQTCFKGQVNDSQMVALLIVADQYKLNPFTKELYAFPDKNNGIVPVVGVDGWARIINENPQFDGMEFSMDQQGTECTCKIYRKDRSHAISATEYMAECKRNTQPWQSHPRRMLRHKAMIQCARLAFGFAGIYDQDEAERIVERDVTPAEQYEDVSEAICLIKDSPTMEDLQAAFSNAWKAYKTKGARDQLTAAKDQRKKELLDAPIDVEFEETGDDRAASGGSSGGSSGSETPGTSESATPESSGGSSGGSSMASCPKPGPPVSAGAMSLESGLTTHSVLAIERGPNSLANSGSDFGGGGLGLPLRLLRVSVGTQTSRSDWVDLVSWSHPGPTSKSQQVDLVSLFPKHRVDLLSKNDQVDLVAQFLPSKFPPNLAENDLALLVNLEFYRSDLHVYECVHKAAHWEGLSGLPEVYEQLAPQPCVGETLHSSLPRDSELFVPEEGSSEKESEDAPKTSPPTPGKHGLEQTGEEKVMVTVPDKNPPCPCCGTRVNSVLNLIEHLKVSHGKRRVCFRCAKCGKENSNYHSVVCHFKKCRGPETEKAPAGEWICEVCNRDFTTKIGLGQHKRLAHPAVRNQERIVASQPKETSNRGAHKRCWTKEEEELLIRLEAQFEGHKNINKLIAEHITTKTAKQISDKRRLLSRKPAEEPREEPGTCHHTRRAAASLRTEPEMSHHAQAEDRDNGPGRRPLPGRAAAGGRTMDEIRRHPDKGNGQQRPTKQKSEEQLQAYYKKTLEERLSAGALNTFPRAFKQVMEGRDIKLVINQTAQDCFGCLESISQIRTATRDKKYTVTREKHPKRPFQKWMKKRAIKKGNYLRFQRLFYLDRGKLAKIILDDIECLSCDIPLSEIYSVFKTRWETTGSFKSLGDFKTYGKADNTAFRELITAKEIEKNVQEMSKGSAPGPDGITLGDVVKMDPEFSLTMEIFNLWLTTGKIPDMVRGCRTVLIPKSSKPDRLKDINNWRPITIGSILLRLFSRIVTARLSKACPLNPRQRGFIRAAGCSENLKLLQTIIWSAKREHRPLGVVFVDIAKAFDTVSHQHIIHALQQREVDPHIVGLVSNMYENISTYITTKRNTHTDKIQIRVGVKQGDPMSPLLFNLAMDPLLCKLEESGKGYHRGQSSITAMAFADDLVLLSDSWENMNTNISILETFCNLTGLKTQGQKCHGFYIKPTKDSYTINDCAAWTINGTPLNMIDPGESEKYLGLQFDPWIGIARSGLSTKLDEWLQRIDQAPLKPLQKTDILKTYTIPRLIYIADHSEVKAALLETLDQKIRTAVKEWLHLPPCTCDAILYSSTRDGGLGITKLAGLIPSVQARRLHRIAQSSDDTMKCFMEKERMEQLHKKLWIQAGGDRENIPSIWEAPPSSEPPNNVSTNSEWEAPTQKPKFPKPCNWRKNEFKKWTKLASQGRGIVNFERDKISNHWIQYYRRIPHRKLLTALQLRANVYPTREFLARGRQDQYIKACRHCDADIESCAHIIGNCPVTQDARIKRHNYICELLLEEAKKKDWVVFKEPHIRDSNKELYKPDLIFVKDGRALVVDVTVRYEAAKSSLEEAAAEKVRKYKHLETEVRHLTNAKDVTFVGFPLGARGKWHQDNFKLLTELGLSKSRQVKMAETFSTVALFSSVDIVHMFASRARKSMVM

SEQ ID NO: 1815 - protein, 1671 aa, synthetic construct
MGTALTPLLTKFATRYEMGTTPEEVANTLKQTCFKGQVNDSQMVALLIVADQYKLNPFTKELYAFPDKNNGIVPVVGVDGWARIINENPQFDGMEFSMDQQGTECTCKIYRKDRSHAISATEYMAECKRNTQPWQSHPRRMLRHKAMIQCARLAFGFAGIYDQDEAERIVERDVTPAEQYEDVSEAICLIKDSPTMEDLQAAFSNAWKAYKTKGARDQLTAAKDQRKKELLDAPIDVEFEETGDDRAASGGSSGGSSGSETPGTSESATPESSGGSSGGSSMASCPKPGPPVSAGAMSLESGLTTHSVLAIERGPNSLANSGSDFGGGGLGLPLRLLRVSVGTQTSRSDWVDLVSWSHPGPTSKSQQVDLVSLFPKHRVDLLSKNDQVDLVAQFLPSKFPPNLAENDLALLVNLEFYRSDLHVYECVHKAAHWEGLSGLPEVYEQLAPQPCVGETLHSSLPRDSELFVPEEGSSEKESEDAPKTSPPTPGKHGLEQTGEEKVMVTVPDKNPPCPCCGTRVNSVLNLIEHLKVSHGKRGVCFRCAKCGKENSNYHSVVCHFKKCRGPETEKAPAGEWICEVCNRDFTTKIGLGQHKRLAHPAVRNQERIVASQPKETSNRGAHKRCWTKEEEELLIRLEAQFEGHKNINKLIAEHITTKTAKQISDKRRLLSRKPAEEPREEPGTCHHTRRAAASLRTEPEMSHHAQAEDRDNGPGRRPLPGRAAAGGRTMDEIRRHPDKGNGQQRPTKQKSEEQLQAYYKKTLEERLSAGALNTFPRAFKQVMEGRDIKLVINQTAQDCFGCLESISQIRTATRDKKYTVTREKHPKRPFQKWMKKRAIKKGNYLRFQRLFYLDRGKLAKIILDDIECLSCDIPLSEIYSVFKTRWETTGSFKSLGDFKTYGKADNTAFRELITAKEIEKNVQEMSKGSAPGPDGITLGDVVKMDPEFSLTMEIFNLWLTTGKIPDMVRGCRTVLIPKSSKPDRLKDINNWRPITIGSILLRLFSRIVTARLSKACPLNPRQRGFIRAAGCSENLKLLQTIIWSAKREHRPLGVVFVDIAKAFDTVSHQHIIHALQQREVDPHIVGLVSNMYENISTYITTKRNTHTDKIQIRVGVKQGDPMSPLLFNLAMDPLLCKLEESGKGYHRGQSSITAMAFADDLVLLSDSWENMNTNISILETFCNLTGLKTQGQKCHGFYIKPTKDSYTINDCAAWTINGTPLNMIDPGESEKYLGLQFDPWIGIARSGLSTKLDEWLQRIDQAPLKPLQKTDILKTYTIPRLIYIADHSEVKAALLETLDQKIRTAVKEWLHLPPCTCDAILYSSTRDGGLGITKLAGLIPSVQARRLHRIAQSSDDTMKCFMEKERMEQLHKKLWIQAGGDRENIPSIWEAPPSSEPPNNVSTNSEWEAPTQKPKFPKPCNWRKNEFKKWTKLASQGRGIVNFERDKISNHWIQYYRRIPHRKLLTALQLRANVYPTREFLARGRQDQYIKACRHCDADIESCAHIIGNCPVTQDARIKRHNYICELLLEEAKKKDWVVFKEPHIRDSNKELYKPDLIFVKDGRALVVDVTVRYEAAKSSLEEAAAEKVRKYKHLETEVRHLTNAKDVTFVGFPLGARGKWHQDNFKLLTELGLSKSRQVKMAETFSTVALFSSVDIVHMFASRARKSMVM

SEQ ID NO: 1816 - protein, 1671 aa, synthetic construct
MGTALTPLLTKFATRYEMGTTPEEVANTLKQTCFKGQVNDSQMVALLIVADQYKLNPFTKELYAFPDKNNGIVPVVGVDGWARIINENPQFDGMEFSMDQQGTECTCKIYRKDRSHAISATEYMAECKRNTQPWQSHPRRMLRHKAMIQCARLAFGFAGIYDQDEAERIVERDVTPAEQYEDVSEAICLIKDSPTMEDLQAAFSNAWKAYKTKGARDQLTAAKDQRKKELLDAPIDVEFEETGDDRAASGGSSGGSSGSETPGTSESATPESSGGSSGGSSMASCPKPGPPVSAGAMSLESGLTTHSVLAIERGPNSLANSGSDFGGGGLGLPLRLLRVSVGTQTSRSDWVDLVSWSHPGPTSKSQQVDLVSLFPKHRVDLLSKNDQVDLVAQFLPSKFPPNLAENDLALLVNLEFYRSDLHVYECVHKAAHWEGLSGLPEVYEQLAPQPCVGETLHSSLPRDSELFVPEEGSSEKESEDAPKTSPPTPGKHGLEQTGEEKVMVTVPDKNPPCPCCGTRVNSVLNLIEHLKVSHGKRRVCFRCAKCGKENSNYHSVVCHFPKCRGPETEKAPAGEWICEVCNRDFTTKIGLGQHKRLAHPAVRNQERIVASQPKETSNRGAHKRCWTKEEEELLIRLEAQFEGHKNINKLIAEHITTKTAKQISDKRRLLSRKPAEEPRMEPGTCHHTRRAAASLRTEPEMSHQAQAEDRDNGPGRRPLPGRPAAGGRTMDEIRRHPDKGNGQQRPTKQKSEEQLQAYYKKTLEERLSAGALNTFPRAFKQVMEGRDIKLVINQTAQDCFGCLESISQIRTATRDKKYTGTREKHPKRPFQKWMKKRAIKKGNYLRFQRLFYLDRGKLAKIILDDIECLSCDIPLSEIYSVFKTRWETTGSFKSLGDFKTYGKADNTAFRELITAKEIEKNVQEMSKGSAPGPDGITLGDVVKMDPEFSLTMEIFNLWLTTGKIPDMVRGCRTVLIPKSSKPDRLKDINNWRPITIGSILLRLFSRIVTARLSKACPLNPRQRGFIRAAGCSENLKLLQTIIWSAKREHRPLGVVFVDIAKAFDTVSHQHIIHALQQREVDPHIVGLVSNMYENISTYITTKRNTHTDKIQIRVGVKQGDPMSPLLFNLAMDPLLCKLEESGKGYHRGQSSITAMAFADDLVLLSDSWENMNTNISILETFCNLTGLKTQGQKCHGFYIKPTKDSYTINDCAAWTINGTPLNMIDPGESEKYLGLQFDPWIGIARSGLSTKLDEWLQRIDQAPLKPLQKTDILKTYTIPRLIYIADHSEVKAALLETLDQKIRTAVKEWLHLPPCTCDAILYSSTRDGGLGITKLAGLIPSVQARRLHRIAQSSDDTMKCFMEKERMEQLHKKLWIQAGGDRENIPSIWEAPPSSEPPNNVSTNSEWEAPTQKPKFPKPCNWRKNEFKKWTKLASQGRGIVNFERDKISNHWIQYYRGIPHRKLLTALQLRANVYPTREFLARGRQDQYIKACRHCDADIESCAHIIGNCPVTQDARIKRHNYICELLLEEAKKKDWVVFKEPHIRDSNKELYKPDLIFVKDGRALVVDVTVRYEAAKSSLEEAAAEKVRKYKHLETEVRHLTNAKDVTFVGFPLGARGKWHQDNFKLLTELGLSKSRQVKMAETFSTVALFSSVDIVHMFASRARKSMVM

SEQ ID NO: 1817 - protein, 1390 aa, synthetic construct
MASCPKPGPPVSAGAMSLESGLTTHSVLAIERGPNSLANSGSDFGGGGLGLPLRLLRVSVGTQTSRSDWVDLVSWSHPGPTSKSQQVDLVSLFPKHRVDLLSKNDQVDLVAQFLPSKFPPNLAENDLALLVNLEFYRSDLHVYECVHKAAHWEGLSGLPEVYEQLAPQPCVGETLHSSLPRDSELFVPEEGSSEKESEDAPKTSPPTPGKHGLEQTGEEKVMVTVPDKNPPCPCCGTRVNSVLNLIEHLKVSHGKRRVCFRCAKCGKENSNYHSVVCHFKKCRGPETEKAPAGEWICEVCNRDFTTKIGLGQHKRLAHPAVRNQERIVASQPKETSNRGAHKRCWTKEEEELLIRLEAQFEGHKNINKLIAEHITTKTAKQISDKRRLLSRKPAEEPRMEPGTCHHTRRAAASLRTEPEMSHHAQAEDRDNGPGRRPLPGRPAAGGRTMDEIRRHPDKGNGQQRPTKQKSEEQLQAYYKKTLEERLSAGALNTFPRAFKQVMEGRDIKLVINQTAQDCFGCLESISQIRTATRDKKYTGTREKHPKRPFQKWMKKRAIKKGNYLRFQRLFYLDRGKLAKIILDDIECLSCDIPLSEIYSVFKTRWETTGSFKSLGDFKTYGKADNTAFRELITAKEIEKNVQEMSKGSAPGPDGITLGDVVKMDPEFSLTMEIFNLWLTTGKIPDMVRGCRTVLIPKSSKPDRLKDINNWRPITIGSILLRLFSRIVTARLSKACPLNPRQRGFIRAAGCSENLKLLQTIIWSAKREHRPLGVVFVDIAKAFDTVSHQHIIHALQQREVDPHIVGLVSNMYENISTYITTKRNTHTDKIQIRVGVKQGDPMSPLLFNLAMDPLLCKLEESGKGYHRGQSSITAMAFADDLVLLSDSWENMNTNISILETFCNLTGLKTQGQKCHGFYIKPTKDSYTINDCAAWTINGTPLNMIDPGESEKYLGLQFDPWIGIARSGLSTKLDEWLQRIDQAPLKPLQKTDILKTYTIPRLIYIADHSEVKAALLETLDQKIRTAVKEWLHLPPCTCDAILYSSTRDGGLGITKLAGLIPSVQARRLHRIAQSSDDTMKCFMEKERMEQLHKKLWIQAGGDRENIPSIWEAPPSSEPPNNVSTNSEWEAPTQKPKFPKPCNWRKNEFKKWTKLASQGRGIVNFERDKISNHWIQYYRRIPHRKLLTALQLRANVYPTREFLARGRQDQYIKACRHCDADIESCAHIIGNCPVTQDARIKRHNYICELLLEEAKKKDWVVFKEPHIRDSNKELYKPDLIFVKDGRALVVDVTVRYEAAKSSLEEAAAEKVRKYKHLETEVRHLTNAKDVTFVGFPLGARGKWHQDNFKLLTELGLSKSRQVKMAETFSTVALFSSVDIVHMFASRARKSMVM

SEQ ID NO: 1818 - protein, 1390 aa, synthetic construct
MASCPKPGPPVSAGAMSLESGLTTHSVLAIERGPNSLANSGSDFGGGGLGLPLRLLRVSVGTQTSRSDWVDLVSWSHPGPTSKSQQVDLVSLFPKHRVDLLSKNDQVDLVAQFLPSKFPPNLAENDLALLVNLEFYRSDLHVYEGVHKAAHWEGLSGLPEVYEQLAPQPCVGETLHSSLPRDSELFVPEEGSSEKESEDAPKTSPPTPGKHGLEQTGEEKVMVTVPDKNPPCPCCGTRVNSVLNLIEHLKVSHGKRGVCFRCAKCGKENSNYHSVVCHFKKCRGPETEKAPAGEWICEVCNRDFTTKIGLGQHKRRAHPAVRNQERIVASQPKETSNRGAHKRCWTKEEEELLIRLEAQFEGNKNINKLIAEHITTKTAKQISDKRRLLSRKPAEEPREMPGTCHHTRRAAASLRTEPEMSHHAQAEDRDNGPGRRPLPGRAAAGGRTMDEIRRHPDKGNGQQRPTKQKSEEQLQAYYKKTLEERLSAGALNTFPRAFKQVMEGRDIKLVINQTAQDYFGCLESISQIRTATRDKKDTVTRKKHPKKPFQKWMKKRAIKKGNYLRFQRLFHLDRGKLAKIILDDIECLSCDIPLSEIYSVFKTRWETTGSFKSLGDFKTYGKADNTAFRDLITAKEIEKNVQEMSKGSAPGPDGITLGDVVKMDPEGSRTAEIFNLWLTTGKIPDMVRGCRTVLIPKSSDPDRLKDINNWRPITIGSILLRLFSRIVTARLSKACPLNPRQRGFIRAAGCSENLKLLQTIIWSAKREHRPLGVVFVDIAKAFDTVSHQHIIHALQQREVDPHIVGLVSNMYENISTYITTKRNTHTDKIQIRVGVKQGDPMSPLLFNLAMDPLLCKLEESGKGYHRGQSSITAMAFADDLVLLSDSWEGMNTNISILETFCNLTGLKTQGQKCHGFYIKPTKKSYTINDCAAWTINGTPLNMIDPGESEKYLGLQFDPWIGIARSGLSTKLDFWLQRIDQAPLKPLQKLDILKTYTIPRLIYIADHSEVKTALLETLDQKIRTAVKEWLHLPPCTCDAILYSSTRDGGLGITKLAGLIPSVQARRLHRIAQSSDETMKCFMEKEKMEQLHKKLWIQAGGDRENIPSIWEAPPSSEPPNNVSTNSEWEAPTQKDKFPKPCNWRKNEFKKWTKLASQGRGIVNFERDKISNHWIQYYRRIPHRKLLTALQLRANVYPTREFLARGRQDQYIKACRHCDADIESCAHIIGNCPVTQDARIKRHNKICELLLEEAKKKDWVVFKEPHIRDSNKELYKPDLIFVKDARALVVDVTVRYEAAKSSLEEAAAEKVRKYKHLETEVRHLTNAKDVTFVGFPLGARGKWHQDNFKLLTELGLSKSRQVKMAETFSTVALFSSVDIVHMFASRARKSMVM

SEQ ID NO: 1819 - protein, 1390 aa, synthetic construct
MASCPKPGPPVSAGAMSLESGLTTHSVLAIERGPNSLANSGSDFGGGGLGLPLRLLRVSVGTQTSRSDWVDLVSWSHPGPTSKSQQVDLVSLFPKHRVDLLSKNDQVDLVAQFLPSKFPPNLAENDLALLVNLEFYRSDLHVYEGVHKAAHWEGLSGLPEVYEQLAPQPCVGETLHSSLPRDSELFVPEEGSSEKESEDAPKTSPPTPGKHGKRQTGEEKVMVTVPDKNPPCPCCGTRVNSVLNLIEHLKVSHGKRRVCFRCAKCGKENSNYHSVVCHFKKCRGPETEKAPAGEWICEVCNRDFTTKIGLGQHKRLAHPAVRNQERIVASQPKETSNRGAHKRCWTKEEEELLIRLEAQFEGNKNINKLIAEHITTKTAKQISDKRRLLSRKPAEEPREEPGTCHHTRRAAASLRTEPEMSHHAQAEDRDNGPGRRPLPGRAAAGGRTMDEIRRHPDKGNGQQRPTKQKSEEQLQAYYKKTLEERLSAGALNTFPRAFKQVMEGRDIKLVINQTAQDYFGCLESISQIRTATRDKKYTVTRKKHPKKPFQKWMKKRAIKKGNYLRFQRLFYLDRGKLAKIILDDIECLSCDIPLSEIYSVFKTRWETTGSFKSLGDFKTYGKADNTAFRDLITAKEIEKNVQEMSKGSAPGPDGITLGDVVKMDPEGSRTMEIFNLWLTTGKIPDMVRGCRTVLIPKSSDPDRLKDINNWRPITIGSILLRLFSRIVTARLSKACPLNPRQRGFIRAAGCSENLKLLQTIIWSAKREHRPLGVVFVDIAKAFDTVSHQHIIHALQQREVDPHIVGLVSNMYENISTYITTKRNTHTDKIQIRVGVKQGDPMSPLLFNLAMDPLLCKLEESGKGYHRGQSSITAMAFADDLVLLSDSWEGMNTNISILETFCNLTGLKTQGQKCHGFYIKPTKKSYTINDCAAWTINGTPLNMIDPGESEKYLGLQFDPWIGIARSGLSTKLDFWLQRIDQAPLKPLQKLDILKTYTIPRLIYIADHSEVKTALLETLDQKIRTAVKEWLHLPPCTCDAILYSSTRDGGLGITKLAGLIPSVQARRLHRIAQSSDDTMKCFMEKEKMEQLHKKLWIQAGGDRENIPSIWEAPPSSEPPNNVSTNSEWEAPTQKDKFPKPCNWRKNEFKKWTKLASQGRGIVNFERDKISNHWIQYYRRIPHRKLLTALQLRANVYPTREFLARGRQDQYIKACRHCDADIESCAHIIGNCPVTQDARIKRHNKICELLLEEAKKKDWVVFKEPHIRDSNKELYKPDLIFVKDGRALVVDVTVRYEAAKSSLEEAAAEKVRKYKHLETEVRHLTNAKDVTFVGFPLGARGKWHQDNFKLLTELGLSKSRQVKMAETFSTVALFSSVDIVHMFASRARKSMVM

SEQ ID NO: 1820 - protein, 1390 aa, synthetic construct
MASCPKPGPPVSAGAMSLESGLTTHSVLAIERGPNSLANSGSDFGGGGLGLPLRLLRVSVGTQTSRSDWVDLVSWSHPGPTSKSQQVDLVSLFPKHRVDLLSKNDQVDLVAQFLPSKFPPNLAENDLALLVNLEFYRSDLHVYECVHKAAHWEGLSGLPEVYEQLAPQPCVGETLHSSLPRDSELFVPEEGSSEKESEDAPKTSPPTPGKHGLEQTGEEKVMVTVPDKNPPCPCCGTRVNSVLNLIEHLKVSHGKRRVCFRCAKCGKENSNYHSVVCHFPKCRGPETEKAPAGEWICEVCNRDFTTKIGLGQHKRLAHPAVRNQERIVASQPKETSNRGAHKRCWTKEEEELLIRLEAQFEGHKNINKLIAEHITTKTAKQISDKRRLLSRKPAEEPREEPGTCHHTRRAAASLRTEPEMSHHAQAEDRDNGPGRRPLPGRPAAGGRTMDEIRRHPDKGNGQQRPTKQKSEEQLQAYYKKTLEERLSAGALNTFPRAFKQVMEGRDIKLVINQTAQDCFGCLESISQIRTATRDKKYTVTREKHPKRPFQKWMKDRAIKKGNYLRFQRLFYLDRGKLAKIILDDIECLSCDIPLSEIYSVFKTRWETTGSFKSLGDFKTYGKADNTAFRELITAKEIEKNVQEMSKGSAPGPDGITLGDVVKMDPEFSLTMEIFNLWLTTGKIPDMVRGCRTVLIPKSSKPDRLKDINNWRPITIGSILLRLFSRIVTARLSKACPLNPRQRGFIRAAGCSENLKLLQTIIWSAKREHRPLGVVFVDIAKAFDTVSHQHIIHALQQREVDPHIVGLVSNMYENISTYITTKRNTHTDKIQIRVGVKQGDPMSPLLFNLAMDPLLCKLEESGKGYHRGQSSITAMAFADDLVLLSDSWENMNTNISILETFCNLTGLKTQGQKCHGFYIKPTKDSYTINDCAAWTINGTPLNMIDPGESEKYLGLQFDPWIGIARSGLSTKLDEWLQRIDQAPLKPLQKTDILKTYTIPRLIYIADHSEVKAALLETLDQKIRTAVKEWLHLPPCTCDAILYSSTRDGGLGITKLAGLIPSVQARRLHRIAQSSDDTMKCFMEKERMEQLHKKLWIQAGGDRENIPSIWEAPPSSEPPNNVSTNSEWEAPTQKPKFPKPCNWRKNEFKKWTKLASQGRGIVNFERDKISNHWIQYYRRIPHRKLLTALQLRANVYPTREFLARGRQDQYIKACRHCDADIESCAHIIGNCPVTQDARIKRHNYICELLLEEAKKKDWVVFKEPHIRDSNKELYKPDLIFVKDGRALVVDVTVRYEAAKSSLEEAAAEKVRKYKHLETEVRHLTNAKDVTFVGFPLGARGKWHQDNFKLLTELGLSKSRQVKMAETFSTVALFSSVDIVHMFASRARKSMVM

SEQ ID NO: 1821 - protein, 1790 aa, synthetic construct
MAPKKKRKVNISGSSCGSPNSADTSSDFKDLWTKLKECHDREVQGLQVKVTKLKQERILDAQRLEEFFTKNQQLREQQKVLHETIKVLEDRLRAGLCDRCAVTEEHMRKKQQEFENIRQQNLKLITELMNERNTLQEENKKLSEQLQQKIENDQQHQAAELECEEDVIPDSPITAFSFSGVNRLRRKENPHVRYIEQTHTKLEHSVCANEMRKVSKSSTHPQHNPNENEILVADTYDQSQSPMAKAHGTSSYTPDKSSFNLATVVAETLGLGVQEESETQGPMSPLGDELYHCLEGNHKKQPFESGSETPGTSESATPEGSPKRKVSSAEGAAKEEPKRRSARLSAKPPAKVEAKPKKAAAKDKSSDKKVQTKGKRGAKGKQAEVANQETKEDLPAENGETKTEESPASDEAGEKEAKSDSGSETPGTSESATPESYEQLAPQPCVGETLHSSLPRDSELFVPEEGSSEKESEDAPKTSPPTPGKHGLEQTGEEKVMVTVPDKNPPCPCCGTRVNSVLNLIEHLKVSHGKRGVCFRCAKCGKENSNYHSVVCHFKKCRGPETEKAPAGEWICEVCNRDFTTKIGLGQHKRLAHPAVRNQERIVASQPKETSNRGAHKRCWTKEEEELLIRLEAQFEGNKNINKLIAEHITTKTAKQISDKRRLLSRKPAEEPREEPGTCHHTRRAAASLRTEPEMSHHAQAEDRDNGPGRRPLPGRAAAGGRTMDEIRRHPDKGNGQQRPTKQKSEEQLQAYYKKTLEERLSAGALNTFPRAFKQVMEGRDIKLVINQTAQDCFGCLESISQIRTATRDKKDTVTREKHPKKPFQKWMKKRAIKKGNYLRFQRLFYLDRGKLAKIILDDIECLSCDIPLSEIYSVFKTRWETTGSFKSLGDFKTYGKADNTAFRELITAKEIEKNVQEMSKGSAPGPDGITLGDVVKMDPEFSRTMEIFNLWLTTGKIPDMVRGCRTVLIPKSSKPDRLKDINNWRPITIGSILLRLFSRIVTARLSKACPLNPRQRGFIRAAGCSENLKLLQTIIWSAKREHRPLGVVFVDIAKAFDTVSHQHIIHALQQREVDPHIVGLVSNMYENISTYITTKRNTHTDKIQIRVGVKQGDPMSPLLFNLAMDPLLCKLEESGKGYHRGQSSITAMAFADDLVLLSDSWENMNTNISILETFCNLTGLKTQGQKCHGFYIKPTKDSYTINDCAAWTINGTPLNMIDPGESEKYLGLQFDPWIGIARSGLSTKLDFWLQRIDQAPLKPLQKTDILKTYTIPRLIYIADHSEVKSALLETLDQKIRTAVKEWLHLPPCTCDAILYSSTRDGGLGITKLAGLIPSVQARRLHRIAQSSDDTMKCFMEKEKMEQLHKKLWIQAGGDRENIPSIWEAPPSSEPPNNVSTNSEWEAPTQKDKFPKPCNWRKNEFKKWTKLASQGRGIVNFERDKISNHWIQYYRRIPHRKLLTALQLRANVYPTREFLARGRQDQYIKACRHCDADNESCAHIIGNCPVTQDARIKRHNYICELLLEEAKKKDWVVFKEPHIRDSNKELYKPDLIFVKDGRALVVDVTVRYEAAKSSLEEAAAEKVRKYKHLETEVRHLTNAKDVTFVGFPLGARGKWHQDNFKLLTELGLSKSRQVKMAETFSTVALFSSVDIVHMFASRARKSMVMSGSETPGTSESATPEGSAASLNGAPLIKDPMLIFVKTLTGKTITLEVEPSDTIENVKAKIQDKEGIPPDQQRLAFAGKSLEDGRTLSDYNILKDSKLHPLLRLRGGSGKRTADGSEFEPKKKRKV

SEQ ID NO: 1822 - protein, 1390 aa, synthetic construct
MASCPKPGPPVSAGAMSLESGLTTHSVLAIERGPNSLANSGSDFGGGGLGLPLRLLRVSVGTQTSRSDWVDLVSWSHPGPTSKSQQVDLVSLFPKHRVDLLSKNDQVDLVAQFLPSKFPPNLAENDLALLVNLEFYRSDLHVYEGVHKAAHWEGLSGLPEVYEQLAPQPCVGETLHSSLPRDSELFVPEEGSSEKESEDAPKTSPPTPGKHGKRQTGEEKVMVTVPDKNPPCPCCGTRVNSVLNLIEHLKVSHGKRGVCFRCAKCGKENSNYHSVVCHFKKCRGPETEKAPAGEWICEVCNRDFTTKIGLGQHKRRAHPAVRNQERIVASQPKETSNRGAHKRCWTKEERELLIRLEAQFEGNKNINKLIAEHITTKTAKQISDKRRLLSRKPAEEPREMPGTCHHTRRAAASLRTEPEMSHHAQAEDRDNGPGRRPLPGRAAAGGRTMDEIRRHPDKGNGQQRPTKQKSEEQLQAYYKKTLEERLSAGALNTFPRAFKQVMEGRDIKLVINQTAQDYFGCLESISQIRTATRDKKDTVTRKKHPKKPFQKWMKKRAIKKGNYLRFQRLFHLDRGKLAKIILDDIECLSCDIPLSEIYSVFKTRWETTGSFKSLGDFKTYGKADNTAFRDLITAKEIEKNVQEMSKGSAPGPDGITLGDVVKMDPEGSRTAEIFNLWLTTGKIPDMVRGCRTVLIPKSSDPDRLKDINNWRPITIGSILLRLFSRIVTARLSKACPLNPRQRGFIRAAGCSENLKLLQTIIWSAKREHRPLGVVFVDIAKAFDTVSHQHIIHALQQREVDPHIVGLVSNMYENISTYITTKRNTHTDKIQIRVGVKQGDPMSPLLFNLAMDPLLCKLEESGKGYHRGQSSITAMAFADDLVLLSDSWEGMNTNISILETFCNLTGLKTQGQKCHGFYIKPTKKSYTINDCAAWTINGTPLNMIDPGESEKYLGLQFDPWIGIARSGLSTKLDFWLQRIDQAPLKPLQKLDILKTYTIPRLIYIADHSEVKTALLELLDQKIRTAVKEWLHLPPCTCDAILYSSTRDGGLGITKLAGLIPSVQARRLHRIAQSSDETMKCFMEKEKMEQLHKKLWIQAGGDRENIPSIWEAPPSSEPPNNVSTNSEWEAPTQKDKFPKPCNWRKNEFKKWTKLASQGRGIVNFERDKISNHWIQYYRRIPHRKLLTALQLRANVYPTREFLARGRQDQYIKACRHCDADIESCAHIIGNCPVTQDARIKRHNKICELLLEEAKKKDWVVFKEPHIRDSNKELYKPDLIFVKDARALVVDVTVRYEAAKSSLEEAAAEKVRKYKHLETEVRHLTNAKDVTFVGFPLGARGKWHQDNFKLLTELGLSKSRQVKMAETFSTVALFSSVDIVHMFASRARKSMVM

SEQ ID NO: 1823 - protein, 1390 aa, synthetic construct
MASCPKPGPPVSAGAMSLESGLTTHSVLAIERGPNSLANSGSDFGGGGLGLPLRLLRVSVGTQTSRSDWVDLVSWSHPGPTSKSQQVDLVSLFPKHRVDLLSKNDQVDLVAQFLPSKFPPNLAENDLALLVNLEFYRSDLHVYEGVHKAAHWEGLSGLPEVYEQLAPQPCVGETLHSSLPRDSELFVPEEGSSEKESEDAPKTSPPTPGKHGKRQTGEEKVMVTVPDKNPPCPCCGTRVNSVLNLIEHLKVSHGKRRVCFRCAKCGKENSNYHSVVCHFKKCRGPETEKAPAGEWICEVCNRDFTTKIGLGQHKRRAHPAVRNQERIVASQPKETSNRGAHKRCWTKEEEELLIRLEAQFEGNKNINKLIAEHITTKTAKQISDKRRLLSRKPAEEPREMPGTCHHTRRAAASLRTEPEMSHHAQAEDRDNGPGRRPLPGRAAAGGRTMDEIRRHPDKGNGQQRPTKQKSEEQLQAYYKKTLEERLSAGALNTFPRAFKQVMEGRDIKLVINQTAQDYFGCLESISQIRTATRDKKYTVTRKKHPKKPFQKWMKKRAIKKGNYLRFQRLFYLDRGKLAKIILDDIECLSCDIPLSEIYSVFKTRWETTGSFKSLGDFKTYGKADNTAFRDLITAKEIEKNVQEMSKGSAPGPDGITLGDVVKMDPEGSRTMEIFNLWLTTGKIPDMVRGCRTVLIPKSSDPDRLKDINNWRPITIGSILLRLFSRIVTARLSKACPLNPRQRGFIRAAGCSENLKLLQTIIWSAKREHRPLGVVFVDIAKAFDTVSHQHIIHALQQREVDPHIVGLVSNMYENISTYITTKRNTHTDKIQIRVGVKQGDPMSPLLFNLAMDPLLCKLEESGKGYHRGQSSITAMAFADDLVLLSDSWEGMNTNISILETFCNLTGLKTQGQKCHGFYIKPTKKSYTINDCAAWTINGTPLNMIDPGESEKYLGLQFDPWIGIARSGLSTKLDFWLQRIDQAPLKPLQKLDILKTYTIPRLIYIADHSEVKTALLETLDQKIRTAVKEWLHLPPCTCDAILYSSTRDGGLGITKLAGLIPSVQARRLHRIAQSSDDTMKCFMEKEKMEQLHKKLWIQAGGDRENIPSIWEAPPSSEPPNNVSTNSEWEAPTQKDKFPKPCNWRKNEFKKWTKLASQGRGIVNFERDKISNHWIQYYRRIPHRKLLTALQLRANVYPTREFLARGRQDQYIKACRHCDADIESCAHIIGNCPVTQDARIKRHNKICELLLEEAKKKDWVVFKEPHIRDSNKELYKPDLIFVKDGRALVVDVTVRYEAAKSSLEEAAAEKVRKYKHLETEVRHLTNAKDVTFVGFPLGARGKWHQDNFKLLTELGLSKSRQVKMAETFSTVALFSSVDIVHMFASRARKSMVM

SEQ ID NO: 1824 - protein, 1390 aa, synthetic construct
MASCPKPGPPVSAGAMSLESGLTTHSVLAIERGPNSLANSGSDFGGGGLGLPLRLLRVSVGTQTSRSDWVDLVSWSHPGPTSKSQQVDLVSLFPKHRVDLLSKNDQVDLVAQFLPSKFPPNLAENDLALLVNLEFYRSDLHVYECVHKAAHWEGLSGLPEVYEQLAPQPCVGETLHSSLPRDSELFVPEEGSSEKESEDAPKTSPPTPGKHGLEQTGEEKVMVTVPDKNPPCPCCGTRVNSVLNLIEHLKVSHGKRRVCFRCAKCGKENSNYHSVVCHFPKCRGPETEKAPAGEWICEVCNRDFTTKIGLGQHKRLAHPAVRNQERIVASQPKETSNRGAHKRCWTKEEEELLIRLEAQFEGHKNINKLIAEHITTKTAKQISDKRRLLSRKPAEEPRMEPGTCHHTRRAAASLRTEPEMSHQAQAEDRDNGPGRRPLPGRPAAGGRTMDEIRRHPDKGNGQQRPTKQKSEEQLQAYYKKTLEERLSAGALNTFPRAFKQVMEGRDIKLVINQTAQDCFGCLESISQIRTATRDKKYTGTREKHPKRPFQKWMKKRAIKKGNYLRFQRLFYLDRGKLAKIILDDIECLSCDIPLSEIYSVFKTRWETTGSFKSLGDFKTYGKADNTAFRELITAKEIEKNVQEMSKGSAPGPDGITLGDVVKMDPEFSLTMEIFNLWLTTGKIPDMVRGCRTVLIPKSSKPDRLKDINNWRPITIGSILLRLFSRIVTARLSKACPLNPRQRGFIRAAGCSENLKLLQTIIWSAKREHRPLGVVFVDIAKAFDTVSHQHIIHALQQREVDPHIVGLVSNMYENISTYITTKRNTHTDKIQIRVGVKQGDPMSPLLFNLAMDPLLCKLEESGKGYHRGQSSITAMAFADDLVLLSDSWENMNTNISILETFCNLTGLKTQGQKCHGFYIKPTKDSYTINDCAAWTINGTPLNMIDPGESEKYLGLQFDPWIGIARSGLSTKLDEWLQRIDQAPLKPLQKTDILKTYTIPRLIYIADHSEVKAALLETLDQKIRTAVKEWLHLPPCTCDAILYSSTRDGGLGITKLAGLIPSVQARRLHRIAQSSDDTMKCFMEKERMEQLHKKLWIQAGGDRENIPSIWEAPPSSEPPNNVSTNSEWEAPTQKPKFPKPCNWRKNEFKKWTKLASQGRGIVNFERDKISNHWIQYYRGIPHRKLLTALQLRANVYPTREFLARGRQDQYIKACRHCDADIESCAHIIGNCPVTQDARIKRHNYICELLLEEAKKKDWVVFKEPHIRDSNKELYKPDLIFVKDGRALVVDVTVRYEAAKSSLEEAAAEKVRKYKHLETEVRHLTNAKDVTFVGFPLGARGKWHQDNFKLLTELGLSKSRQVKMAETFSTVALFSSVDIVHMFASRARKSMVM

SEQ ID NO: 1825 - protein, 1390 aa, synthetic construct
MASCPKPGPPVSAGAMSLESGLTTHSVLAIERGPNSLANSGSDFGGGGLGLPLRLLRVSVGTQTSRSDWVDLVSWSHPGPTSKSQQVDLVSLFPKHRVDLLSKNDQVDLVAQFLPSKFPPNLAENDLALLVNLEFYRSDLHVYECVHKAAHWEGLSGLPEVYEQLAPQPCVGETLHSSLPRDSELFVPEEGSSEKESEDAPKTSPPTPGKHGLEQTGEEKVMVTVPDKNPPCPCCGTRVNSVLNLIEHLKVSHGKRRVCFRCAKCGKENSNYHSVVCHFKKCRGPETEKAPAGEWICEVCNRDFTTKIGLGQHKRLAHPAVRNQERIVASQPKETSNRGAHKRCWTKEEEELLIRLEAQFEGHKNINKLIAEHITTKTAKQISDKRRLLSRKPAEEPRMEPGTCHHTRRAAASLRTEPEMSHQAQAEDRDNGPGRRPLPGRPAAGGRTMDEIRRHPDKGNGQQRPTKQKSEEQLQAYYKKTLEERLSAGALNTFPRAFKQVMEGRDIKLVINQTAQDCFGCLESISQIRTATRDKKYTGTREKHPKRPFQKWMKKRAIKKGNYLRFQRLFYLDRGKLAKIILDDIECLSCDIPLSEIYSVFKTRWETTGSFKSLGDFKTYGKADNTAFRELITAKEIEKNVQEMSKGSAPGPDGITLGDVVKMDPEFSLTMEIFNLWLTTGKIPDMVRGCRTVLIPKSSKPDRLKDINNWRPITIGSILLRLFSRIVTARLSKACPLNPRQRGFIRAAGCSENLKLLQTIIWSAKREHRPLGVVFVDIAKAFDTVSHQHIIHALQQREVDPHIVGLVSNMYENISTYITTKRNTHTDKIQIRVGVKQGDPMSPLLFNLAMDPLLCKLEESGKGYHRGQSSITAMAFADDLVLLSDSWENMNTNISILETFCNLTGLKTQGQKCHGFYIKPTKDSYTINDCAAWTINGTPLNMIDPGESEKYLGLQFDPWIGIARSGLSTKLDEWLQRIDQAPLKPLQKTDILKTYTIPRLIYIADHSEVKAALLETLDQKIRTAVKEWLHLPPCTCDAILYSSTRDGGLGITKLAGLIPSVQARRLHRIAQSSDDTMKCFMEKERMEQLHKKLWIQAGGDRENIPSIWEAPPSSEPPNNVSTNSEWEAPTQKPKFPKPCNWRKNEFKKWTKLASQGRGIVNFERDKISNHWIQYYRGIPHRKLLTALQLRANVYPTREFLARGRQDQYIKACRHCDADIESCAHIIGNCPVTQDARIKRHNYICELLLEEAKKKDWVVFKEPHIRDSNKELYKPDLIFVKDGRALVVDVTVRYEAAKSSLEEAAAEKVRKYKHLETEVRHLTNAKDVTFVGFPLGARGKWHQDNFKLLTELGLSKSRQVKMAETFSTVALFSSVDIVHMFASRARKSMVM

SEQ ID NO: 1826 - protein, 1671 aa, synthetic construct
MGTALTPLLTKFATRYEMGTTPEEVANTLKQTCFKGQVNDSQMVALLIVADQYKLNPFTKELYAFPDKNNGIVPVVGVDGWARIINENPQFDGMEFSMDQQGTECTCKIYRKDRSHAISATEYMAECKRNTQPWQSHPRRMLRHKAMIQCARLAFGFAGIYDQDEAERIVERDVTPAEQYEDVSEAICLIKDSPTMEDLQAAFSNAWKAYKTKGARDQLTAAKDQRKKELLDAPIDVEFEETGDDRAASGGSSGGSSGSETPGTSESATPESSGGSSGGSSMASCPKPGPPVSAGAMSLESGLTTHSVLAIERGPNSLANSGSDFGGGGLGLPLRLLRVSVGTQTSRSDWVDLVSWSHPGPTSKSQQVDLVSLFPKHRVDLLSKNDQVDLVAQFLPSKFPPNLAENDLALLVNLEFYRSDLHVYECVHKAAHWEGLSGLPEVYEQLAPQPCVGETLHSSLPRDSELFVPEEGSSEKESEDAPKTSPPTPGKHGLEQTGEEKVMVTVPDKNPPCPCCGTRVNSVLNLIEHLKVSHGKRRVCFRCAKCGKENSNYHSVVCHFKKCRGPETEKAPAGEWICEVCNRDFTTKIGLGQHKRLAHPAVRNQERIVASQPKETSNRGAHKRCWTKEEEELLIRLEAQFEGHKNINKLIAEHITTKTAKQISDKRRLLSRKPAEEPRMEPGTCHHTRRAAASLRTEPEMSHHAQAEDRDNGPGRRPLPGRPAAGGRTMDEIRRHPDKGNGQQRPTKQKSEEQLQAYYKKTLEERLSAGALNTFPRAFKQVMEGRDIKLVINQTAQDCFGCLESISQIRTATRDKKYTVTREKHPKRPFQKWMKKRAIKKGNYLRFQRLFYLDRGKLAKIILDDIECLSCDIPLSEIYSVFKTRWETTGSFKSLGDFKTYGKADNTAFRELITAKEIEKNVQEMSKGSAPGPDGITLGDVVKMDPEFSLTMEIFNLWLTTGKIPDMVRGCRTVLIPKSSKPDRLKDINNWRPITIGSILLRLFSRIVTARLSKACPLNPRQRGFIRAAGCSENLKLLQTIIWSAKREHRPLGVVFVDIAKAFDTVSHQHIIHALQQREVDPHIVGLVSNMYENISTYITTKRNTHTDKIQIRVGVKQGDPMSPLLFNLAMDPLLCKLEESGKGYHRGQSSITAMAFADDLVLLSDSWENMNTNISILETFCNLTGLKTQGQKCHGFYIKPTKDSYTINDCAAWTINGTPLNMIDPGESEKYLGLQFDPWIGIARSGLSTKLDEWLQRIDQAPLKPLQKTDILKTYTIPRLIYIADHSEVKAALLETLDQKIRTAVKEWLHLPPCTCDAILYSSTRDGGLGITKLAGLIPSVQARRLHRIAQSSDDTMKCFMEKERMEQLHKKLWIQAGGDRENIPSIWEAPPSSEPPNNVSTNSEWEAPTQKPKFPKPCNWRKNEFKKWTKLASQGRGIVNFERDKISNHWIQYYRRIPHRKLLTALQLRANVYPTREFLARGRQDQYIKACRHCDADIESCAHIIGNCPVTQDARIKRHNYICELLLEEAKKKDWVVFKEPHIRDSNKELYKPDLIFVKDGRALVVDVTVRYEAAKSSLEEAAAEKVRKYKHLETEVRHLTNAKDVTFVGFPLGARGKWHQDNFKLLTELGLSKSRQVKMAETFSTVALFSSVDIVHMFASRARKSMVM

SEQ ID NO: 1827 - protein, 1390 aa, synthetic construct
MASCPKPGPPVSAGAMSLESGLTTHSVLAIERGPNSLANSGSDFGGGGLGLPLRLLRVSVGTQTSRSDWVDLVSWSHPGPTSKSQQVDLVSLFPKHRVDLLSKNDQVDLVAQFLPSKFPPNLAENDLALLVNLEFYRSDLHVYECVHKAAHWEGLSGLPEVYEQLAPQPCVGETLHSSLPRDSELFVPEEGSSEKESEDAPKTSPPTPGKHGLEQTGEEKVMVTVPDKNPPCPCCGTRVNSVLNLIEHLKVSHGKRRVCFRCAKCGKENSNYHSVVCHFKKCRGPETEKAPAGEWICEVCNRDFTTKIGLGQHKRLAHPAVRNQERIVASQPKETSNRGAHKRCWTKEEEELLIRLEAQFEGNKNINKLIAEHITTKTAKQISDKRRLLSRKPAEEPREEPGTCHHTRRAAASLRTEPEMSHHAQAEDRDNGPGRRPLPGRAAAGGRTMDEIRRHPDKGNGQQRPTKQKSEEQLQAYYKKTLEERLSAGALNTFPRAFKQVMEGRDIKLVINQTAQDCFGCLESISQIRTATRDKKDTVTREKHPKKPFQKWMKKRAIKKGNYLRFQRLFYLDRGKLAKIILDDIECLSCDIPLSEIYSVFKTRWETTGSFKSLGDFKTYGKADNTAFRELITAKEIEKNVQEMSKGSAPGPDGITLGDVVKMDPEFSRTMEIFNLWLTTGKIPDMVRGCRTVLIPKSSKPDRLKDINNWRPITIGSILLRLFSRIVTARLSKACPLNPRQRGFIRAAGCSENLKLLQTIIWSAKREHRPLGVVFVDIAKAFDTVSHQHIIHALQQREVDPHIVGLVSNMYENISTYITTKRNTHTDKIQIRVGVKQGDPMSPLLFNLAMDPLLCKLEESGKGYHRGQSSITAMAFADDLVLLSDSWENMNTNISILETFCNLTGLKTQGQKCHGFYIKPTKDSYTINDCAAWTINGTPLNMIDPGESEKYLGLQFDPWIGIARSGLSTKLDFWLQRIDQAPLKPLQKTDILKTYTIPRLIYIADHSEVKSALLETLDQKIRTAVKEWLHLPPCTCDAILYSSTRDGGLGITKLAGLIPSVQARRLHRIAQSSDDTMKCFMEKEKMEQLHKKLWIQAGGDRENIPSIWEAPPSSEPPNNVSTNSEWEAPTQKDKFPKPCNWRKNEFKKWTKLASQGRGIVNFERDKISNHWIQYYRRIPHRKLLTALQLRANVYPTREFLARGRQDQYIKACRHCDADNESCAHIIGNCPVTQDARIKRHNYICELLLEEAKKKDWVVFKEPHIRDSNKELYKPDLIFVKDGRALVVDVTVRYEAAKSSLEEAAAEKVRKYKHLETEVRHLTNAKDVTFVGFPLGARGKWHQDNFKLLTELGLSKSRQVKMAETFSTVALFSSVDIVHMFASRARKSMVM

SEQ ID NO: 1828 - protein, 1625 aa, synthetic construct
MAPKKKRKVNISGSSCGSPNSADTSSDFKDLWTKLKECHDREVQGLQVKVTKLKQERILDAQRLEEFFTKNQQLREQQKVLHETIKVLEDRLRAGLCDRCAVTEEHMRKKQQEFENIRQQNLKLITELMNERNTLQEENKKLSEQLQQKIENDQQHQAAELECEEDVIPDSPITAFSFSGVNRLRRKENPHVRYIEQTHTKLEHSVCANEMRKVSKSSTHPQHNPNENEILVADTYDQSQSPMAKAHGTSSYTPDKSSFNLATVVAETLGLGVQEESETQGPMSPLGDELYHCLEGNHKKQPFESGSETPGTSESATPEGSVTVKFKYKGEEKEVDISKIKKVWRVGKMISFTYDDNGKTGRGAVSEKDAPKELLQMLEKSGSETPGTSESATPESYEQLAPQPCVGETLHSSLPRDSELFVPEEGSSEKESEDAPKTSPPTPGKHGLEQTGEEKVMVTVPDKNPPCPCCGTRVNSVLNLIEHLKVSHGKRGVCFRCAKCGKENSNYHSVVCHFKKCRGPETEKAPAGEWICEVCNRDFTTKIGLGQHKRLAHPAVRNQERIVASQPKETSNRGAHKRCWTKEEEELLIRLEAQFEGNKNINKLIAEHITTKTAKQISDKRRLLSRKPAEEPREEPGTCHHTRRAAASLRTEPEMSHHAQAEDRDNGPGRRPLPGRAAAGGRTMDEIRRHPDKGNGQQRPTKQKSEEQLQAYYKKTLEERLSAGALNTFPRAFKQVMEGRDIKLVINQTAQDYFGCLESISQIRTATRDKKDTVTREKHPKKPFQKWMKKRAIKKGNYLRFQRLFYLDRGKLAKIILDDIECLSCDIPLSEIYSVFKTRWETTGSFKSLGDFKTYGKADNTAFRELITAKEIEKNVQEMSKGSAPGPDGITLGDVVKMDPEFSRTMEIFNLWLTTGKIPDMVRGCRTVLIPKSSDPDRLKDINNWRPITIGSILLRLFSRIVTARLSKACPLNPRQRGFIRAAGCSENLKLLQTIIWSAKREHRPLGVVFVDIAKAFDTVSHQHIIHALQQREVDPHIVGLVSNMYENISTYITTKRNTHTDKIQIRVGVKQGDPMSPLLFNLAMDPLLCKLEESGKGYHRGQSSITAMAFADDLVLLSDSWENMNTNISILETFCNLTGLKTQGQKCHGFYIKPTKDSYTINDCAAWTINGTPLNMIDPGESEKYLGLQFDPWIGIARSGLSTKLDFWLQRIDQAPLKPLQKTDILKTYTIPRLIYIADHSEVKSALLETLDQKIRTAVKEWLHLPPCTCDAILYSSTRDGGLGITKLAGLIPSVQARRLHRIAQSSDDTMKCFMEKEKMEQLHKKLWIQAGGDRENIPSIWEAPPSSEPPNNVSTNSEWEAPTQKDKFPKPCNWRKNEFKKWTKLASQGRGIVNFERDKISNHWIQYYRRIPHRKLLTALQLRANVYPTREFLARGRQDQYIKACRHCDADNESCAHIIGNCPVTQDARIKRHNYICELLLEEAKKKDWVVFKEPHIRDSNKELYKPDLIFVKDGRALVVDVTVRYEAAKSSLEEAAAEKVRKYKHLETEVRHLTNAKDVTFVGFPLGARGKWHQDNFKLLTELGLSKSRQVKMAETFSTVALFSSVDIVHMFASRARKSMVM

SEQ ID NO: 1829 - protein, 1625 aa, synthetic construct
MAPKKKRKVNISGSSCGSPNSADTSSDFKDLWTKLKECHDREVQGLQVKVTKLKQERILDAQRLEEFFTKNQQLREQQKVLHETIKVLEDRLRAGLCDRCAVTEEHMRKKQQEFENIRQQNLKLITELMNERNTLQEENKKLSEQLQQKIENDQQHQAAELECEEDVIPDSPITAFSFSGVNRLRRKENPHVRYIEQTHTKLEHSVCANEMRKVSKSSTHPQHNPNENEILVADTYDQSQSPMAKAHGTSSYTPDKSSFNLATVVAETLGLGVQEESETQGPMSPLGDELYHCLEGNHKKQPFESGSETPGTSESATPEGSVTVKFKYKGEEKEVDISKIKKVWRVGKMISFTYDDNGKTGRGAVSEKDAPKELLQMLEKSGSETPGTSESATPESYEQLAPQPCVGETLHSSLPRDSELFVPEEGSSEKESEDAPKTSPPTPGKHGLEQTGEEKVMVTVPDKNPPCPCCGTRVNSVLNLIEHLKVSHGKRGVCFRCAKCGKENSNYHSVVCHFKKCRGPETEKAPAGEWICEVCNRDFTTKIGLGQHKRLAHPAVRNQERIVASQPKETSNRGAHKRCWTKEEEELLIRLEAQFEGNKNINKLIAEHITTKTAKQISDKRRLLSRKPAEEPREEPGTCHHTRRAAASLRTEPEMSHHAQAEDRDNGPGRRPLPGRAAAGGRTMDEIRRHPDKGNGQQRPTKQKSEEQLQAYYKKTLEERLSAGALNTFPRAFKQVMEGRDIKLVINQTAQDYFGCLESISQIRTATRDKKDTVTREKHPKKPFQKWMKKRAIKKGNYLRFQRLFYLDRGKLAKIILDDIECLSCDIPLSEIYSVFKTRWETTGSFKSLGDFKTYGKADNTAFRELITAKEIEKNVQEMSKGSAPGPDGITLGDVVKMDPEFSRTMEIFNLWLTTGKIPDMVRGCRTVLIPKSSDPDRLKDINNWRPITIGSILLRLFSRIVTARLSKACPLNPRQRGFIRAAGCSENLKLLQTIIWSAKREHRPLGVVFVDIAKAFDTVSHQHIIHALQQREVDPHIVGLVSNMYENISTYITTKRNTHTDKIQIRVGVKQGDPMSPLLFNLAMDPLLCKLEESGKGYHRGQSSITAMAFADDLVLLSDSWENMNTNISILETFCNLTGLKTQGQKCHGFYIKPTKDSYTINDCAAWTINGTPLNMIDPGESEKYLGLQFDPWIGIARSGLSTKLDFWLQRIDQAPLKPLQKLDILKTYTIPRLIYIADHSEVKSALLETLDQKIRTAVKEWLHLPPCTCDAILYSSTRDGGLGITKLAGLIPSVQARRLHRIAQSSDDTMKCFMEKEKMEQLHKKLWIQAGGDRENIPSIWEAPPSSEPPNNVSTNSEWEAPTQKDKFPKPCNWRKNEFKKWTKLASQGRGIVNFERDKISNHWIQYYRRIPHRKLLTALQLRANVYPTREFLARGRQDQYIKACRHCDADNESCAHIIGNCPVTQDARIKRHNYICELLLEEAKKKDWVVFKEPHIRDSNKELYKPDLIFVKDGRALVVDVTVRYEAAKSSLEEAAAEKVRKYKHLETEVRHLTNAKDVTFVGFPLGARGKWHQDNFKLLTELGLSKSRQVKMAETFSTVALFSSVDIVHMFASRARKSMVM

SEQ ID NO: 1830 - protein, 1792 aa, synthetic construct
MAPKKKRKVTDPRETVPPGNSGEETIGEAFAWLNRTVEAINREAVNHLPRELIFQVWQRSWRYWHDEQGMSESYTKYRYLCIIQKAVYMHVRKGCTCLGRGHGPGGWRPGPPPPPPPGLVSGSETPGTSESATPESNISGSSCGSPNSADTSSDFKDLWTKLKECHDREVQGLQVKVTKLKQERILDAQRLEEFFTKNQQLREQQKVLHETIKVLEDRLRAGLCDRCAVTEEHMRKKQQEFENIRQQNLKLITELMNERNTLQEENKKLSEQLQQKIENDQQHQAAELECEEDVIPDSPITAFSFSGVNRLRRKENPHVRYIEQTHTKLEHSVCANEMRKVSKSSTHPQHNPNENEILVADTYDQSQSPMAKAHGTSSYTPDKSSFNLATVVAETLGLGVQEESETQGPMSPLGDELYHCLEGNHKKQPFESGSETPGTSESATPEGSPKRKVSSAEGAAKEEPKRRSARLSAKPPAKVEAKPKKAAAKDKSSDKKVQTKGKRGAKGKQAEVANQETKEDLPAENGETKTEESPASDEAGEKEAKSDSGSETPGTSESATPESYEQLAPQPCVGETLHSSLPRDSELFVPEEGSSEKESEDAPKTSPPTPGKHGLEQTGEEKVMVTVPDKNPPCPCCGTRVNSVLNLIEHLKVSHGKRGVCFRCAKCGKENSNYHSVVCHFKKCRGPETEKAPAGEWICEVCNRDFTTKIGLGQHKRLAHPAVRNQERIVASQPKETSNRGAHKRCWTKEEEELLIRLEAQFEGNKNINKLIAEHITTKTAKQISDKRRLLSRKPAEEPREEPGTCHHTRRAAASLRTEPEMSHHAQAEDRDNGPGRRPLPGRAAAGGRTMDEIRRHPDKGNGQQRPTKQKSEEQLQAYYKKTLEERLSAGALNTFPRAFKQVMEGRDIKLVINQTAQDCFGCLESISQIRTATRDKKDTVTREKHPKKPFQKWMKKRAIKKGNYLRFQRLFYLDRGKLAKIILDDIECLSCDIPLSEIYSVFKTRWETTGSFKSLGDFKTYGKADNTAFRELITAKEIEKNVQEMSKGSAPGPDGITLGDVVKMDPEFSRTMEIFNLWLTTGKIPDMVRGCRTVLIPKSSKPDRLKDINNWRPITIGSILLRLFSRIVTARLSKACPLNPRQRGFIRAAGCSENLKLLQTIIWSAKREHRPLGVVFVDIAKAFDTVSHQHIIHALQQREVDPHIVGLVSNMYENISTYITTKRNTHTDKIQIRVGVKQGDPMSPLLFNLAMDPLLCKLEESGKGYHRGQSSITAMAFADDLVLLSDSWENMNTNISILETFCNLTGLKTQGQKCHGFYIKPTKDSYTINDCAAWTINGTPLNMIDPGESEKYLGLQFDPWIGIARSGLSTKLDFWLQRIDQAPLKPLQKTDILKTYTIPRLIYIADHSEVKSALLETLDQKIRTAVKEWLHLPPCTCDAILYSSTRDGGLGITKLAGLIPSVQARRLHRIAQSSDDTMKCFMEKEKMEQLHKKLWIQAGGDRENIPSIWEAPPSSEPPNNVSTNSEWEAPTQKDKFPKPCNWRKNEFKKWTKLASQGRGIVNFERDKISNHWIQYYRRIPHRKLLTALQLRANVYPTREFLARGRQDQYIKACRHCDADNESCAHIIGNCPVTQDARIKRHNYICELLLEEAKKKDWVVFKEPHIRDSNKELYKPDLIFVKDGRALVVDVTVRYEAAKSSLEEAAAEKVRKYKHLETEVRHLTNAKDVTFVGFPLGARGKWHQDNFKLLTELGLSKSRQVKMAETFSTVALFSSVDIVHMFASRARKSMVM

SEQ ID NO: 1831 - protein, 1694 aa, synthetic construct
MAPKKKRKVATRIGRFANYLRNSGSETPGTSESATPESNISGSSCGSPNSADTSSDFKDLWTKLKECHDREVQGLQVKVTKLKQERILDAQRLEEFFTKNQQLREQQKVLHETIKVLEDRLRAGLCDRCAVTEEHMRKKQQEFENIRQQNLKLITELMNERNTLQEENKKLSEQLQQKIENDQQHQAAELECEEDVIPDSPITAFSFSGVNRLRRKENPHVRYIEQTHTKLEHSVCANEMRKVSKSSTHPQHNPNENEILVADTYDQSQSPMAKAHGTSSYTPDKSSFNLATVVAETLGLGVQEESETQGPMSPLGDELYHCLEGNHKKQPFESGSETPGTSESATPEGSPKRKVSSAEGAAKEEPKRRSARLSAKPPAKVEAKPKKAAAKDKSSDKKVQTKGKRGAKGKQAEVANQETKEDLPAENGETKTEESPASDEAGEKEAKSDSGSETPGTSESATPESYEQLAPQPCVGETLHSSLPRDSELFVPEEGSSEKESEDAPKTSPPTPGKHGLEQTGEEKVMVTVPDKNPPCPCCGTRVNSVLNLIEHLKVSHGKRGVCFRCAKCGKENSNYHSVVCHFKKCRGPETEKAPAGEWICEVCNRDFTTKIGLGQHKRLAHPAVRNQERIVASQPKETSNRGAHKRCWTKEEEELLIRLEAQFEGNKNINKLIAEHITTKTAKQISDKRRLLSRKPAEEPREEPGTCHHTRRAAASLRTEPEMSHHAQAEDRDNGPGRRPLPGRAAAGGRTMDEIRRHPDKGNGQQRPTKQKSEEQLQAYYKKTLEERLSAGALNTFPRAFKQVMEGRDIKLVINQTAQDCFGCLESISQIRTATRDKKDTVTREKHPKKPFQKWMKKRAIKKGNYLRFQRLFYLDRGKLAKIILDDIECLSCDIPLSEIYSVFKTRWETTGSFKSLGDFKTYGKADNTAFRELITAKEIEKNVQEMSKGSAPGPDGITLGDVVKMDPEFSRTMEIFNLWLTTGKIPDMVRGCRTVLIPKSSKPDRLKDINNWRPITIGSILLRLFSRIVTARLSKACPLNPRQRGFIRAAGCSENLKLLQTIIWSAKREHRPLGVVFVDIAKAFDTVSHQHIIHALQQREVDPHIVGLVSNMYENISTYITTKRNTHTDKIQIRVGVKQGDPMSPLLFNLAMDPLLCKLEESGKGYHRGQSSITAMAFADDLVLLSDSWENMNTNISILETFCNLTGLKTQGQKCHGFYIKPTKDSYTINDCAAWTINGTPLNMIDPGESEKYLGLQFDPWIGIARSGLSTKLDFWLQRIDQAPLKPLQKTDILKTYTIPRLIYIADHSEVKSALLETLDQKIRTAVKEWLHLPPCTCDAILYSSTRDGGLGITKLAGLIPSVQARRLHRIAQSSDDTMKCFMEKEKMEQLHKKLWIQAGGDRENIPSIWEAPPSSEPPNNVSTNSEWEAPTQKDKFPKPCNWRKNEFKKWTKLASQGRGIVNFERDKISNHWIQYYRRIPHRKLLTALQLRANVYPTREFLARGRQDQYIKACRHCDADNESCAHIIGNCPVTQDARIKRHNYICELLLEEAKKKDWVVFKEPHIRDSNKELYKPDLIFVKDGRALVVDVTVRYEAAKSSLEEAAAEKVRKYKHLETEVRHLTNAKDVTFVGFPLGARGKWHQDNFKLLTELGLSKSRQVKMAETFSTVALFSSVDIVHMFASRARKSMVM

SEQ ID NO: 1832 - protein, 1768 aa, synthetic construct
MAPKKKRKVAASLNGAPLIKDPMLIFVKTLTGKTITLEVEPSDTIENVKAKIQDKEGIPPDQQRLAFAGKSLEDGRTLSDYNILKDSKLHPLLRLRSGSETPGTSESATPESNISGSSCGSPNSADTSSDFKDLWTKLKECHDREVQGLQVKVTKLKQERILDAQRLEEFFTKNQQLREQQKVLHETIKVLEDRLRAGLCDRCAVTEEHMRKKQQEFENIRQQNLKLITELMNERNTLQEENKKLSEQLQQKIENDQQHQAAELECEEDVIPDSPITAFSFSGVNRLRRKENPHVRYIEQTHTKLEHSVCANEMRKVSKSSTHPQHNPNENEILVADTYDQSQSPMAKAHGTSSYTPDKSSFNLATVVAETLGLGVQEESETQGPMSPLGDELYHCLEGNHKKQPFESGSETPGTSESATPEGSPKRKVSSAEGAAKEEPKRRSARLSAKPPAKVEAKPKKAAAKDKSSDKKVQTKGKRGAKGKQAEVANQETKEDLPAENGETKTEESPASDEAGEKEAKSDSGSETPGTSESATPESYEQLAPQPCVGETLHSSLPRDSELFVPEEGSSEKESEDAPKTSPPTPGKHGLEQTGEEKVMVTVPDKNPPCPCCGTRVNSVLNLIEHLKVSHGKRGVCFRCAKCGKENSNYHSVVCHFKKCRGPETEKAPAGEWICEVCNRDFTTKIGLGQHKRLAHPAVRNQERIVASQPKETSNRGAHKRCWTKEEEELLIRLEAQFEGNKNINKLIAEHITTKTAKQISDKRRLLSRKPAEEPREEPGTCHHTRRAAASLRTEPEMSHHAQAEDRDNGPGRRPLPGRAAAGGRTMDEIRRHPDKGNGQQRPTKQKSEEQLQAYYKKTLEERLSAGALNTFPRAFKQVMEGRDIKLVINQTAQDCFGCLESISQIRTATRDKKDTVTREKHPKKPFQKWMKKRAIKKGNYLRFQRLFYLDRGKLAKIILDDIECLSCDIPLSEIYSVFKTRWETTGSFKSLGDFKTYGKADNTAFRELITAKEIEKNVQEMSKGSAPGPDGITLGDVVKMDPEFSRTMEIFNLWLTTGKIPDMVRGCRTVLIPKSSKPDRLKDINNWRPITIGSILLRLFSRIVTARLSKACPLNPRQRGFIRAAGCSENLKLLQTIIWSAKREHRPLGVVFVDIAKAFDTVSHQHIIHALQQREVDPHIVGLVSNMYENISTYITTKRNTHTDKIQIRVGVKQGDPMSPLLFNLAMDPLLCKLEESGKGYHRGQSSITAMAFADDLVLLSDSWENMNTNISILETFCNLTGLKTQGQKCHGFYIKPTKDSYTINDCAAWTINGTPLNMIDPGESEKYLGLQFDPWIGIARSGLSTKLDFWLQRIDQAPLKPLQKTDILKTYTIPRLIYIADHSEVKSALLETLDQKIRTAVKEWLHLPPCTCDAILYSSTRDGGLGITKLAGLIPSVQARRLHRIAQSSDDTMKCFMEKEKMEQLHKKLWIQAGGDRENIPSIWEAPPSSEPPNNVSTNSEWEAPTQKDKFPKPCNWRKNEFKKWTKLASQGRGIVNFERDKISNHWIQYYRRIPHRKLLTALQLRANVYPTREFLARGRQDQYIKACRHCDADNESCAHIIGNCPVTQDARIKRHNYICELLLEEAKKKDWVVFKEPHIRDSNKELYKPDLIFVKDGRALVVDVTVRYEAAKSSLEEAAAEKVRKYKHLETEVRHLTNAKDVTFVGFPLGARGKWHQDNFKLLTELGLSKSRQVKMAETFSTVALFSSVDIVHMFASRARKSMVM

SEQ ID NO: 1833 - protein, 1814 aa, synthetic construct
MAPKKKRKVNISGSSCGSPNSADTSSDFKDLWTKLKECHDREVQGLQVKVTKLKQERILDAQRLEEFFTKNQQLREQQKVLHETIKVLEDRLRAGLCDRCAVTEEHMRKKQQEFENIRQQNLKLITELMNERNTLQEENKKLSEQLQQKIENDQQHQAAELECEEDVIPDSPITAFSFSGVNRLRRKENPHVRYIEQTHTKLEHSVCANEMRKVSKSSTHPQHNPNENEILVADTYDQSQSPMAKAHGTSSYTPDKSSFNLATVVAETLGLGVQEESETQGPMSPLGDELYHCLEGNHKKQPFESGSETPGTSESATPEGSPKRKVSSAEGAAKEEPKRRSARLSAKPPAKVEAKPKKAAAKDKSSDKKVQTKGKRGAKGKQAEVANQETKEDLPAENGETKTEESPASDEAGEKEAKSDSGSETPGTSESATPESYEQLAPQPCVGETLHSSLPRDSELFVPEEGSSEKESEDAPKTSPPTPGKHGLEQTGEEKVMVTVPDKNPPCPCCGTRVNSVLNLIEHLKVSHGKRGVCFRCAKCGKENSNYHSVVCHFKKCRGPETEKAPAGEWICEVCNRDFTTKIGLGQHKRLAHPAVRNQERIVASQPKETSNRGAHKRCWTKEEEELLIRLEAQFEGNKNINKLIAEHITTKTAKQISDKRRLLSRKPAEEPREEPGTCHHTRRAAASLRTEPEMSHHAQAEDRDNGPGRRPLPGRAAAGGRTMDEIRRHPDKGNGQQRPTKQKSEEQLQAYYKKTLEERLSAGALNTFPRAFKQVMEGRDIKLVINQTAQDCFGCLESISQIRTATRDKKDTVTREKHPKKPFQKWMKKRAIKKGNYLRFQRLFYLDRGKLAKIILDDIECLSCDIPLSEIYSVFKTRWETTGSFKSLGDFKTYGKADNTAFRELITAKEIEKNVQEMSKGSAPGPDGITLGDVVKMDPEFSRTMEIFNLWLTTGKIPDMVRGCRTVLIPKSSKPDRLKDINNWRPITIGSILLRLFSRIVTARLSKACPLNPRQRGFIRAAGCSENLKLLQTIIWSAKREHRPLGVVFVDIAKAFDTVSHQHIIHALQQREVDPHIVGLVSNMYENISTYITTKRNTHTDKIQIRVGVKQGDPMSPLLFNLAMDPLLCKLEESGKGYHRGQSSITAMAFADDLVLLSDSWENMNTNISILETFCNLTGLKTQGQKCHGFYIKPTKDSYTINDCAAWTINGTPLNMIDPGESEKYLGLQFDPWIGIARSGLSTKLDFWLQRIDQAPLKPLQKTDILKTYTIPRLIYIADHSEVKSALLETLDQKIRTAVKEWLHLPPCTCDAILYSSTRDGGLGITKLAGLIPSVQARRLHRIAQSSDDTMKCFMEKEKMEQLHKKLWIQAGGDRENIPSIWEAPPSSEPPNNVSTNSEWEAPTQKDKFPKPCNWRKNEFKKWTKLASQGRGIVNFERDKISNHWIQYYRRIPHRKLLTALQLRANVYPTREFLARGRQDQYIKACRHCDADNESCAHIIGNCPVTQDARIKRHNYICELLLEEAKKKDWVVFKEPHIRDSNKELYKPDLIFVKDGRALVVDVTVRYEAAKSSLEEAAAEKVRKYKHLETEVRHLTNAKDVTFVGFPLGARGKWHQDNFKLLTELGLSKSRQVKMAETFSTVALFSSVDIVHMFASRARKSMVMSGSETPGTSESATPEGSTDPRETVPPGNSGEETIGEAFAWLNRTVEAINREAVNHLPRELIFQVWQRSWRYWHDEQGMSESYTKYRYLCIIQKAVYMHVRKGCTCLGRGHGPGGWRPGPPPPPPPGLVGGSGKRTADGSEFEPKKKRKV

SEQ ID NO: 1834 - protein, 1716 aa, synthetic construct
MAPKKKRKVNISGSSCGSPNSADTSSDFKDLWTKLKECHDREVQGLQVKVTKLKQERILDAQRLEEFFTKNQQLREQQKVLHETIKVLEDRLRAGLCDRCAVTEEHMRKKQQEFENIRQQNLKLITELMNERNTLQEENKKLSEQLQQKIENDQQHQAAELECEEDVIPDSPITAFSFSGVNRLRRKENPHVRYIEQTHTKLEHSVCANEMRKVSKSSTHPQHNPNENEILVADTYDQSQSPMAKAHGTSSYTPDKSSFNLATVVAETLGLGVQEESETQGPMSPLGDELYHCLEGNHKKQPFESGSETPGTSESATPEGSPKRKVSSAEGAAKEEPKRRSARLSAKPPAKVEAKPKKAAAKDKSSDKKVQTKGKRGAKGKQAEVANQETKEDLPAENGETKTEESPASDEAGEKEAKSDSGSETPGTSESATPESYEQLAPQPCVGETLHSSLPRDSELFVPEEGSSEKESEDAPKTSPPTPGKHGLEQTGEEKVMVTVPDKNPPCPCCGTRVNSVLNLIEHLKVSHGKRGVCFRCAKCGKENSNYHSVVCHFKKCRGPETEKAPAGEWICEVCNRDFTTKIGLGQHKRLAHPAVRNQERIVASQPKETSNRGAHKRCWTKEEEELLIRLEAQFEGNKNINKLIAEHITTKTAKQISDKRRLLSRKPAEEPREEPGTCHHTRRAAASLRTEPEMSHHAQAEDRDNGPGRRPLPGRAAAGGRTMDEIRRHPDKGNGQQRPTKQKSEEQLQAYYKKTLEERLSAGALNTFPRAFKQVMEGRDIKLVINQTAQDCFGCLESISQIRTATRDKKDTVTREKHPKKPFQKWMKKRAIKKGNYLRFQRLFYLDRGKLAKIILDDIECLSCDIPLSEIYSVFKTRWETTGSFKSLGDFKTYGKADNTAFRELITAKEIEKNVQEMSKGSAPGPDGITLGDVVKMDPEFSRTMEIFNLWLTTGKIPDMVRGCRTVLIPKSSKPDRLKDINNWRPITIGSILLRLFSRIVTARLSKACPLNPRQRGFIRAAGCSENLKLLQTIIWSAKREHRPLGVVFVDIAKAFDTVSHQHIIHALQQREVDPHIVGLVSNMYENISTYITTKRNTHTDKIQIRVGVKQGDPMSPLLFNLAMDPLLCKLEESGKGYHRGQSSITAMAFADDLVLLSDSWENMNTNISILETFCNLTGLKTQGQKCHGFYIKPTKDSYTINDCAAWTINGTPLNMIDPGESEKYLGLQFDPWIGIARSGLSTKLDFWLQRIDQAPLKPLQKTDILKTYTIPRLIYIADHSEVKSALLETLDQKIRTAVKEWLHLPPCTCDAILYSSTRDGGLGITKLAGLIPSVQARRLHRIAQSSDDTMKCFMEKEKMEQLHKKLWIQAGGDRENIPSIWEAPPSSEPPNNVSTNSEWEAPTQKDKFPKPCNWRKNEFKKWTKLASQGRGIVNFERDKISNHWIQYYRRIPHRKLLTALQLRANVYPTREFLARGRQDQYIKACRHCDADNESCAHIIGNCPVTQDARIKRHNYICELLLEEAKKKDWVVFKEPHIRDSNKELYKPDLIFVKDGRALVVDVTVRYEAAKSSLEEAAAEKVRKYKHLETEVRHLTNAKDVTFVGFPLGARGKWHQDNFKLLTELGLSKSRQVKMAETFSTVALFSSVDIVHMFASRARKSMVMSGSETPGTSESATPEGSATRIGRFANYLRNGGSGKRTADGSEFEPKKKRKV

SEQ ID NO: 1835 - protein, 1335 aa, synthetic construct; identical to SEQ ID NO: 2

SEQ ID NO: 1836 - protein, 2010 aa, synthetic construct
MAPKKKRKVPTLLGFHTASGKKVKIAKESLDKVKNLFDEKEQGGSGGGDRKTRLSEPPTLALRLKPYKTAIQQLRSVIRALKENTTVTFLPTPSLILQTVRSHCVSKITFNSSCLYITDKSFQPKTINNSTPLLGNFMYLTSSKDLTKFYVQDISDLSAKISMCAPDFNMEFSSACVHGQDIVRESENSAVHVDLDFGVVADLLKWIGPHTRVKRNVKKAPCPTGTVQILVHAGPPAIKFILTNGSELEFTANNRVSFHGVKNMRINVQLKNFYQTLLNCAVTKLPCTLRIVTEHDTLLYVASRNGLFAVENFLTEEPFQRGDPFDKNYVGNSGKSRSGSETPGTSESATPEGSNISGSSCGSPNSADTSSDFKDLWTKLKECHDREVQGLQVKVTKLKQERILDAQRLEEFFTKNQQLREQQKVLHETIKVLEDRLRAGLCDRCAVTEEHMRKKQQEFENIRQQNLKLITELMNERNTLQEENKKLSEQLQQKIENDQQHQAAELECEEDVIPDSPITAFSFSGVNRLRRKENPHVRYIEQTHTKLEHSVCANEMRKVSKSSTHPQHNPNENEILVADTYDQSQSPMAKAHGTSSYTPDKSSFNLATVVAETLGLGVQEESETQGPMSPLGDELYHCLEGNHKKQPFESGSETPGTSESATPEGSPKRKVSSAEGAAKEEPKRRSARLSAKPPAKVEAKPKKAAAKDKSSDKKVQTKGKRGAKGKQAEVANQETKEDLPAENGETKTEESPASDEAGEKEAKSDSGSETPGTSESATPESYEQLAPQPCVGETLHSSLPRDSELFVPEEGSSEKESEDAPKTSPPTPGKHGLEQTGEEKVMVTVPDKNPPCPCCGTRVNSVLNLIEHLKVSHGKRGVCFRCAKCGKENSNYHSVVCHFKKCRGPETEKAPAGEWICEVCNRDFTTKIGLGQHKRLAHPAVRNQERIVASQPKETSNRGAHKRCWTKEEEELLIRLEAQFEGNKNINKLIAEHITTKTAKQISDKRRLLSRKPAEEPREEPGTCHHTRRAAASLRTEPEMSHHAQAEDRDNGPGRRPLPGRAAAGGRTMDEIRRHPDKGNGQQRPTKQKSEEQLQAYYKKTLEERLSAGALNTFPRAFKQVMEGRDIKLVINQTAQDCFGCLESISQIRTATRDKKDTVTREKHPKKPFQKWMKKRAIKKGNYLRFQRLFYLDRGKLAKIILDDIECLSCDIPLSEIYSVFKTRWETTGSFKSLGDFKTYGKADNTAFRELITAKEIEKNVQEMSKGSAPGPDGITLGDVVKMDPEFSRTMEIFNLWLTTGKIPDMVRGCRTVLIPKSSKPDRLKDINNWRPITIGSILLRLFSRIVTARLSKACPLNPRQRGFIRAAGCSENLKLLQTIIWSAKREHRPLGVVFVDIAKAFDTVSHQHIIHALQQREVDPHIVGLVSNMYENISTYITTKRNTHTDKIQIRVGVKQGDPMSPLLFNLAMDPLLCKLEESGKGYHRGQSSITAMAFADDLVLLSDSWENMNTNISILETFCNLTGLKTQGQKCHGFYIKPTKDSYTINDCAAWTINGTPLNMIDPGESEKYLGLQFDPWIGIARSGLSTKLDFWLQRIDQAPLKPLQKTDILKTYTIPRLIYIADHSEVKSALLETLDQKIRTAVKEWLHLPPCTCDAILYSSTRDGGLGITKLAGLIPSVQARRLHRIAQSSDDTMKCFMEKEKMEQLHKKLWIQAGGDRENIPSIWEAPPSSEPPNNVSTNSEWEAPTQKDKFPKPCNWRKNEFKKWTKLASQGRGIVNFERDKISNHWIQYYRRIPHRKLLTALQLRANVYPTREFLARGRQDQYIKACRHCDADNESCAHIIGNCPVTQDARIKRHNYICELLLEEAKKKDWVVFKEPHIRDSNKELYKPDLIFVKDGRALVVDVTVRYEAAKSSLEEAAAEKVRKYKHLETEVRHLTNAKDVTFVGFPLGARGKWHQDNFKLLTELGLSKSRQVKMAETFSTVALFSSVDIVHMFASRARKSMVM

SEQ ID NO: 1837 - protein, 1971 aa, synthetic construct; identical to SEQ ID NO: 782

SEQ ID NO: 1838 - DNA, 177 bp, synthetic construct
  source 1..177: mol_type = other DNA
gggtctagttacaactgggcatcgctgcagagatcgcacctcctcgtggtcccgctggtagcccttcgaagggtgactaagttgatctctgccccaggtacggagccgttgggactcaccagtccaacgtaactcctgcccaaactcggtgaaacaaattcttcggtaaaaagcccc

SEQ ID NO: 1839 - DNA, 177 bp, synthetic construct
  source 1..177: mol_type = other DNA
gggtctagttacaactgggcatcgctgcagagatcgcacctcctcgtggtcccgctggtagccctccgaagggtgactaagttgatctctgccccaggtacggagccgttgggactcaccagtccaacgtaactcctgcccaaactcggtgaaacaaattcttcggtaaaaagcccc

SEQ ID NO: 1840 - DNA, 177 bp, synthetic construct
  source 1..177: mol_type = other DNA
gggtctagttacaactgggcatcgctgcagagatcgcacctcctcgtggtcccgctggtagccctccgaagggtgactaagtcgatctctgccccaggtacggagccgttgggactcaccagtccaacgtaactcctgcctaaactcggtgaaacaaattcttcggtaaaaagcccc

SEQ ID NO: 1841 - DNA, 324 bp, synthetic construct
  source 1..324: mol_type = other DNA
ttcaggttatttagatgcttagtttttgtaccttttcttgtttgtttaggattttgatagtgttagtatttttatatttttgtaggattgcataatgttcttcatatataattctgttttaataaaatagacgatagctagagacgttagggcagccacaagccagttaggtagcggatagtaggtgggaacagacttttactacttcataacgcgtcaattaccacccgatttggaccaattcaccggatttgtccaaggtggacgggccacctttacttaacccggaaaaggaacatatataatttatgtgtgttcgataaa

SEQ ID NO: 1842 - DNA, 91 bp, synthetic construct
  source 1..91: mol_type = other DNA
agacttaagtgagtttggttacaactgggcatagctgcagagaccgcgcctcctcgcggccccgctggtaagcccttaacagggtgactaa

SEQ ID NO: 1843 - DNA, 289 bp, synthetic construct
  source 1..289: mol_type = other DNA
ggtagataatctttgtatagtggggggggatctcatgtaccgggtttcttttatttgattttcaataaaacagacggtagctaggttcgcaaggcagccacaagccaaagataggtagggtgctcatagtgagtagggacagtgccttttgattcacaacgcgtcaataccatctgacacggatacccttaccggacttgtcatgatctcccagacttgtccaaggtggacgggccacctttacttaacccggaaaaggaacatatattaattatatgtgttcggaaaa

SEQ ID NO: 1844 - DNA, 334 bp, synthetic construct
  source 1..334: mol_type = other DNA
ggcagcttgagatggtctgttactaactgggcttagctgcggaagtcacacctcctcgtggtcccgccggacacccgtaaagggtgactgagttgacttctgccccagtgtgagtgagggagattattctccctccctatcgtctggactcgccacccagcgatagtttcacgatcttgctgaaacaaataatttggcacagtttcttactgttgcccagagcctggtccacgggcttaagttggacgctgttggcagcgtggggtgagggccccgctgttgacattgacaaccctcacttggacgtgacgtattttattttccggaattgacc

SEQ ID NO: 1845 - DNA, 299 bp, synthetic construct
  source 1..299: mol_type = other DNA
gacgggatcatagttactaactgggcagagctgcagaggttacacctcctcgtggtcccgctggatgcccttcggggtaaccaagttaacctctgccccagtgtgggaattatagctacttcccccctatcgtctggcctcaccaaccattcgatagattcggtctggtgatccaaattcctggcaacgattttcggtcgctgcccaaagccttgcctacgggcacagttgggctcagtcatacagcacttgagggggtgttgtttgacttatactactcctctatctggactggcaaa

SEQ ID NO: 1846 - DNA, 250 bp, synthetic construct
  source 1..250: mol_type = other DNA
ggcgacttgagaaggtctagttacaactgggcatagctgcagagatcgcgcctcctcgtggccccgctggtaagcccttaacagggtgactaagtcgatctctgccccagtccaggagccgctgggattcaccagcccagcgattccttccaaattcaggtgaaacaaatttctcggtgtaagtcgcaagacttattacctgaaacctggccccccggtttcagacaggggcaaagagttcggaagtgga

SEQ ID NO: 1847 - DNA, 324 bp, synthetic construct
  source 1..324: mol_type = other DNA
ccaaaggcggctttggtaagagtatggttacaaactgggcacagctgcagagatcgcacctcctcgtggtcccgctggtaaccctgcgtagggtaactaagtcgatcttctagcccaggtacggagacgttgggactcaccagcccaacgatctcttgctaaaattcggtgaaacaaattccaaggtataagccatttggcttaatacccaaaacctggccccagggtttcaaagggggggcaaaagtttggtagattggcaaggggggccactaccactcccgcaacacccccccaccttgcaaagaccaatattttccggac

SEQ ID NO: 1848 - DNA, 566 bp, synthetic construct
  source 1..566: mol_type = other DNA
tgccggattggcgggaacagccgatcctagtaaggctggatgaattcatgcgggctgaagcagcggttctcccataaaataggggctttggggaaggtgggggacgtcgggggggcccctggagggacccctgtaccgataggggatccttgttttttcccctctacctggggcttttgtggggaggcgagggcacgtggtgagtgggggatggctgactggggaaagttaccaaggtatccccaaaggcggctttggtaagagtatggttacaaactgggcacagctgcagagatcgcacctcctcgtggtcccgctggtaaccctgcgtagggtaactaagtcgatcttctagcccaggtacggagacgttgggactcaccagcccaacgatctcttgctaaaattcggtgaaacaaattccaaggtataagccatttggcttaatacccaaaacctggccccagggtttcaaagggggggcaaaagtttggtagattggcaaggggggccactaccactcccgcttcacccccccaccttgctaagaccaatattttccggac

SEQ ID NO: 1849 - DNA, 238 bp, synthetic construct
  source 1..238: mol_type = other DNA
gttacagggccgggcgcctcctcatggcgaccgctggatagggtgggaagcattggtgattccaactactggcggagggtgtcatgtcggcacccccgcctgcgacccacctgaactaagatccaggccatcccagtcgggccaaccaccttgctgagattactgctggttacagagataaagaaaataaacaaaaaatcctggtccctctggaaaccaggatttcagcagcggtgag

SEQ ID NO: 1850 - DNA, 312 bp, synthetic construct
  source 1..312: mol_type = other DNA
ggggagtatagttacaactgggcatagctgcagagatcgcgcctccccgtggccccgctggtaagccattaaaagggtgactaagtcgatctctgccccagtgtgagagaggagggctatctatcctccctgtcattggactcgctacccagtggcagcttcacgagttgcagaaaccacaaaatttggcacagctactccgctgttgcatagagccttgtccacgggctactgttggacaaagctgatagtttggaggagggacagctatcagctaatactaccctcacttggattttctgcactgacatt

SEQ ID NO: 1851 - DNA, 2216 bp, synthetic construct
  source 1..2216: mol_type = other DNA
agtaactatgactctcttaagtctagttacaactgggcatcgctgcagagatcgcacctcctcgtggtcccgctggtagcccttcgaagggtgactaagtcgatctctgccccaggtacggagccgttgggactcaccagtccaacgtaatactcgacggatcgatccgaacaaacgacccaacacccgtgcgttttattctgtctttttattgccgatcccctcagaagaactcgtcaagaaggcgatagaaggcgatgcgctgcgaatcgggagcggcgataccgtaaagcacgaggaagcggtcagcccattcgccgccaagctcttcagcaatatcacgggtagccaacgctatgtcctgatagcggtcggccgctttacttgtacagctcgtccatgccgagagtgatcccggcggcggtcacgaactccagcaggaccatgtgatcgcgcttctcgttggggtctttgctcagggcggactgggtgctcaggtagtggttgtcgggcagcagcacggggccgtcgccgatgggggtgttctgctggtagtggtcggccagctgcacgctgccgtcctcgatgttgtggcggatcttgaagttcaccttgatgccgttcttctgcttgtcggccatgatatagacgttgtggctgttgtagttgtactccagcttgtgccccaggatgttgccgtcctccttgaagtcgatgcccttcagctcgatgcggttcaccagggtgtcgccctcgaacttcacctcggcgcgggtcttgtagttgccgtcgtccttgaagaagatggtgcgctcctggacgtagccttcgggcatggcggacttgaagaagtcgtgctgcttcatgtggtcggggtagcggctgaagcactgcacgccgtaggtcagggtggtcacgagggtgggccagggcacgggcagcttgccggtggtgcagatgaacttcagggtcagcttgccgtaggtggcatcgccctcgccctcgccggacacgctgaacttgtggccgtttacgtcgccgtccagctcgaccaggatgggcaccaccccggtgaacagctcctcgcccttgctcaccatggtggcgaattcgaagcttgagctcgagatctgagtccggtagcgctagcggatctgacggttcactaaaccagctctgcttatatagacctcccaccgtacacgcctaccgcccatttgcgtcaatggggcggagttgttacgacattttggaaagtcccgttgattttggtgccaaaacaaactcccattgacgtcaatggggtggagacttggaaatccccgtgagtcaaaccgctatccacgcccattgatgtactgccaaaaccgcatcaccatggtaatagcgatgactaatacgtagatgtactgccaagtaggaaagtcccataaggtcatgtactgggcataatgccaggcgggccatttaccgtcattgacgtcaatagggggcgtacttggcatatgatacacttgatgtactgccaagtgggcagtttaccgtaaatactccacccattgacgtcaatggaaagtccctattggcgttactatgggaacatacgtcattattgacgtcaatgggcgggggtcgttgggcggtcagccaggcgggccatttaccgtaagttatgtaacgcggaactccatatatgggctatgaactaatgaccccgtaattgattactattaaattcctgcagttcaggttatttagatgcttagtttttgtacctttcttgttttgtttaggattttgatagtgttagtatttttatatttttgtacgattgcataatgttcttttttatacagttctgttttaataaaatagacgatagctagagacgttagggcagccacaagccagttaggtagcggatagtaggtaggaacagacttttactatttcataacgcgtcaattaccacctgatttggaccaattcacgggatttgtccaaggtggacgggccacctttacttaacccggaaaaggaacatatataatttatgtgtgttcgataaatagccaaatgcctcgtcatcaccggtaaaaaaaaaaaaaaaaaaaaaaaaaaaaaaacgttgactaaaaaaaaaaaaaaaaaaaaaaaaaaaaaaaaaaaaaaaaaaaaaaaaaaaaaaaaaaaaaaaaaaaaaaaaaaaagtcttc

SEQ ID NO: 1852 - protein, 63 aa, synthetic construct
ATVKFKYKGEEKEVDISKIKKVWRVGKMISFTYDEGGGKTGRGAVSEKDAPKELLQMLEKQKK

SEQ ID NO: 1853 - protein, 58 aa, synthetic construct; identical to SEQ ID NO: 788

SEQ ID NO: 1854 - protein, 20 aa, synthetic construct
MAKRTADGSEFESPKKKRKV

SEQ ID NO: 1855 - protein, 213 aa, synthetic construct
RVSPREYRSSQESAQEASTITSLTHSQFDLSVDGEILPVPSDLDADAPALEPALDDGATHTLPSTTGNLAAVSDWVMSTVPVAPPRRRRGRILTVTCDEREGNITPMASVRFFRAELCPVVQETAETRDTAMSLQAPPSTATEPNHPPISFGASSETFPITFGDFNEGEIESLSSELLTFGDFLPGEVDDLTDSDWSTCSDTDDELRLDRAGG

SEQ ID NO: 1856 - protein, 649 aa, synthetic construct
GCVSIIGRLHVNQRGSGSASITAYAQQTRGLLGAIVVSMTGRDRTEQAGEVQILSTVSQSFLGTTISGVLWTVYHGAGNKTLAGLRGPVTQMYSSAEGDLVGWPSPPGTKSLEPCKCGAVDLYLVTRNADVIPARRRGDKRGALLSPRPISTLKGSSGGPVLCPRGHVVGLFRAAVCSRGVAKSIDFIPVETLDVVTRSPTFSDNSTPPAVPQTYQVGYLHAPTGSGKSTKVPVAYAAQGYKVLVLNPSVAATLGFGAYLSKAHGINPNIRTGVRTVMTGEAITYSTYGKFLADGGCASGAYDIIICDECHAVDATSILGIGTVLDQAETAGVRLTVLATATPPGSVTTPHPDIEEVGLGREGEIPFYGRAIPLSCIKGGRHLIFCHSKKKCDELAAALRGMGLNAVAYYRGLDVSIIPAQGDVVVVATDALMTGYTGDFDSVIDCNVAVTQAVDFSLDPTFTITTQTVPQDAVSRSQRRGRTGRGRQGTYRYVSTGERASGMFDSVVLCECYDAGAAWYDLTPAETTVRLRAYFNTPGLPVCQDHLEFWEAVFTGLTHIDAHFLSQTKQAGENFAYLVAYQATVCARAKAPPPSWDAMWKCLARLKPTLAGPTPLLYRLGPITNEVTLTHPGTKYIATCMQADLEVMT

SEQ ID NO: 1857 - protein, 831 aa, synthetic construct
LFVVRPGRKKNELEAFFIENEPEKLSQMQNLKADRIYRFIMREGRLFKVLEGSQYRNPKEIEKLLRQSRIVLVNADEWEDYFKRRLQNKRVEKAELCRLCLLEGRITVLTEGNRIKYHNEYICERCAEDELKRELRFRFKSIAMFDQAKKLLERFRDLDKVLYAFDPRFDPTKHPEITKWDELKAKHVKVEKIKVDELPVPEKFKEVLKSEGVRELLPVQSLAVKNGLLDGENLLVVSATASGKTLIGELAGVPKAMQGKKLLFLVPLVALANQKYEDFKRRYSKLGLRVAIRVGMSRIKTKDELVVVDTGIDADIIVGTYEGIDYLLRAGRKIGNVGTIVIDEIHTLDDEERGPRLDGLIARLRKLYPKAQFIGLSATVGNPDELAKELGLKLVLYDERPVDLERHIIIVRNESEKWRHIANLCRAEAMRKSKQGYKGQSIVFTFSRKRTHELAAYLTSKGLKAKPYHSGLPYKQRKLTEMEFLAQRLDVVVTTAALGAGVDFPASQVIFESLAMGNKWLSVREFHQMLGRAGRPLYHEKGKVYLLVEPGRKYSAQMEGTEDEVAFKLLTAPIEPVQVEWSDELEQDNVLAHSCVFNRLDVIEEVQSMCLGANQSAEKVLEKLEEFDFVKMKRPIVEVTPYGRAVSMSFLLPKEATFIRGNLGKREARWIAVKLLPFENIYLSGTLQRELEGAVRGRLSANVFSPSFASILEELDKVIPELSPNAAERLFTIYQEFFMCPEEDCTEYAMERVSNLIIELRRSGKHPTQIAEHFRKVYGLIVYPGDVFTWLDGIVRKLEAIERIARVFRVRKTEEGAKILKREIEEGRMIR

SEQ ID NO: 1858 - protein, 125 aa, synthetic construct; identical to SEQ ID NO: 22

SEQ ID NO: 1859 - protein, 773 aa, synthetic construct
ILDTDYITEDGKPVIRIFKKENGEFKIEYDRTFEPYLYALLKDDSAIEEVKKITAERHGTVVTVKRVEKVQKKFLGRPVEVWKLYFTHPQDVPAIMDKIREHPAVIDIYEYDIPFAIRYLIDKGLVPMEGDEELKLLAFDIETLYHEGEEFAEGPILMISYADEEGARVITWKNVDLPYVDVVSTEREMIKRFLRVVKEKDPDVLITYNGDNFDFAYLKKRCEKLGINFALGRDGSEPKIQRMGDRFAVEVKGRIHFDLYPVIRRTINLPTYTLEAVYEAVFGQPKEKVYAEEITTAWETGENLERVARYSMEDAKVTYELGKEFLPMEAQLSRLIGQSLWDVSRSSTGNLVEWFLLRKAYERNELAPNKPDEKELARRHQSHEGGYIKEPERGLWENIVYLDFRSLYPSIIITHNVSPDTLNREGCKEYDVAPQVGHRFCKDFPGFIPSLLGDLLEERQKIKKRMKATIDPIERKLLDYRQRAIKILANSLYGYYGYARARWYCKECAESVIAWGREYLTMTIKEIEEKYGFKVIYSDTDGFFATIPGADAETVKKKAMEFLKYINAKLPGALELEYEGFYKRGLFVTKKKYAVIDEEGKITTRGLEIVRRDWSEIAKETQARVLEALLKDGDVEKAVRIVKEVTEKLSKYEVPPEKLVIHKQITRDLKDYKATGPHVAVAKRLAARGVKIRPGTVISYIVLKGSGRIVDRAIPFDEFDPTKHKYDAEYYIEKQVLPAVERILRAFGYRKEDLRYQKTRQVGLSARLKPKGT

SEQ ID NO: 1860 - protein, 33 aa, synthetic construct; identical to SEQ ID NO: 55

SEQ ID NO: 1861 - protein, 259 aa, synthetic construct; identical to SEQ ID NO: 295

SEQ ID NO: 1862 - DNA, 325 bp, synthetic construct
  source 1..325: mol_type = other DNA
ttcaggttatttagatgcttagtttttgtacctttcttgttttgtttaggattttgatagtgttagtatttttatatttttgtacgattgcataatgttctttcttatatagttctgttttaataaaatagacgatagctagagacgttagggcagccacaagccagttaggtagcggatagtaggtaggaacagacttttactacttcataacgcgtcaattaccacctgatttggaccaattcacgggatttgtccaaggtggacgggccacctttacttaacccggaaaaggaacatatataatttatgtgtgttcgataaa

SEQ ID NO: 1863 - DNA, 324 bp, synthetic construct; identical to SEQ ID NO: 1841
  source 1..324: mol_type = other DNA

SEQ ID NO: 1864 - DNA, 363 bp, synthetic construct
  source 1..363: mol_type = other DNA
ttgtaatgaattgtatattatgaattgggaataaagtatttattgtctgtttactaaagggaaagggagccgaggtggtggccccggaggcgatttcgacacaatagtaacatcctggtacgacggtctaaactatgatctattagtgggtgatctatgaatgtaattaacatcaatgatagtatgtagggatatctctggaatcagaatcatgacgtgtcacttaacaacaatttgacaccaaattactggtttgactttaaactgaatttgacactaaattactggttttgtcctaggtggacgggccacctatatttaacccggaaaaggaacatgtataaattatatatgttcgataaa

SEQ ID NO: 1865 - DNA, 305 bp, synthetic construct
  source 1..305: mol_type = other DNA
gtcgggatcatagttactagctgggcagagttgcagaggtcacacctccacgtggtcccgctggatgcccttcggggtaaccaagttgacctctgccccagtgtgagagggagttatagttccttcctccctatcgattggcttcgccgacctgtcgatagtattccaggtgaaacaaatttctggcaattgattcggtatcattgcccaaagccttgcccacgggtataaagttgggcagagtctgatagcggctggagggggctgctatccggcttataagacccctcacattgcaggacaaa

SEQ ID NO: 1866 - DNA, 325 bp, synthetic construct; identical to SEQ ID NO: 216
  source 1..325: mol_type = other DNA

SEQ ID NO: 1867 - DNA, 390 bp, synthetic construct
  source 1..390: mol_type = other DNA
gtctagttacaactgggcatcgctgcagagatcgcacctcctcgtggtcccgctggtagcccttcgaagggtgactaagtcgatctctgccccaggtacggagccgttgggactcaccagtccaacgtaagtctagttacaactgggcatcgctgcagagatcgcacctcctcgtggtcccgctggtagcccttcgaagggtgactaagtcgatctctgccccaggtacggagccgttgggactcaccagtccaacgtaagtctagttacaactgggcatcgctgcagagatcgcacctcctcgtggtcccgctggtagcccttcgaagggtgactaagtcgatctctgccccaggtacggagccgttgggactcaccagtccaacgtaa

SEQ ID NO: 1868 - DNA, 780 bp, synthetic construct
  source 1..780: mol_type = other DNA
gtctagttacaactgggcatcgctgcagagatcgcacctcctcgtggtcccgctggtagcccttcgaagggtgactaagtcgatctctgccccaggtacggagccgttgggactcaccagtccaacgtaagtctagttacaactgggcatcgctgcagagatcgcacctcctcgtggtcccgctggtagcccttcgaagggtgactaagtcgatctctgccccaggtacggagccgttgggactcaccagtccaacgtaagtctagttacaactgggcatcgctgcagagatcgcacctcctcgtggtcccgctggtagcccttcgaagggtgactaagtcgatctctgccccaggtacggagccgttgggactcaccagtccaacgtaagtctagttacaactgggcatcgctgcagagatcgcacctcctcgtggtcccgctggtagcccttcgaagggtgactaagtcgatctctgccccaggtacggagccgttgggactcaccagtccaacgtaagtctagttacaactgggcatcgctgcagagatcgcacctcctcgtggtcccgctggtagcccttcgaagggtgactaagtcgatctctgccccaggtacggagccgttgggactcaccagtccaacgtaagtctagttacaactgggcatcgctgcagagatcgcacctcctcgtggtcccgctggtagcccttcgaagggtgactaagtcgatctctgccccaggtacggagccgttgggactcaccagtccaacgtaa

SEQ ID NO: 1869 - DNA, 650 bp, synthetic construct
  source 1..650: mol_type = other DNA
ttcaggttatttagatgcttagtttttgtacctttcttgttttgtttaggattttgatagtgttagtatttttatatttttgtacgattgcataatgttcttttttatacagttctgttttaataaaatagacgatagctagagacgttagggcagccacaagccagttaggtagcggatagtaggtaggaacagacttttactatttcataacgcgtcaattaccacctgatttggaccaattcacgggatttgtccaaggtggacgggccacctttacttaacccggaaaaggaacatatataatttatgtgtgttcgataaattcaggttatttagatgcttagtttttgtacctttcttgttttgtttaggattttgatagtgttagtatttttatatttttgtacgattgcataatgttcttttttatacagttctgttttaataaaatagacgatagctagagacgttagggcagccacaagccagttaggtagcggatagtaggtaggaacagacttttactatttcataacgcgtcaattaccacctgatttggaccaattcacgggatttgtccaaggtggacgggccacctttacttaacccggaaaaggaacatatataatttatgtgtgttcgataaa

SEQ ID NO: 1870 - DNA, 975 bp, synthetic construct
  source 1..975: mol_type = other DNA
ttcaggttatttagatgcttagtttttgtacctttcttgttttgtttaggattttgatagtgttagtatttttatatttttgtacgattgcataatgttcttttttatacagttctgttttaataaaatagacgatagctagagacgttagggcagccacaagccagttaggtagcggatagtaggtaggaacagacttttactatttcataacgcgtcaattaccacctgatttggaccaattcacgggatttgtccaaggtggacgggccacctttacttaacccggaaaaggaacatatataatttatgtgtgttcgataaattcaggttatttagatgcttagtttttgtacctttcttgttttgtttaggattttgatagtgttagtatttttatatttttgtacgattgcataatgttcttttttatacagttctgttttaataaaatagacgatagctagagacgttagggcagccacaagccagttaggtagcggatagtaggtaggaacagacttttactatttcataacgcgtcaattaccacctgatttggaccaattcacgggatttgtccaaggtggacgggccacctttacttaacccggaaaaggaacatatataatttatgtgtgttcgataaattcaggttatttagatgcttagtttttgtacctttcttgttttgtttaggattttgatagtgttagtatttttatatttttgtacgattgcataatgttcttttttatacagttctgttttaataaaatagacgatagctagagacgttagggcagccacaagccagttaggtagcggatagtaggtaggaacagacttttactatttcataacgcgtcaattaccacctgatttggaccaattcacgggatttgtccaaggtggacgggccacctttacttaacccggaaaaggaacatatataatttatgtgtgttcgataaa

SEQ ID NO: 1871 - DNA, 931 bp, synthetic construct
  source 1..931: mol_type = other DNA
gtctcatgactctcttagtctttcgtagtgaacggacgtgttttatttggtgctacgtgaaatacaagttttttcttactaagttccacgttttatatcctaggaacttaagactttatatttacattaaataattgttatttaaaataactttttaatttcaacgaaatcgaacggtaatttcgcgagtttccgcgaagtgtcaataactcccgttatattaacggtacaagcttgaaatttcaaagaaagtgggcacagtaattaactaatactatatcaaagtttggtgcaattcgcgccataagaacaaaagttatcgcgagttgaatattattctagcgcaagtcccgctataagcatctattggtcgtgcacaacaaacaacatatgctgcttgttaattgttgatcatcacaagggcacgtgaaaatacttgttttctcattggcatttagtattatagccagcaggctgacctcgaaagttttttgaactctcatctgtaacttctcgcatgacacttgtgtcatcgcttacataaatatcatgatacattatatatcatgacacaaatatcatgagagcaggaaattttttttgatttgaatatatagaggaaaaaaaaaaaaaaaaaaattaaaattaaataaaaactgtttacttcgaaaattatgactacctcagcaggtttttgaacctgcatttatatttgctgaaattaatatcatcaagttgagtcaaggacacgtgacgtgttattgttggaggcctatctaaatccatataattgtaagtactacatccgtctgaatatatatatatatatatatatatgtatttttatatatatgtgtgtatgtgtatatattttgtatgagtgtttcgtgcttgcacttcaccggctagtgagattcttttttataccaca

SEQ ID NO: 1872 - DNA, 1277 bp, synthetic construct
  source 1..1277: mol_type = other DNA
gccggcgtctcaatctgctaccgcggggtatatgcgctgtccgcggtgccttcgggcgcagggttacgacccaacagagattgtttcgcttattggtgattgttcacgctcttgtacctcacgagtgtcggtcggtcggctccgcgggcgtggttgcctcgagccgggtcatggacccggcccgtcggtgtttctcgccccgggactggacgccgtcatacggacaagatggtagggcggggttgaccctcaccggtcggcgcgtattaatcgcgcctctcggcgagatgtctccccgtcacttggatttccgttttgcggcggcttggacgcggctcgggacctgaaggcgctcgcctccgtactgcctggttttcaggtggcggtgggtgtcagctggtctcgtgtccccgtgctcgcgcaggcgctctaatcgtcttgtctacgtgaggccagagtcgggctgtcggcggcgacgtgggccggctaccgtcctgtgtgtgacacgagagtgtccctcacaggttgcgtcctaccccacgctcggtgttgaacgtccggactcaagggctggctcggtcggcgatgcaagggtcagaattacttcacggcccactcttcattgaagggtgagttgatggcaaaatcgatcctcacttccggactcatgaatgtggtattaattcgtctaagtgccggtcggatactgaccacttaagtggtttgctaacgaggcaatcgtcggtggggcgcatcgccgggtgatcttggcaggtcgttcggtgtatcgccttactgtgattttggtagttacagcccggcatggcccggggactcaccacagagtcctcgctaaatgtcgggagtggccgcgcgtcgttcgcgcgtgcgttggtgctggttagccccgcgggtgtcatttcaccgtccgcggtgccgtaatcgggtgcagggcttcggcccaatcagaagggtattgtctggaggcgtaccgcgtgggttaaaaccgtccgcggtgccgagaggcaggagggtgttacaccttaaacgtacaatagcaataccttgttaaccatcaccatcgcgcgtgcgcttgtcgggcgaccgcatcggactcatgtggagtccggctgtctcttccgtgatcaactcggcgggggtacatgaaacacgccctttcgtccgaggtatctcgcgtaatagtcgggtaaccccccgaccagtcccaggtcggcctctgagcagcgaggccggtgcgccggtacagaccgggatga

SEQ ID NO: 1873 - DNA, 2346 bp, synthetic construct
  source 1..2346: mol_type = other DNA
agtaactatgactctcttaagtctagttacaactgggcatcgctgcagagatcgcacctcctcgtggtcccgctggtagcccttcgaagggtgactaagtcgatctctgccccaggtacggagccgttgggactcaccagtccaacgtaatactcgacggatcgatccgaacaaacgacccaacacccgtgcgttttattctgtctttttattgccgatcccctcagaagaactcgtcaagaaggcgatagaaggcgatgcgctgcgaatcgggagcggcgataccgtaaagcacgaggaagcggtcagcccattcgccgccaagctcttcagcaatatcacgggtagccaacgctatgtcctgatagcggtcggccgctttacttgtacagctcgtccatgccgagagtgatcccggcggcggtcacgaactccagcaggaccatgtgatcgcgcttctcgttggggtctttgctcagggcggactgggtgctcaggtagtggttgtcgggcagcagcacggggccgtcgccgatgggggtgttctgctggtagtggtcggccagctgcacgctgccgtcctcgatgttgtggcggatcttgaagttcaccttgatgccgttcttctgcttgtcggccatgatatagacgttgtggctgttgtagttgtactccagcttgtgccccaggatgttgccgtcctccttgaagtcgatgcccttcagctcgatgcggttcaccagggtgtcgccctcgaacttcacctcggcgcgggtcttgtagttgccgtcgtccttgaagaagatggtgcgctcctggacgtagccttcgggcatggcggacttgaagaagtcgtgctgcttcatgtggtcggggtagcggctgaagcactgcacgccgtaggtcagggtggtcacgagggtgggccagggcacgggcagcttgccggtggtgcagatgaacttcagggtcagcttgccgtaggtggcatcgccctcgccctcgccggacacgctgaacttgtggccgtttacgtcgccgtccagctcgaccaggatgggcaccaccccggtgaacagctcctcgcccttgctcaccatggtggcgaattcgaagcttgagctcgagatctgagtccggtagcgctagcggatctgacggttcactaaaccagctctgcttatatagacctcccaccgtacacgcctaccgcccatttgcgtcaatggggcggagttgttacgacattttggaaagtcccgttgattttggtgccaaaacaaactcccattgacgtcaatggggtggagacttggaaatccccgtgagtcaaaccgctatccacgcccattgatgtactgccaaaaccgcatcaccatggtaatagcgatgactaatacgtagatgtactgccaagtaggaaagtcccataaggtcatgtactgggcataatgccaggcgggccatttaccgtcattgacgtcaatagggggcgtacttggcatatgatacacttgatgtactgccaagtgggcagtttaccgtaaatactccacccattgacgtcaatggaaagtccctattggcgttactatgggaacatacgtcattattgacgtcaatgggcgggggtcgttgggcggtcagccaggcgggccatttaccgtaagttatgtaacgcggaactccatatatgggctatgaactaatgaccccgtaattgattactattaaattcctgcagttcaggttatttagatgcttagtttttgtaccttttcttgtttgtttaggattttgatagtgttagtatttttatatttttgtaggattgcataatgttcttcatatataattctgttttaataaaatagacgatagctagagacgttagggcagccacaagccagttaggtagcggatagtaggtgggaacagacttttactacttcataacgcgtcaattaccacccgatttggaccaattcaccggatttgtccaaggtggacgggccacctttacttaacccggaaaaggaacatatataatttatgtgtgttcgataaatagccaaatgcctcgtcatcaccggtagacatgataagatacattgatgagtttggacaaaccacaactagaatgcagtgaaaaaaatgctttatttgtgaaatttgtgatgctattgctttatttgtaaccattataagctgcaataaacaagttaacaacaacaaaaaaaaaaaaaaaaaaaaaaaaaaaaaaacgttgactaaaaaaaaaaaaaaaaaaaaaaaaaaaaaaaaaaaaaaaaaaaaaaaaaaaaaaaaaaaaaaaaaaaaaaaaaa

SEQ ID NO: 1874 - DNA, 303 bp, synthetic construct
  source 1..303: mol_type = other DNA
gacgggatcatagttactaactgggcatagctgcggggggtcacacctccacgtggtcccgccggataccccttgtgggtaaccgagttgaccccctgccccagtgtgaacggagctatggttacttcctccctatcaagtggcctcaccaaccacttgatagtatctccctaaggtgaaacaaagttcagaaacgcttcgtgtctaaattccttagcccacggtaatagttgggcacgtccgacaagttctggtggggtactgtcggactgatcgaaatccccacaaattcggacattcgaa

SEQ ID NO: 1875 - protein, 451 aa, synthetic construct
AMASIEDNPEIEDDIFRKKRLTIMDLHPGAGKTKRYLPAIVREAIKRGLRTLILAPTRVVAAEMEEALRGLPIRYQTPAIRAEHTGREIVDLMCHATFTMRLLSPIRVPNYNLIIMDEAHFTDPASIAARGYISTRVEMGEAAGIFMTATPPGSRDPFPQSNAPIMDEEREIPERSWNSGHEWVTDFKGKTVWFVPSIKAGNDIAACLRKNGKKVIQLSRKTFDSEYIKTRTNDWDFVVTTDISEMGANFKAERVIDPRRCMKPVILTDGEERVILAGPMPVTHSSAAQRRGRVGRNPKNENDQYIYMGEPLENDEDCAHWKEAKMLLDNINTPEGIIPSMFEPEREKVDAIDGEYRLRGEARKTFVDLMRRGDLPVWLAYRVAAEGINYADRRWCFDGVKNNQILEENVEVEIWTKEGERKKLKPRWLDARIYSDPLALKEFKEFAAGRK

SEQ ID NO: 1876 - DNA, 290 bp, synthetic construct
  source 1..290: mol_type = other DNA
cagtttttttttttggttttatttatcatttcttgtaaatacttctgtaatttttcatatgtacattcttttctcaataaaatcagacgggagctggggacgcagggcagccacaagccagaggtagcaagccagaaggagatggatagtaagtggggacgggacctattatttcataacgcgtcaattaccatctgatttggaccaattcaccggatttgtccgaggtggacgggccacctttacttaacccggaaaaggaacatatatatttatatgtgttcgaaaaa

SEQ ID NO: 1877 - DNA, 324 bp, synthetic construct
  source 1..324: mol_type = other DNA
tgaatttagattgtactgtttgtagatttttgtaggactgtttttatatattgttttcttgtatgtaacttttgtaatttttattacttgtactttattttataaataaactagacggtagctaggttcgtagggcagccacaagccagttaggtagctcatagtaggtagggacagagactttaattctaaacgcgtcaagtaccacctgatttggactgaattaccggacctgaaccaatttaccggatatgtccaaggtggacgggccacctttacttaacccggaaaaggagcatatattatttatatgtgttcgaaata

SEQ ID NO: 1878 - DNA, 193 bp, synthetic construct
  source 1..193: mol_type = other DNA
acttgtcggccccttcccggctgtcggtgacctggacagtggaattggttttgggtgggaggggttcatccttctatcgtgtcaatgtaccatcacccagactttgggtccaaaattctaatctggaccaggtggacgggccacctttacttaacccggaaaaggaacatataatctttatatgtttattaag

SEQ ID NO: 1879 - DNA, 328 bp, synthetic construct
  source 1..328: mol_type = other DNA
tttagttttcttttgtaacttttatagcttttagtatgtttttgtagctccctgctttatagtatttttacattcttgtatctttttgtatttttttatatgctttaatattttttttaaaaaatttaataaaaagacggtagctaggggcgtagggcagccacaagccagttaggtagctgatagtgagtagggacaggactttttatttcataacgcgtcaattaccacccgaattggaccaatttaccggatttgtccaaggtggacgggccacctttacttaacccggaaaaggaacatatattatttatatgtgttcgaaaaa

SEQ ID NO: 1880 - DNA, 192 bp, synthetic construct
  source 1..192: mol_type = other DNA
actcgtcggccccttcccggctgtcggtgacctggacagtggaattggttttgggtgggaggggttcatccttctatcgtgtcaatataccatcacccagattttgggtccaaattctgatctggaccaggtggacgggccacctttacttaacccggaaaaggaacatataatctttatatgtttattaag

SEQ ID NO: 1881 - DNA, 4519 bp, synthetic construct; identical to SEQ ID NO: 563
  source 1..4519: mol_type = other DNA

SEQ ID NO: 1882 - DNA, 350 bp, synthetic construct; identical to SEQ ID NO: 218
  source 1..350: mol_type = other DNA

SEQ ID NO: 1883 - DNA, 275 bp, synthetic construct
  source 1..275: mol_type = other DNA
tgttgtttatttttgtacatattgttgttttatttatttccactgtacattcgattcaataaacttcgacgggtgctggggcgcggggcagccacaggccagatatcacaagccagaaggacgtggacagtaagtagggacgggacttattatttcataacgcgtcaattaccatctgatttggaccaatttaccgaatttgtccaaggtggacgggccacctttacttaacccggaaaaggagcatatatatttatatatatgtgttcgaaaaa

SEQ ID NO: 1884-1889 - skipped (6 entries)

SEQ ID NO: 1890 - DNA, 229 bp, synthetic construct
  source 1..229: mol_type = other DNA
gcggccgaccgctatcaggacatagcgttggctacccgtgatattgctgaagagcttggcggcgaatgggctgaccgcttcctcgtgctttacggtatcgccgctcccgattcgcagcgcatcgccttctatcgccttcttgacgagttcttctgaggggatcggcaataaaaagacagaataaaacgcacgggtgttgggtcgtttgttcggatcgatccgtcgagta

SEQ ID NO: 1891 - DNA, 51 bp, synthetic construct
  source 1..51: mol_type = other DNA
gaaataagagagaaaagaagagtaagaagaaatataagagaattcgccacc

SEQ ID NO: 1892-1975 - skipped (84 entries)

SEQ ID NO: 1976 - protein, 1665 aa, synthetic construct
MAPKKKRKVNISGSSCGSPNSADTSSDFKDLWTKLKECHDREVQGLQVKVTKLKQERILDAQRLEEFFTKNQQLREQQKVLHETIKVLEDRLRAGLCDRCAVTEEHMRKKQQEFENIRQQNLKLITELMNERNTLQEENKKLSEQLQQKIENDQQHQAAELECEEDVIPDSPITAFSFSGVNRLRRKENPHVRYIEQTHTKLEHSVCANEMRKVSKSSTHPQHNPNENEILVADTYDQSQSPMAKAHGTSSYTPDKSSFNLATVVAETLGLGVQEESETQGPMSPLGDELYHCLEGNHKKQPFESGSETPGTSESATPEGSPKRKVSSAEGAAKEEPKRRSARLSAKPPAKVEAKPKKAAAKDKSSDKKVQTKGKRGAKGKQAEVANQETKEDLPAENGETKTEESPASDEAGEKEAKSDSGSETPGTSESATPESYEQLAPQPCVGETLHSSLPRDSELFVPEEGSSEKESEDAPKTSPPTPGKHGLEQTGEEKVMVTVPDKNPPCPCCGTRVNSVLNLIEHLKVSHGKRGVCFRCAKCGKENSNYHSVVCHFKKCRGPETEKAPAGEWICEVCNRDFTTKIGLGQHKRLAHPAVRNQERIVASQPKETSNRGAHKRCWTKEEEELLIRLEAQFEGNKNINKLIAEHITTKTAKQISDKRRLLSRKPAEEPREEPGTCHHTRRAAASLRTEPEMSHHAQAEDRDNGPGKRPAPGRAAAGGRTMDEIRRHPDKGNGQQRPTKQKSEEQLQAYYKKTLEERLSAGALNTFPRAFKQVMEGRDIKLVINQTAQDCFGCLESISQIRTATRDKKDTVTREKHPKKPFQKWMKKRAIKKGNYLRFQRLFYLDRGKLAKIILDDIECLSCDIPLSEIYSVFKTRWETTGSFKSLGDFKTYGKADNTAFRELITAKEIEKNVQEMSKGSAPGPDGITLGDVVKMDPEFSRTMEIFNLWLTTGKIPDMVRGCRTVLIPKSSKPDRLKDINNWRPITIGSILLRLFSRIVTARLSKACPLNPRQRGFIRAAGCSENLKLLQTIIWSAKREHRPLGVVFVDIAKAFDTVSHQHIIHALQQREVDPHIVGLVSNMYENISTYITTKRNTHTDKIQIRVGVKQGDPMSPLLFNLAMDPLLCKLEESGKGYHRGQSSITAMAFADDLVLLSDSWENMNTNISILETFCNLTGLKTQGQKCHGFYIKPTKDSYTINDCAAWTINGTPLNMIDPGESEKYLGLQFDPWIGIARSGLSTKLDFWLQRIDQAPLKPLQKTDILKTYTIPRLIYIADHSEVKSALLETLDQKIRTAVKEWLHLPPCTCDAILYSSTRDGGLGITKLAGLIPSVQARRLHRIAQSSDDTMKCFMEKEKMEQLHKKLWIQAGGDRENIPSIWEAPPSSEPPNNVSTNSEWEAPTQKDKFPKPCNWRKNEFKKWTKLASQGRGIVNFERDKISNHWIQYYRRIPHRKLLTALQLRANVYPTREFLARGRQDQYIKACRHCDADNESCAHIIGNCPVTQDARIKRHNYICELLLEEAKKKDWVVFKEPHIRDSNKELYKPDLIFVKDGRALVVDVTVRYEAAKSSLEEAAAEKVRKYKHLETEVRHLTNAKDVTFVGFPLGARGKWHQDNFKLLTELGLSKSRQVKMAETFSTVALFSSVDIVHMFASRARKSMVM

SEQ ID NO: 1977 - protein, 1665 aa, synthetic construct
MAPKKKRKVNISGSSCGSPNSADTSSDFKDLWTKLKECHDREVQGLQVKVTKLKQERILDAQRLEEFFTKNQQLREQQKVLHETIKVLEDRLRAGLCDRCAVTEEHMRKKQQEFENIRQQNLKLITELMNERNTLQEENKKLSEQLQQKIENDQQHQAAELECEEDVIPDSPITAFSFSGVNRLRRKENPHVRYIEQTHTKLEHSVCANEMRKVSKSSTHPQHNPNENEILVADTYDQSQSPMAKAHGTSSYTPDKSSFNLATVVAETLGLGVQEESETQGPMSPLGDELYHCLEGNHKKQPFESGSETPGTSESATPEGSPKRKVSSAEGAAKEEPKRRSARLSAKPPAKVEAKPKKAAAKDKSSDKKVQTKGKRGAKGKQAEVANQETKEDLPAENGETKTEESPASDEAGEKEAKSDSGSETPGTSESATPESYEQLAPQPCVGETLHSSLPRDSELFVPEEGSSEKESEDAPKTSPPTPGKHGLEQTGEEKVMVTVPDKNPPCPCCGTRVNSVLNLIEHLKVSHGKRGVCFRCAKCGKENSNYHSVVCHFKKCRGPETEKAPAGEWICEVCNRDFTTKIGLGQHKRLAHPAVRNQERIVASQPKETSNRGAHKRCWTKEEEELLIRLEAQFEGNKNINKLIAEHITTKTAKQISDKRRLLSRKPAEEPREEPGTCHHTRRAAASLRTEPEMSHHAQAEDRDNGPGRRPLPGRAAAGGRTMDEIRRHPDKGNGQQRPTKQKSEEQLQAYYKKTLEERLSAGALNTFPRAFKQVMEGRDIKLVINQTAQDCFGCLESISQIRTATRDKKDTVTREKHPKKPFQKWMKKRAIKKGNYLRFQRLFYLDRGKLAKIILDDIECLSCDIPLSEIYSVFKTRWETTGSFKSLGDFKTYGKADNTAFRELITAKEIEKNVQEMSKGSAPGPDGITLGDVVKMDPEFSRTMEIFNLWLTTGKIPDMVRGCRTVLIPKSSKPDRLKDINNWRPITIGSILLRLFSRIVTARLSKACPLNPRQRGFIRAAGCSENLKLLQTIIWSAKREHRPLGVVFVDIAKAFDTVSHQHIIHALQQREVDPHIVGLVSNMYENISTYITTKRNTHTDKIQIRVGVKQGDPMSPLLFNLAMDPLLCKLEESGKGYHRGQSSITAMAFADDLVLLSDSWENMNTNISILETFCNLTGLKTQGQKCHGFYIKPTKDSYTINDCAAWTINGTPLNMIDPGESEKYLGLQFDPWIGIARSGLSTKLDFWLQRIDQAPLKPLQKTDILKTYTIPRLIYIADHSEVKSALLETLDQKIRTAVKEWLHLPPCTCDAILYSSTRDGGLGITKLAGLIPSVQARRLHRIAQSSDDTMKCFMEKEKMEQLHKKLWIQAGGDRENIPSIWEAPPSSEPPNNVSTNSEWEAPTQKDKFPKPCNWRKNEFKKWTKLASQGRGIVNFERDKISNHWIQYYRRIPHRKLLTALQLRLNVYGTREFLARGRQDQYIKACRHCDADNESCAHIIGNCPVTQDARIKRHNYICELLLEEAKKKDWVVFKEPHIRDSNKELYKPDLIFVKDGRALVVDVTVRYEAAKSSLEEAAAEKVRKYKHLETEVRHLTNAKDVTFVGFPLGARGKWHQDNFKLLTELGLSKSRQVKMAETFSTVALFSSVDIVHMFASRARKSMVM

SEQ ID NO: 1978 - protein, 1665 aa, synthetic construct
MAPKKKRKVNISGSSCGSPNSADTSSDFKDLWTKLKECHDREVQGLQVKVTKLKQERILDAQRLEEFFTKNQQLREQQKVLHETIKVLEDRLRAGLCDRCAVTEEHMRKKQQEFENIRQQNLKLITELMNERNTLQEENKKLSEQLQQKIENDQQHQAAELECEEDVIPDSPITAFSFSGVNRLRRKENPHVRYIEQTHTKLEHSVCANEMRKVSKSSTHPQHNPNENEILVADTYDQSQSPMAKAHGTSSYTPDKSSFNLATVVAETLGLGVQEESETQGPMSPLGDELYHCLEGNHKKQPFESGSETPGTSESATPEGSPKRKVSSAEGAAKEEPKRRSARLSAKPPAKVEAKPKKAAAKDKSSDKKVQTKGKRGAKGKQAEVANQETKEDLPAENGETKTEESPASDEAGEKEAKSDSGSETPGTSESATPESYEQLAPQPCVGETLHSSLPRDSELFVPEEGSSEKESEDAPKTSPPTPGKHGLEQTGEEKVMVTVPDKNPPCPCCGTRVNSVLNLIEHLKVSHGKRGVCFRCAKCGKENSNYHSVVCHFKKCRGPETEKAPAGEWICEVCNRDFTTKIGLGQHKRLAHPAVRNQERIVASQPKETSNRGAHKRCWTKEEEELLIRLEAQFEGNKNINKLIAEHITTKTAKQISDKRRLLSRKPAEEPREEPGTCHHTRRAAASLRTEPEMSHHAQAEDRDNGPGRRPLPGRAAAGGRTMDEIRRHPDKGNGQQRPTKQKSEEQLQAYYKKTLEERLSAGALNTFPRAFKQVMEGRDIKLVINQTAQDCFGCLESISQIRTATRDKKDTVTREKHPKKPFQKWMKKRAIKKGNYLRFQRLFYLDRGKLAKIILDDIECLSCDIPLSEIYSVFKTRWETTGSFKSLGDFKTYGKADNTAFRELITAKEIEKNVQEMSKGSAPGPDGITLGDVVKMDPEFSRTMEIFNLWLTTGKIPDMVRGCRTVLIPKSSKPDRLKDINNWRPITIGSILLRLFSRIVTARLSKACPLNPRQRGFIRAAGCSENLKLLQTIIWSAKREHRPLGVVFVDIAKAFDTVSHQHIIHALQQREVDPHIVGLVSNMYENISTYITTKRNTHTDKIQIRVGVKQGDPMSPLLFNLAMDPLLCKLEESGKGYHRGQSSITAMAFADDLVLLSDSWENMNTNISILETFCNLTGLKTQGQKCHGFYIKPTKDSYTINDCAAWTINGTPLNMIDPGESEKYLGLQFDPWIGIARSGLSTKLDFWLQRIDQAPLKPLQKTDILKTYTIPRLIYIADHSEVKSALLETLDQKIRTAVKEWLHLPPCTCDAILYSSTRDGGLGITKLAGLIPSVQARRLHRIAQSSDDTMKCFMEKEKMEQLHKKLWIQAGGDRENIPSIWEAPPSSEPPNNVSTNSEWEAPTQKDKFPKPCNWRKNEFKKWTKLASQGRGIVNFERDKISNHWIQYYRRIPHRKLLTALQLRANVYGTREFLARGRQDQYIKACRHCDADNESCAHIIGNCPVTQDARIKRHNYICELLLEEAKKKDWVVFKEPHIRDSNKELYKPDLIFVKDGRALVVDVTVRYEAAKSSLEEAAAEKVRKYKHLETEVRHLTNAKDVTFVGFPLGARGKWHQDNFKLLTELGLSKSRQVKMAETFSTVALFSSVDIVHMFASRARKSMVM

SEQ ID NO: 1979 - protein, 1259 aa, synthetic construct; identical to SEQ ID NO: 770

SEQ ID NO: 1980 - protein, 1238 aa, synthetic construct; identical to SEQ ID NO: 771

SEQ ID NO: 1981 - protein, 1238 aa, synthetic construct; identical to SEQ ID NO: 774

SEQ ID NO: 1982 - protein, 1238 aa, synthetic construct; identical to SEQ ID NO: 769

SEQ ID NO: 1983 - protein, 1363 aa, synthetic construct
MWPPTFQGGPIPMGSGSDLGGGVWFRAPARLSRVSVGSQTSPSDWVDLLSWNFNFLPGSKSQRVDLLSRHWVDLLSKNDQVDLVAQNLPSKLSPDSAENELALLVNLEFYRSDLHEGVHFSANWEGLSGLPEVYEQLAPQPCAGDSSHSSLPRDTKLFVLEQKGSVEKESEDVPKTSPPTPGKPGEQTPEETVTVTVPDKNPPCPCCGTRLNSVLGLIEHLKGSHGKKRVCFRCVKCGKEGTNYHSIVCHFPKCRGAETEAAPAGEWICEVCGRDFQTKIGLGQHKRHAHPLIRNQERIAASHPKETSNRGAHKRCWTKEEEEMLIKLEAQFEGHKNINKLIAEHITSKTAKQISDKRRLLPRKPDKDLEEEPAVSTRTRRAAAGLRKEPGVSHQSQATIEDNGPGRSHRPGKPAAGKKTMDEISHRPDKGNGRRGTIKQQMAGQLQAHYHRTLGERLSAGAINTFPRAFKQLMEGQEMQETINQSAQDCFGCLESISQIRTATRDKINKGTREKHPKRPFQKWMKKRAIRKGNYLRFQRLFHLDRGKLAKIILDDVETLSCDIPPSEIYSVFKDRWETPGNFNSLGEFQSNGKADNSAFRDLITAKEIEKNVQEMSKGSAPGPDGITLGDVKKMDPEYSRTAEIFNLWLTSGKIPDMVRGCRTVLIPKSTEPERLKDINNWRPITIGSILLRLFSRIVTARLSKACPLNPRQRGFIRAAGCSENLKLLQSVMRSAKKEHRPLGVVFVDIAKAFDTISHQHIIHALQQREVDPHIIGLVSNMYKDTSTYITVKKNTHTDEIHFRVGVKQGDPMSPLLFNLAMDPLLCKLEESGKGYHRGRSSITAMAFADDLVLLSDSWENMETNIKILETFCNLTGLKTQGVKCHGYYIKPTKDSYTVNDCAAWTINGTPLNMIDPGETEKYLGLQIDPWTGIAKSNLSTKLEYWLQRIDQAPLKPLQKVDILKTYTIPRMTYLADHSDLKAGFLESLDQKIRTTVKDWLHLPSCTCDAILYSSTKDGGLGITKLAGLIPSVQARRLHRIAQSSDETMKMFLEKDQMEQMHKKLWIQAGGDREKIPSIWDAPPVSEPSNSASTISEWEAPSLKTKFPKPCNWRKNEFKNWTKLVSQGRGIINFEGDKISNHWLQYYRSIPHRKLLTALQLRANVYPTREFLARGRQDKYIKACRHCDADIESCAHIIGNCPVTQDARIKRHNYICEVLLEEAKKKDWVVFQEPHIRDTTKELYKPDLIFVKDARALVVDVTVRYEAAKTSLEDAAAEKVNKYKHLETEVRNLTNAKDVAFMGFPLGARGKWHQKNFELLEALGLSKSRQEKIARTLSTTALLSSVDIVRMFASRARKLGNQE

SEQ ID NO: 1984 - protein, 1251 aa, synthetic construct; identical to SEQ ID NO: 772

SEQ ID NO: 1985 - protein, 1251 aa, synthetic construct; identical to SEQ ID NO: 773

SEQ ID NO: 1986 - protein, 1251 aa, synthetic construct; identical to SEQ ID NO: 765

SEQ ID NO: 1987 - protein, 1388 aa, synthetic construct; identical to SEQ ID NO: 766

SEQ ID NO: 1988 - protein, 1389 aa, synthetic construct; identical to SEQ ID NO: 767

SEQ ID NO: 1989 - protein, 1665 aa, synthetic construct; identical to SEQ ID NO: 975

SEQ ID NO: 1990-2882 - skipped (893 entries)

SEQ ID NO: 2883 - DNA, 324 bp, synthetic construct
  source 1..324: mol_type = other DNA
ccaaaggcggctttggtgagagtatagttacaaactgggcatcgctgcagagatcgcacctcctcgtggtcccgctggtaaccctgcgtagggtgactaagtcgatcttctgccccaggtacggagccgttgggactcaccagtccaacgaactcctgccaaaattcggtgaaacaaattcctcggtaaaagccgcacggctcattgcccgaaacctggcccccgggtttcaaagggggagcaaaagtttggtagattggcaaggggggccactaccactcccgcaacacccccccaccttgcaaagaccaatattttccggac

SEQ ID NO: 2884 - DNA, 471 bp, synthetic construct
  source 1..471: mol_type = other DNA
gttgggaagaagcaatattggttgggaagaagcaatacctccacgtggtccaactggtaacactcaaactctgatcttcattgtgcgagtggctaaatttgcttcgtcatcctctgagagtgtgttgccctcgggcaaaaattttccgtccttgcgtagagtcattgttgtttcaattgacttttacactctcagggggcattttattattttaggtattataccatatctgctgtccgggacgagtctttacgagactgtgttgtgcgtcgccgaatatttttacaaattttgttattggccagtgcttttatttcgtgttgtgccttgcgggttgtgcgggttgtgcggtttgtggggttgtgcggttagtgccgttcgttctttgtgttgtgcggttcgtatttttggtgtcgtattcgggcgtttttatatacatttattgttcgaattcaataaagtttcgttatc

SEQ ID NO: 2885 - DNA, 1000 bp, synthetic construct
  source 1..1000: mol_type = other DNA
tagtattggtgtgcggacgtgtatcaaatcgctccgtcaaaaagtgaaattaatattagttctagctcgtattggaaaaataaaaactcggaaaagtttacataaggtcacccccgtcattttaaaacaaaaatcaagcaataagaccaccgcgtttgctcacaatttgtgttttaattttttgaattgcatttgtgaaataaaaaaaataaattgattcgggagagaatttcggaaaaaaaagcataagagacgacatcgtccacatacgatccacataaaattccatctcaaaattgtttttgttgtaataatttcccttgattctgtgaagaatccacctaattcaccacctttttcacctttttcaccaccaaagtttaaagccattttccatagcccccagccatctgtcacccgaaatactaaaagtgccccctagtctgacatttcatctgtcattttccatcaaaaaattgtgaaatcactcgaggattgctctagaactttcggattacttttggtattcaattttctcaaaatctgtaaatttcccctcgaaaataaaataataagtgaagctccgaaccccaacctcttcggttacagtcttgaatacgacatcacgccatctggtaaaaaacagcaggaaactccaacttctccggtttgtgtatctgatacataattttactaatcaacatctggttgtaattttcgataaatacttgcgccatctagcaaaaagagctcacaccctgaaaataacacctagtgaggacactttccataattttaataattccgaagaacagaaccgaacaaaatcaccagctttcgacacaaaggggtatttcagcattaatacttcatggctaattattcacatagcaaagcacattcaaacaatagaaagagagtattgcgaatttaaattattcgtatagaagtgtggtttaattaccaaaaataaactaaccggtcttgtgaaatatccaca

SEQ ID NO: 2886 - DNA, 130 bp, synthetic construct; identical to SEQ ID NO: 215
  source 1..130: mol_type = other DNA

SEQ ID NO: 2887-3000 - skipped (114 entries)

SEQ ID NO: 3001 - DNA, 2310 bp, synthetic construct
  source 1..2310: mol_type = other DNA
agtaactatgactctcttaagacgggatcatagttactaactgggcacagctgcggggggtcacacctccacgtggtcccgctggataccccttgtgggtaaccgagttgaccccctgccccagtggcacggagctatggttacttcctccctatcgagtggactcaccaaccacttgatagtatctcccaaaggtgaaacaaagttctgaaacgctccgtttctaaattccttagcccacggtaatagttgggcacctccgacaagttcggtggggtactgtcggattgatcaaatcctcacaattggcacttcgaataccgtacgtcgacgcggcctactcgacggatcgatccgaacaaacgacccaacacccgtgcgttttattctgtctttttattgccgatcccctcagaagaactcgtcaagaaggcgatagaaggcgatgcgctgcgaatcgggagcggcgataccgtaaagcacgaggaagcggtcagcccattcgccgccaagctcttcagcaatatcacgggtagccaacgctatgtcctgatagcggtcggccgctttacttgtacagctcgtccatgccgagagtgatcccggcggcggtcacgaactccagcaggaccatgtgatcgcgcttctcgttggggtctttgctcagggcggactgggtgctcaggtagtggttgtcgggcagcagcacggggccgtcgccgatgggggtgttctgctggtagtggtcggccagctgcacgctgccgtcctcgatgttgtggcggatcttgaagttcaccttgatgccgttcttctgcttgtcggccatgatatagacgttgtggctgttgtagttgtactccagcttgtgccccaggatgttgccgtcctccttgaagtcgatgcccttcagctcgatgcggttcaccagggtgtcgccctcgaacttcacctcggcgcgggtcttgtagttgccgtcgtccttgaagaagatggtgcgctcctggacgtagccttcgggcatggcggacttgaagaagtcgtgctgcttcatgtggtcggggtagcggctgaagcactgcacgccgtaggtcagggtggtcacgagggtgggccagggcacgggcagcttgccggtggtgcagatgaacttcagggtcagcttgccgtaggtggcatcgccctcgccctcgccggacacgctgaacttgtggccgtttacgtcgccgtccagctcgaccaggatgggcaccaccccggtgaacagctcctcgcccttgctcaccatggtggcgaattcgaagcttgagctcgagatctgagtccggtagcgctagcggatctgacggttcactaaaccagctctgcttatatagacctcccaccgtacacgcctaccgcccatttgcgtcaatggggcggagttgttacgacattttggaaagtcccgttgattttggtgccaaaacaaactcccattgacgtcaatggggtggagacttggaaatccccgtgagtcaaaccgctatccacgcccattgatgtactgccaaaaccgcatcaccatggtaatagcgatgactaatacgtagatgtactgccaagtaggaaagtcccataaggtcatgtactgggcataatgccaggcgggccatttaccgtcattgacgtcaatagggggcgtacttggcatatgatacacttgatgtactgccaagtgggcagtttaccgtaaatactccacccattgacgtcaatggaaagtccctattggcgttactatgggaacatacgtcattattgacgtcaatgggcgggggtcgttgggcggtcagccaggcgggccatttaccgtaagttatgtaacgcggaactccatatatgggctatgaactaatgaccccgtaattgattactattaaattcctgcaggaattcgaagcttgatacttattctgacttatttagatttgtaatgtttagatgtagtattgtagcatgtagttttgtagattgtaatgtagaatgtaataaaatggactgggatctcgtgatgattaccttaatcatgacgctcactggactgacttggttggtggacgggccaccttataaaacccggaaaaagtacacataccctgttatgtgttcgtaagtagccaaatgcctcgtcatcccggtagcgctagcaccggtaaaaaaaaaaaaaaaaaaaaaaaaaaaaaaaacgttgactaaaaaaaaaaaaaaaaaaaaaaaaaaaaaaaaaaaaaaaaaaaaaaaaaaaaaaaaaaaaaaaaaaaaaaaaaa

SEQ ID NO: 3002 - DNA, 2329 bp, synthetic construct
  source 1..2329: mol_type = other DNA
agtaactatgactctcttaagacgggatcatagttacaactgggcatagctgcggggggtcacacctccacgtggtcccgccggatactccttgtgggtaaccgagttgaccccctgccccagtgtgaacggagctatggttacttccaccctatcaagtggcctcaccaaccacttgatagtatctccctaaggtgaaacaaagttcagacttctgtctaaattcctcagcccacggtaatagttgggcacgaccgacaagttcggtggggtactgtcggtcctaccaaagccccacaattggacattcgaataccgtacgtcgacgcggcctactcgacggatcgatccgaacaaacgacccaacacccgtgcgttttattctgtctttttattgccgatcccctcagaagaactcgtcaagaaggcgatagaaggcgatgcgctgcgaatcgggagcggcgataccgtaaagcacgaggaagcggtcagcccattcgccgccaagctcttcagcaatatcacgggtagccaacgctatgtcctgatagcggtcggccgctttacttgtacagctcgtccatgccgagagtgatcccggcggcggtcacgaactccagcaggaccatgtgatcgcgcttctcgttggggtctttgctcagggcggactgggtgctcaggtagtggttgtcgggcagcagcacggggccgtcgccgatgggggtgttctgctggtagtggtcggccagctgcacgctgccgtcctcgatgttgtggcggatcttgaagttcaccttgatgccgttcttctgcttgtcggccatgatatagacgttgtggctgttgtagttgtactccagcttgtgccccaggatgttgccgtcctccttgaagtcgatgcccttcagctcgatgcggttcaccagggtgtcgccctcgaacttcacctcggcgcgggtcttgtagttgccgtcgtccttgaagaagatggtgcgctcctggacgtagccttcgggcatggcggacttgaagaagtcgtgctgcttcatgtggtcggggtagcggctgaagcactgcacgccgtaggtcagggtggtcacgagggtgggccagggcacgggcagcttgccggtggtgcagatgaacttcagggtcagcttgccgtaggtggcatcgccctcgccctcgccggacacgctgaacttgtggccgtttacgtcgccgtccagctcgaccaggatgggcaccaccccggtgaacagctcctcgcccttgctcaccatggtggcgaattcgaagcttgagctcgagatctgagtccggtagcgctagcggatctgacggttcactaaaccagctctgcttatatagacctcccaccgtacacgcctaccgcccatttgcgtcaatggggcggagttgttacgacattttggaaagtcccgttgattttggtgccaaaacaaactcccattgacgtcaatggggtggagacttggaaatccccgtgagtcaaaccgctatccacgcccattgatgtactgccaaaaccgcatcaccatggtaatagcgatgactaatacgtagatgtactgccaagtaggaaagtcccataaggtcatgtactgggcataatgccaggcgggccatttaccgtcattgacgtcaatagggggcgtacttggcatatgatacacttgatgtactgccaagtgggcagtttaccgtaaatactccacccattgacgtcaatggaaagtccctattggcgttactatgggaacatacgtcattattgacgtcaatgggcgggggtcgttgggcggtcagccaggcgggccatttaccgtaagttatgtaacgcggaactccatatatgggctatgaactaatgaccccgtaattgattactattaaattcctgcaggaattcgaagcttgatattactttgaatttgcttaattgtaatgtttagatatgataagtagatgtattagtggtagtataagtagtatatagaattgtagcttgtattgtagtatgttaataaaaacggactgggatctcgtgatgattacctttaatcatgacgctcactggatggacttggtaggtggacgggccaccttcataaaacccggaaaaagttcacatacttgttatgtgttcgtaaatagccaaatgcctcgtcatcccggtagcgctagcaccggtaaaaaaaaaaaaaaaaaaaaaaaaaaaaaaaacgttgactaaaaaaaaaaaaaaaaaaaaaaaaaaaaaaaaaaaaaaaaaaaaaaaaaaaaaaaaaaaaaaaaaaaaaaaaaa

SEQ ID NO: 3003 - DNA, 397 bp, synthetic construct
  source 1..397: mol_type = other DNA
ttattgctactgttctgtttatatatatcgtttttgctgtattactatttgttgttattattgtacttattgttctgtcttatattgtttcttgctatattatatattgctcttgtcgcatggttacttattgccttgctgtattactattcaattctttaataaaactacccctggtactcctgctctgttaccttggcactggaaaggtcgggacagtaagttggaactcgtattcatgacgtgtcacatcaacctaaatttggacaaaatactaattggacttgtcaaaattttctaccgaattggaccattttaccggattggacacaggtggacgggccacctttacttaactcggaaaagaaacatatataatttttatgtgtttgttaaa

SEQ ID NO: 3004 - DNA, 140 bp, synthetic construct
  source 1..140: mol_type = other DNA
acattttcattatattactttgaatttgtttagttgtagagtagtagatgtaataagtagatgtattagtggttgtatatgtagtattgtagtattgtagattgtaatgtagtatgtaaaaaaatctggactgggatctc

SEQ ID NO: 3005 - DNA, 325 bp, synthetic construct
  source 1..325: mol_type = other DNA
tcagttttttatttttgttctatattattgttttttgtaattgtttgtagaatttttcctctgtacattctttttgtatttttgtattttgttgcaatgttcaataaagtttaagacgggagctagggacgcagggcagccacaggccagatgtagcaagccagtaaggtcgctgatagtaagtagggacaggacttattatttcataacgcgtcaattaccacccgatttggaccaatttaccggatttgtccaaggtggacgggccacctttacttaacccggaaaaggaacatatattatttatatatatgtgttcgaaaaa

SEQ ID NO: 3006 - DNA, 320 bp, synthetic construct
  source 1..320: mol_type = other DNA
ccaaagccagctttggtaggagtacggttacaaactgggcacagctgtagagatcgcacctcctcgtggtcccgctggtaaccctgccaagggtgacaaagtcaatctctagcccaggacagagacgttgggactcaccaacccaacgatctcttgccaaaattcggtgaaacaaatttctcggtataagccatttggcttaatacccaaaacctggcccctgggtttcaaagggggccaaagtctggtggattggcagggggggccgctaccactcccgcaacacccccccaccttgcaaaaaccaatattttccggac

SEQ ID NO: 3007 - DNA, 188 bp, synthetic construct
  source 1..188: mol_type = other DNA
ggcggcttttgagagtatagttacaaactgggcatcgctgcagagatcgcacctcctcgtggtcccgctggtagccctgcgtagggtgactaagtcgatcttctgccccaggtacggagccgttgggactcaccagtccaacgaattcctaccaaattcggtgaaacaaattcctcggtaaaagccgc

SEQ ID NO: 3008 - DNA, 334 bp, synthetic construct; identical to SEQ ID NO: 1844
  source 1..334: mol_type = other DNA

SEQ ID NO: 3009 - DNA, 325 bp, synthetic construct
  source 1..325: mol_type = other DNA
ttcaggttatttagatgcttagtttatgtacctttcttgttttgtctaggattttgatagtgttagtatttttatatttttgtacgattgcataatgttcttttttatacagctctgttttaataaaatagacgatacctagagacgttagggcagccacaagccagttaggtagcggatagtaggtaggaacagacttttactatttcataacgcgtcaattaccacctgatttggaccaattcacgggatttgtccaaggtggacgggccacctttacttaaccaggaaaaggaacatatataatttatgtgtgttcgataaa

SEQ ID NO: 3010 - DNA, 325 bp, synthetic construct
  source 1..325: mol_type = other DNA
ttcaggttatttagatgcttagtttatgtacctttcttgttttgtctaggattttgatagtgttagtatttttatatttttgtacgattgcataatgttcttttttatacagctctgttttaataaaatagacgatacctagagacgttagggcagccacaagccagttaggtagcggatagtaggtaggaacagacttttactatttcataacgcgtcaattaccacctgatttggaccaattcacgggatttgtccaaggtggacgggccacttttacttaaccaggaaaaggaacatatataatttatgtgtgttcgataaa

SEQ ID NO: 3011 - DNA, 20 bp, synthetic construct
  source 1..20: mol_type = other DNA
agtaactatgactctcttaa

SEQ ID NO: 3012 - DNA, 20 bp, synthetic construct
  source 1..20: mol_type = other DNA
tagccaaatgcctcgtcatc

SEQ ID NO: 3013-3019 - skipped (7 entries)

SEQ ID NO: 3020 - protein, 1335 aa, synthetic construct
MAYCLKPGPPVSDRGKEFGSGLTTHPEPESESGHDPTVPNPGPSLGAGEGAQPLPLLRVSVGTQTCEEDFITSRPTKLPGIESELGPLVKFSLEVYRSDLKGDVQFEGIHFPDNWGVLEGFPEVYEQLAPQPNGGDELNHSLPGDREGDVLEKDSSEKEKEAAPEALPSVQRARSEQLPDNIVKVTVPDKNPPCPCCGVRLNSVLALIEHLKGSHGRRRVCFRCAKCGRENFNHHSTVCHYAKCKGPQIERPPVGEWICEVCGRDFTTKIGLGQHKRHAHAMVRNQERIDASQPKETSNRGAHKRLWTKEEEELLMKLEVQFENHKNINKLIAEQLTTKTAKQISDKRRMLLKKGRGTTGNLETEPGMSHQSQAKVKDNGLGGDYLPGGPVVDKGYIGKPGQHLDTDNSHQITAGKKKGGGLQARYRRRIMKRLAAGTINIFPKVFKELINDQEARPLINQTTEDYFGLLDSACQIRTALREKGKSQEERPRKQYQKWMKKRAIKRGDYLRFQRLFHLDRGKLARIILDNTESLSCDISPSEIYSVFKARWETPGHFNGLGDFEIKGKANNKAFRDFITAKEIEKNVREMSKGSAPGPDGIALGDIKKMDPGYSRTAELFNLWLTAGDIPDMVRGCRTVLIPKSTTPERLKDINNWRPITIGSILLRLFSRIITARMTKACPLNPRQRGFISAPGCSENLKLLQSIIRTAKNEHKPLGVIFVDIAKAFDTVSHQHIIHVLQQRRVDPHIVGLVNNMYKDISTYVTTKKNTHTDKIQIRVGVKQGDPLSPLLFNLAMDPLLCKLEESGKGFHRGQSSITAMAFADDLVLLSDSWENMKENIKILETFCNLTGLKTQGQKCHGFYIKPTKDSYTINNCPAWTINGTPLNMINPGESEKYLGLQIDPWTGVAKYDLSTKLKIWLERIDRAPLKPLQKLDILKTYTIPRLTYLADHSEMKAGALELLDQQIRTAVKDWLHLPSCTCDAILYVSTRDGGLGVTKLAGLIPSVQARRLHRIAQSPDETMKDFLEKAQMEKMYEKLWVQAGGKKKDMPSIWEALPMTVPPTNTGNLSEWEAPNPKSKYPKPCDWRRKEFKKWTKLESQGRGVKNFRNDTISNDWIQYYRGIPHRKLLTAIQLRANVYPTREFLARGRGDNQVKFCRHCEADLETCGHIIGFCPVTKDARIKRHNRICDRLCEEAAKREWVVFKEPHLRDATTELFKPDVIFVKEGRALVVDVTVRYESAKTTLEAAAMEKVDKYKHLEAEVKELTNAKDVVFMGFPLGARGKFYKGNFNLLETLGLPKTRQLSVAKTLSTYALMSSVDIVHMFASRSRKPNV

SEQ ID NO: 3021-3023 - skipped (3 entries)

SEQ ID NO: 3024 - protein, 1304 aa, synthetic construct
MAKRTADGSEFESPKKKRKVSGGSSTNPKPQKKNKRNTNRRPQDVKFPGGGQIVGGVYLLPRRGPRLGVRATRKTSERSQPRSGSETPGTSESATPESLFVPEEGSSEKESEDAPKTSPPTPGKHGLEQTGEEKVMVTVPDKNPPCPCCGTRVNSVLNLIEHLKVSHGKRGVCFRCAKCGKENSNYHSVVCHFKKCRGPETEKAPAGEWICEVCNRDFTTKIGLGQHKRLAHPAVRNQERIVASQPKETSNRGAHKRCWTKEEEELLIRLEAQFEGNKNINKLIAEHITTKTAKQISDKRRLLSRKPAEEPREEPGTCHHTRRAAASLRTEPEMSHHAQAEDRDNGPGRRPLPGRAAAGGRTMDEIRRHPDKGNGQQRPTKQKSEEQLQAYYKKTLEERLSAGALNTFPRAFKQVMEGRDIKLVINQTAQDCFGCLESISQIRTATRDKKDTVTREKHPKKPFQKWMKKRAIKKGNYLRFQRLFYLDRGKLAKIILDDIECLSCDIPLSEIYSVFKTRWETTGSFKSLGDFKTYGKADNTAFRELITAKEIEKNVQEMSKGSAPGPDGITLGDVVKMDPEFSRTMEIFNLWLTTGKIPDMVRGCRTVLIPKSSKPDRLKDINNWRPITIGSILLRLFSRIVTARLSKACPLNPRQRGFIRAAGCSENLKLLQTIIWSAKREHRPLGVVFVDIAKAFDTVSHQHIIHALQQREVDPHIVGLVSNMYENISTYITTKRNTHTDKIQIRVGVKQGDPMSPLLFNLAMDPLLCKLEESGKGYHRGQSSITAMAFADDLVLLSDSWENMNTNISILETFCNLTGLKTQGQKCHGFYIKPTKDSYTINDCAAWTINGTPLNMIDPGESEKYLGLQFDPWIGIARSGLSTKLDFWLQRIDQAPLKPLQKTDILKTYTIPRLIYIADHSEVKSALLETLDQKIRTAVKEWLHLPPCTCDAILYSSTRDGGLGITKLAGLIPSVQARRLHRIAQSSDDTMKCFMEKEKMEQLHKKLWIQAGGDRENIPSIWEAPPSSEPPNNVSTNSEWEAPTQKDKFPKPCNWRKNEFKKWTKLASQGRGIVNFERDKISNHWIQYYRRIPHRKLLTALQLRANVYPTREFLARGRQDQYIKACRHCDADNESCAHIIGNCPVTQDARIKRHNYICELLLEEAKKKDWVVFKEPHIRDSNKELYKPDLIFVKDARALVVDVTVRYEAAKSSLEEAAAEKVRKYKHLETEVRHLTNAKDVTFVGFPLGARGKWHQDNFKLLTELGLSKSRQVKMAETFSTVALFSSVDIVHMFASRARKSMVM

SEQ ID NO: 3025 - DNA, 93 bp, synthetic construct
  source 1..93: mol_type = other DNA
gctgccttctgcggggcttgccttctggccatgcccttcttctctcccttgcacctgtacctcttggtctttgaataaagcctgagtaggaag

SEQ ID NO: 3026 - DNA, 51 bp, synthetic construct; identical to SEQ ID NO: 1891
  source 1..51: mol_type = other DNA

SEQ ID NO: 3027 - protein, 1454 aa, synthetic construct
MASCPKPGPPVSAGAMSLESGLTTHSVLAIERGPNSLANSGSDFGGGGLGLPLRLLRVSVGTQTSRSDWVDLVSWSHPGPTSKSQQVDLVSLFPKHRVDLLSKNDQVDLVAQFLPSKFPPNLAENDLALLVNLEFYRSDLHVYECVHKAAHWEGLSGLPEVYEQLAPQPCVGETLHSSLPRDSELFVPEEGSSEKESEDAPKTSPPTPGKHGLEQTGEEKVMVTVPDKNPPCPCCGTRVNSVLNLIEHLKVSHGKRGVCFRCAKCGKENSNYHSVVCHFKKCRGPETEKAPAGEWICEVCNRDFTTKIGLGQHKRLAHPAVRNQERIVASQPKETSNRGAHKRCWTKEEEELLIRLEAQFEGNKNINKLIAEHITTKTAKQISDKRRLLSRKPAEEPRMEPGTCHHTRRAAASLRTEPEMSHHAQAEDRDNGPGRRPLPGRAAAGGRTMDEIRRHPDKANDQQEASSSGRGPVTRRAAAGKKTKKSIDHPTDKANGQQVAISTRRGCLNRGVTAGVETIEGSSHLPDKDSDGQGTPSREKEGQLQDHYQEVIGAWLSDGRINTFPEAFKGLLGKREIQATINQSILDCFGGIDSKSQVNKMTRDKKDKKPGRPPQKWMKKRAIKRGSYLRFQRLFHLDRGKLAKIVLDNIECLTCDIPPSEIYSVFKARWETAGKFTSLGDFKFTEKVDNSAFRDLITAKEVEKNMQEMSKGSAPGPDGITLRDIQKMDPKLSRTTEIFNLWLAAGKIPDGVRECRTVLIPKSTKPERLKDINNWRPITIGSTLLRLFSRILTARLSKACPLNPRQKGFIQAAGCSENLQLLQSIIWSAKREHRPLGVVFVDIAKAFDTVSHKHILHVLQRRGVDPHIIGLVSDMYENIHTSITTKKARTDRIQIRVGVKQGDPMSPLLFNLAMDPLLCELETNGRGHHRGTNCITAMAFADDLVLLSDSWEDMKSNIKILEAFCDLTGLKTQGEKCHGFYIKPTKDSYTVNDCAAWTINGTPLNMILPGESEKYLGLQIDPWTGLAKSDLSTKLDSWLEQIDRVPLKPLQKIELLKTYTIPRLTYVADHSDLKVSFLETLDQKIRTIVKDWLHLPACTCDAILYSSTKDGGLGITKLAKLIPSVQARRLHRIAQSSDETMKQFLHRDKMEAMYQKLWIQAGGDRENIPSIWEAPPSSEPPNNVSTNSEWEAPTQKDKFPKPCNWRKNEFKKWTKLASQGRGIVNFERDKISNHWIQYYRRIPHRKLLTALQLRANVYPTREFLARGRQDQYIKACRHCDADNESCAHIIGNCPVTQDARIKRHNYICELLLEEAKKKDWVVFKEPHIRDSNKELYKPDLIFVKDGRALVVDVTVRYEAAKSSLEEAAAEKVRKYKHLETEVRHLTNAKDVTFVGFPLGARGKWHQDNFKLLTELGLSKSRQVKMAETFSTVALFSSVDIVHMFASRARKSMVM

SEQ ID NO: 3028 - protein, 1429 aa, synthetic construct
MAPKKKRKVVTVKFKYKGEEKEVDISKIKKVWRVGKMISFTYDDNGKTGRGAVSEKDAPKELLQMLEKSGSETPGTSESATPEGSPKRKVSSAEGAAKEEPKRRSARLSAKPPAKVEAKPKKAAAKDKSSDKKVQTKGKRGAKGKQAEVANQETKEDLPAENGETKTEESPASDEAGEKEAKSDSGSETPGTSESATPESYEQLAPQPCVGETLHSSLPRDSELFVPEEGSSEKESEDAPKTSPPTPGKHGLEQTGEEKVMVTVPDKNPPCPCCGTRVNSVLNLIEHLKVSHGKRGVCFRCAKCGKENSNYHSVVCHFKKCRGPETEKAPAGEWICEVCNRDFTTKIGLGQHKRLAHPAVRNQERIVASQPKETSNRGAHKRCWTKEEEELLIRLEAQFEGNKNINKLIAEHITTKTAKQISDKRRLLSRKPAEEPREEPGTCHHTRRAAASLRTEPEMSHHAQAEDRDNGPGRRPLPGRAAAGGRTMDEIRRHPDKGNGQQRPTKQKSEEQLQAYYKKTLEERLSAGALNTFPRAFKQVMEGRDIKLVINQTAQDCFGCLESISQIRTATRDKKDTVTREKHPKKPFQKWMKKRAIKKGNYLRFQRLFYLDRGKLAKIILDDIECLSCDIPLSEIYSVFKTRWETTGSFKSLGDFKTYGKADNTAFRELITAKEIEKNVQEMSKGSAPGPDGITLGDVVKMDPEFSRTMEIFNLWLTTGKIPDMVRGCRTVLIPKSSKPDRLKDINNWRPITIGSILLRLFSRIVTARLSKACPLNPRQRGFIRAAGCSENLKLLQTIIWSAKREHRPLGVVFVDIAKAFDTVSHQHIIHALQQREVDPHIVGLVSNMYENISTYITTKRNTHTDKIQIRVGVKQGDPMSPLLFNLAMDPLLCKLEESGKGYHRGQSSITAMAFADDLVLLSDSWENMNTNISILETFCNLTGLKTQGQKCHGFYIKPTKKSYTINDCAAWTINGTPLNMIDPGESEKYLGLQFDPWIGIARSGLSTKLDFWLQRIDQAPLKPLQKTDILKTYTIPRLIYIADHSEVKSALLETLDQKIRTAVKEWLHLPPCTCDAILYSSTRDGGLGITKLAGLIPSVQARRLHRIAQSSDDTMKCFMEKEKMEQLHKKLWIQAGGDRENIPSIWEAPPSSEPPNNVSTNSEWEAPTQKDKFPKPCNWRKNEFKKWTKLASQGRGIVNFERDKISNHWIQYYRRIPHRKLLTALQLRANVYPTREFLARGRQDQYIKACRHCDADNESCAHIIGNCPVTQDARIKRHNYICELLLEEAKKKDWVVFKEPHIRDSNKELYKPDLIFVKDGRALVVDVTVRYEAAKSSLEEAAAEKVRKYKHLETEVRHLTNAKDVTFVGFPLGARGKWHQDNFKLLTELGLSKSRQVKMAETFSTVALFSSVDIVHMFASRARKSMVM

SEQ ID NO: 3029 - protein, 1851 aa, synthetic construct
MAPKKKRKVSASQDSRSRDNGPDGMEPEGVIESNWNEIVDSFDDMNLSESLLRGIYAYGFEKPSAIQQRAILPCIKGYDVIAQAQSGTGKTATFAISILQQIELDLKATQALVLAPTRELAQQIQKVVMALGDYMGASCHACIGGTNVRAEVQKLQMEAPHIIVGTPGRVFDMLNRRYLSPKYIKMFVLDEADEMLSRGFKDQIYDIFQKLNSNTQVVLLSATMPSDVLEVTKKFMRDPIRILVKKEELTLEGIRQFYINVEREEWKLDTLCDLYETLTITQAVIFINTRRKVDWLTEKMHARDFTVSAMHGDMDQKERDVIMREFRSGSSRVLITTDLLARGIDVQQVSLVINYDLPTNRENYIHRIGRGGRFGRKGVAINMVTEEDKRTLRDIETFYNTSIEEMPLNVADLISGSETPGTSESATPEGSVTVKFKYKGEEKEVDISKIKKVWRVGKMISFTYDDNGKTGRGAVSEKDAPKELLQMLEKSGSETPGTSESATPEGSPKRKVSSAEGAAKEEPKRRSARLSAKPPAKVEAKPKKAAAKDKSSDKKVQTKGKRGAKGKQAEVANQETKEDLPAENGETKTEESPASDEAGEKEAKSDSGSETPGTSESATPESYEQLAPQPCVGETLHSSLPRDSELFVPEEGSSEKESEDAPKTSPPTPGKHGLEQTGEEKVMVTVPDKNPPCPCCGTRVNSVLNLIEHLKVSHGKRGVCFRCAKCGKENSNYHSVVCHFKKCRGPETEKAPAGEWICEVCNRDFTTKIGLGQHKRLAHPAVRNQERIVASQPKETSNRGAHKRCWTKEEEELLIRLEAQFEGNKNINKLIAEHITTKTAKQISDKRRLLSRKPAEEPRMEPGTCHHTRRAAASLRTEPEMSHHAQAEDRDNGPGRRPLPGRAAAGGRTMDEIRRHPDKGNGQQRPTKQKSEEQLQAYYKKTLEERLSAGALNTFPRAFKQVMEGRDIKLVINQTAQDCFGCLESISQIRTATRDKKDTVTREKHPKKPFQKWMKKRAIKKGNYLRFQRLFYLDRGKLAKIILDDIECLSCDIPLSEIYSVFKTRWETTGSFKSLGDFKTYGKADNTAFRELITAKEIEKNVQEMSKGSAPGPDGITLGDVVKMDPEFSRTMEIFNLWLTTGKIPDMVRGCRTVLIPKSSKPDRLKDINNWRPITIGSILLRLFSRIVTARLSKACPLNPRQRGFIRAAGCSENLKLLQTIIWSAKREHRPLGVVFVDIAKAFDTVSHQHIIHALQQREVDPHIVGLVSNMYENISTYITTKRNTHTDKIQIRVGVKQGDPMSPLLFNLAMDPLLCKLEESGKGYHRGQSSITAMAFADDLVLLSDSWENMNTNISILETFCNLTGLKTQGQKCHGFYIKPTKKSYTINDCAAWTINGTPLNMIDPGESEKYLGLQFDPWIGIARSGLSTKLDFWLQRIDQAPLKPLQKLDILKTYTIPRLIYIADHSEVKSALLETLDQKIRTAVKEWLHLPPCTCDAILYSSTRDGGLGITKLAGLIPSVQARRLHRIAQSSDDTMKCFMEKEKMEQLHKKLWIQAGGDRENIPSIWEAPPSSEPPNNVSTNSEWEAPTQKDKFPKPCNWRKNEFKKWTKLASQGRGIVNFERDKISNHWIQYYRRIPHRKLLTALQLRANVYPTREFLARGRQDQYIKACRHCDADNESCAHIIGNCPVTQDARIKRHNYICELLLEEAKKKDWVVFKEPHIRDSNKELYKPDLIFVKDGRALVVDVTVRYEAAKSSLEEAAAEKVRKYKHLETEVRHLTNAKDVTFVGFPLGARGKWHQDNFKLLTELGLSKSRQVKMAETFSTVALFSSVDIVHMFASRARKSMVM

SEQ ID NO: 3030-10000 - skipped (6971 entries)

SEQ ID NO: 10001 - DNA, 4603 bp, Taeniopygia guttata
  source 1..4603: mol_type = genomic DNA
ggtctagttacaactgggcatcgctgcagagatcgcacctcctcgtggtcccgctggtagcccttcgaagggtgactaagtcgatctctgccccaggtacggagccgttgggactcaccagtccaacgtaactcctgcctaaattcggtgaaacaaattcctcggtaaaaagccccatggcttcttgcccgaaacctggccccccggtttcagcaggggcaatgagtttggaaagtggactgaccacccactccgttctcgccatcgaacgtggtcccaattcgttggcaaattccggatcagactttgggggggggggtctggggctaccgttacgcctattgagggtatcggtcggcactcagacctcccgctccgactgggtagacctggtgtcctggagccacccaggacccacgtctaagtcccagcaggttgacctggtgtctttatttcctaaacaccgggttgacctgttatccaaaaacgaccaggtagacctggtggctcaatttttaccatctaaatttccccccaatttggcagaaaatgatttggctttgctggtgaacttagagttctacagatcggatttgcatgtgtatgagtgtgttcattttgctgcacattgggagggattaagtggtttgcctgaggtgtatgaacaacttgcaccacaaccgtgtgtgggagaaactttacattctagcctcccacgagacagtgaactgtttgtgcctgaagaggggagcagcgagaaggagagcgaggacgcgccaaaaacatctcctccgacgcctgggaaacatggtttggaacagactggggaggaaaaagtgatggtgactgttcctgacaaaaatccaccttgtccttgctgtggtacccgggtaaactctgtgttgaatctgattgaacatctgaaagtgtcacacgggaaaaggggggtttgttttcggtgtgcaaaatgtggaaaggaaaatagtaactatcacagtgttgtttgtcattttccaaaatgcaggggtccagagacggagaaagccccagctggggagtggatttgtgaggtatgcaacagagattttacaaccaaaattggcctgggacaacacaagagattggcacacccagcagtgagaaatcaggaaaggatcgttgcttcccaaccgaaagaaacatcaaatagaggtgctcacaaaaggtgctggacaaaggaggaggaagaattactaataagactggaggctcagttcgagggaaacaaaaatattaataagcttattgcagaacacataaccaccaaaacagctaagcagatcagtgacaaaaggcgattgctgtccagaaagccagcagaggagccacgtgaggagcctggaacgtgtcatcacaccaggagagcagctgcgagcctgagaacggagcctgagatgagtcatcacgcccaggcagaggacagagataatggacctgggagacgccctctgccaggcagggcagctgccggagggagaacaatggacgagataagacgccaccctgataagggcaacggacagcagagacccaccaagcaaaaatcagaagaacagctgcaggcttactataaaaagacactagaggaacgactttcagctggggcacttaacaccttcccccgagcattcaagcaggtaatggaaggccgggatataaagctagtaatcaatcagacagcgcaggactgcttcggatgcctggaatccataagccaaataagaacggcaacccgagataaaaaggacacggtgacccgggagaaacacccaaagaaaccttttcagaagtggatgaaggacagagcaatcaaaaaaggtaattatcttcggttccagcgtttattttatcttgatagagggaaactggctaaaatcattttagatgatattgaatgcttgtcttgtgacataccactcagtgaaatttattcggtttttaaaacaagatgggaaacaactggtagctttaaaagccttggggactttaaaacttacgggaaggctgacaacactgccttcagagaattaattacggctaaagaaattgagaaaaatgtgcaggaaatgagcaaaggctcggctcccggtccagacgggattactcttggggacgtcgtaaagatggatcccgagttttcccggaccatggagattttcaatttatggttaacaactggtaaaatcccggacatggtgagggggtgcagaaccgttttgattccaaaatcatcaaagccggatcgtttgaaagacattaataactggagacctatcacgatcggttccatcttgctgagactgttctccaggattgtaacagctaggctgagcaaagcgtgccccctgaacccaaggcaaagaggctttatcagagcggcgggatgctctgaaaacttaaaactcctgcaaactataatttggtcggccaaaagagaacacagaccactgggtgttgtattcgtggacatcgccaaggcttttgacaccgtaagccaccagcacatcattcatgctttgcagcaaagagaggtggatccccacatcgtcggtctggtgagcaatatgtacgagaacatcagtacgtatatcaccacaaagaggaacacacacacagacaaaatccagatccgggttggagtaaagcagggtgacccgatgtcgccccttttatttaacctggcaatggaccctctattatgcaagctggaagagagtggcaaaggataccaccgaggacagagcagcatcacagcgatggcatttgcagacgatctggttttgctgagcgactcctgggaaaatatgaatacaaatattagcatactggagaccttctgcaatctgaccggactcaaaacacaggggcaaaagtgccacggcttttacatcaagccgacaaaggactcttacaccatcaatgactgcgctgcctggactatcaacggcacacccctgaacatgatcgaccccggcgaatctgagaaatacctcggcctgcagtttgacccgtggattggaatagcaaggtccggtctctccacaaaactagatttttggcttcagcggatcgatcaagcaccacttaaacctctgcagaaaactgatattctcaaaacatacaccatccctcggctgatctacatagctgaccactcagaagtgaaaactgcactactcgaaacccttgaccagaagatccggacagcggtcaaggaatggcttcacctacctccgtgcacctgcgatgccatcctgtactcgagcacgagagacggcggtttgggcatcaccaaattggcaggactgatccccagcgtgcaggcccgtagactgcatcggatcgcacagtcatctgacgatacgatgaaatgcttcatggaaaaagagaaaatggaacagctgcataagaaattgtggattcaagctggaggggacagagagaacataccctcgatttgggaagcaccaccgtcgagtgaaccaccaaacaacgtgagcacaaattcggaatgggaagcaccgacccagaaagataaatttccaaagccttgcaattggaggaaaaacgaattcaaaaaatggaccaaattggcatcccaaggccgcggaattgtaaattttgaaagagacaaaattagtaaccattggatccaatactacagacgcatacctcacaggaaactcctcactgcactacaactcagggccaacgtttaccccacgagagaatttctagccaggggtagacaagaccaatacatcaaggcgtgtaggcactgcgatgcggacattgaatcctgcgcccacatcatcggcaactgcccagtgacacaggacgcccgaatcaagaggcacaattacatctgcgaactgcttctcgaggaggcgaagaagaaggactgggtagtgttcaaggaaccgcacataagggattccaacaaggaactgtacaaacctgacctgatatttgtgaaggatgcccgtgcacttgtcgtggatgtgacagtacggtatgaagcagccaaatcatcgctggaggaagccgctgcagagaaagtgagaaagtacaaacacctggaaacggaagtaagacatctcacgaatgcaaaggacgttacttttgtgggctttcccctaggagcgcgggggaaatggcaccaagataactttaaacttttgactgagcttggcctctccaaatcgaggcaagtgaaaatggcagagactttttccacagtagcgctcttttcatctgtggacattgtacatatgtttgccagtagggccagaaaatctatggttatgtaaaccggtagacatgataagatacattgatgagtttggacaaaccacaactagaatgcagtgaaaaaaatgctttatttgtgaaatttgtgatgctattgctttatttgtaaccattataagctgcaataaacaagttaacaacaacaaaaaaaaaaaaaaaaaaaaaaaaaaaaaaacgttgactaaaaaaaaaaaaaaaaaaaaaaaaaaaaaaaaaaaaaaaaaaaaaaaaaaaaaaaaaaaaaaaaaaaaaa

SEQ ID NO: 10002 - skipped

SEQ ID NO: 10003 - DNA, 5509 bp, Anolis carolinensis
  source 1..5509: mol_type = genomic DNA
gtaataataataataataataataataataataataataatcccccccgcaggtgccaccttgacgtggtgggggcttagctgctccaatgatgactgagggctgtgctggcggtagtgtaactaccggcaggtccaaccaagccagagaggcctcagctgaggagcacaaccaagagcacctaacccattagcattatggagaatcaaacccaaacgaagtctatactggctcggtcgtcgcccaggataaaaaggaccgcggtggatgctgctgattctggacatccatcgacaagtgggctacggaatcatcaaaacccaaatgaacagtcacagaagcggcaaaaatatacaatgccagaaaaccgcacaattatgaaatgctactacaaatctgaacctcaaaggcgtggctaccaaaaaaggatgcatcagctatggaaacaagagtaccctgactcacagataacagaaccccgactggctgaccaacgaagattcataatcagaaacaaagtgttcagtgaagttgaactcgaagaaatccagaaaatttgcaaagtagattaccatcagaccacagcacagacagcagcagagactccagcaacacttggaatggtggaacagattgaaccagaagaaagtgtggcgcttttgcaagaatttgaggaaccagcacttgaaacatctgttgaaccaccaggaaccttgacagcaagacaacaagagctcaaggataagatcatggctcatgctgcagcaaatgcaataagacagcggctcccaactctaaaaacagtgcccaagagacacctggcgcctctcatgaaagatgtgaatgcagcactctccactgtccaaataacatcaattgaacaaacaaaccagtttgcctacagtgcagcagtgatagtaacagaagaacttgggctcctacaaccaaggcagccccaaagaaaatcgactggaaaaccaaagtggaaggtcaggctagagttgaaaatcaagaaacttagatcagatgcaagtaacctgaaaaatatgaaagagaggaaactgaagaatgacaaaatcaagcaatacctgatccgaaagtactggctgaacaccagaaaaattgaagaagctttggaaatcgtgaaagaacaaattacagcaacagccagaaaaattgaaaggtatgaagccagaatcatccagtacagacaaaatcaactgtttcaatcagaccaaagacggttctaccagagtctgaaccaaacaacagacacagtaaccataaagccagagaaaactgcaacaacaaagttctggaaagaactttgggaaaataataaaaactacaacaaaaacgctgggtggataaaggagtttgaaggaaaattctcacagaacaaaatggaactgatggaaataacaactgaaatgatcagcaaacgagtgcaaaaagtcaagaactggacatcgcctggtagtgatcaacttcatggattttggctcaaacatctgattagtttacatggaaaaatggcccaacaattcaatgagatgctgcagaaaggaagtatcagtgaatggctaacaactggaagaacatacctgatacaaaaggatccagcaaaaggagcagcaccaggaaactacaggccaataacgtgtctgcccactatgtttaaactactgactggcatcatagctgacagaattcaagactatcttgaagaaaaaaacatcttgccagatgaacagaaaggcaacaaacggaaaagcaggggcacaaaagaccagttattgattgacaaaatgattctggagaactgtaagagccgaaaagctaatcttcacatgacgtggattgactacaaaaaggcctttgactcactcccacacagctggatcatcaagtgcctggacgccatcgggatttgtaaaacagttggcaccttcattgaaaacatgatggagcactggaaaactgaactgtttgttggaaatgaaagctatggacttgtcaacatcaggagaggaattttccagggagattcattgtcccctctgcttttcattattgccatgatccctctgtcaacaatcttacaaaaaacaaatctcggctatcaaatatctaagaattctcacaaaatttcacatttgatgtacatggatgacctgaagctatatgggaaaacggaaactgaaatccagtctctgaccaacactgtccgaatttttagcactgatatcaacatggagtttggtttggacaaatgttcgacagtggcattgaagaagggaaaaatcattgaaagtgagggcataaatatgcccaatggccaaacaataaagtgtcaccagccagaggcctataaatatctgggcatactacagctggacaacatcaagcatgaacatgtgaaaactgtggtcagcaaagaatacacacaaagggtcagaaaaattctcaaaagcaagctcaatggaggcaacaccatcaaggccataaacacctgggccatacctgtcataagatatactgctggcattataaattggacacaggtggaactggacaatttggacagaaaaacaagaaaactcatgaccattcatcattcactgcaccctcgcagtgatgttgaccggctatatctgcctagaagatcagggggcagaggactcttacaagtaaagcaagcagtcaaagaagaagaacatgccctggcagaatatgtcaagcaaagtgaagaacctgctttgattgaagtcaaaaatcagaaactcctcaaaacacagcagacaaaaaaccagtacaagaaaaccgcactacaaactagagctgacagctggcacaacaaaacactgcatggaaagttccttgacaaaattgaaggaaaagctgataaggagaagacctggctctggctcacgaatgggaccctgaagaaggagacagaaggcctgatccttgcagcccaggagcaagccatcagaacaaatgcaattaaggccaagattgaaaaatcagctgatgacccaaaatgcagactgtgcaaggaaaccgacgaaaccattgatcatatcctcagctgctgtaagaaaatcgcacagacagactacaaacagaggcacaactatgtggcccaaatgattcattggaacttatgcctcaagtaccacctcccagcagcaaagaactggtgggatcacaaacctgcaaaagtattggaaaatgaacatgcaaagatactgtgggacttccgaatccagactgacaaagttctggaacacaacacaccagacatcacagttgtggaaaagaacaaggtttggatcattgatgttgccatcccaggtgacagtcgcatagatgaaaaacaacaggaaaaactcagccgctatcaggacctcaagattgaacttcaaagactctggcagaaaccagtacaggtggtcccggtggtgatgggcacactgggtgctgtgccaaaagatctcagccggcatttggaaacaatagacattgacaaaatcaccatctgccaactgcaaaaggccaccctactgggatctgcacacatcatcagaaaatacatcacacagtcctaggcggcctactcgacggatcgatccgaacaaacgacccaacacccgtgcgttttattctgtctttttattgccgatcccctcagaagaactcgtcaagaaggcgatagaaggcgatgcgctgcgaatcgggagcggcgataccgtaaagcacgaggaagcggtcagcccattcgccgccaagctcttcagcaatatcacgggtagccaacgctatgtcctgatagcggtcggccgctttacttgtacagctcgtccatgccgagagtgatcccggcggcggtcacgaactccagcaggaccatgtgatcgcgcttctcgttggggtctttgctcagggcggactgggtgctcaggtagtggttgtcgggcagcagcacggggccgtcgccgatgggggtgttctgctggtagtggtcggccagctgcacgctgccgtcctcgatgttgtggcggatcttgaagttcaccttgatgccgttcttctgcttgtcggccatgatatagacgttgtggctgttgtagttgtactccagcttgtgccccaggatgttgccgtcctccttgaagtcgatgcccttcagctcgatgcggttcaccagggtgtcgccctcgaacttcacctcggcgcgggtcttgtagttgccgtcgtccttgaagaagatggtgcgctcctggacgtagccttcgggcatggcggacttgaagaagtcgtgctgcttcatgtggtcggggtagcggctgaagcactgcacgccgtaggtcagggtggtcacgagggtgggccagggcacgggcagcttgccggtggtgcagatgaacttcagggtcagcttgccgtaggtggcatcgccctcgccctcgccggacacgctgaacttgtggccgtttacgtcgccgtccagctcgaccaggatgggcaccaccccggtgaacagctcctcgcccttgctcaccatggtggcgaattcgaagcttgagctcgagatctgagtccggtagcgctagcggatctgacggttcactaaaccagctctgcttatatagacctcccaccgtacacgcctaccgcccatttgcgtcaatggggcggagttgttacgacattttggaaagtcccgttgattttggtgccaaaacaaactcccattgacgtcaatggggtggagacttggaaatccccgtgagtcaaaccgctatccacgcccattgatgtactgccaaaaccgcatcaccatggtaatagcgatgactaatacgtagatgtactgccaagtaggaaagtcccataaggtcatgtactgggcataatgccaggcgggccatttaccgtcattgacgtcaatagggggcgtacttggcatatgatacacttgatgtactgccaagtgggcagtttaccgtaaatactccacccattgacgtcaatggaaagtccctattggcgttactatgggaacatacgtcattattgacgtcaatgggcgggggtcgttgggcggtcagccaggcgggccatttaccgtaagttatgtaacgcggaactccatatatgggctatgaactaatgaccccgtaattgattactattaaattcctgcaggtttgggacacttgggaagtgttcgacttgtggttttgcgaaacgaaatccagcatatctatcttgtttgctgtgccatacaacgtcgttgtgttgataataataataagcggccgcggatccgcgatgatgatcagacatgataagatacattgatgagtttggacaaaccacaactagaatgcagtgaaaaaaatgctttatttgtgaaatttgtgatgctattgctttatttgtaaccattataagctgcaataaacaagttaacaacaacaaaaaaaaaaaaaaaaaaaaattt

SEQ ID NO: 10004-10119 - skipped (116 entries)

SEQ ID NO: 10120 - DNA, 5725 bp, synthetic construct
  source 1..5725: mol_type = other DNA
ggtctagttacaactgggcatcgctgcagagatcgcacctcctcgtggtcccgctggtagcccttcgaagggtgactaagtcgatctctgccccaggtacggagccgttgggactcaccagtccaacgtaactcctgcctaaattcggtgaaacaaattcctcggtaaaaagccccatggcttcttgcccgaaacctggccccccggtttcagcaggggcaatgagtttggaaagtggactgaccacccactccgttctcgccatcgaacgtggtcccaattcgttggcaaattccggatcagactttgggggggggggtctggggctaccgttacgcctattgagggtatcggtcggcactcagacctcccgctccgactgggtagacctggtgtcctggagccacccaggacccacgtctaagtcccagcaggttgacctggtgtctttatttcctaaacaccgggttgacctgttatccaaaaacgaccaggtagacctggtggctcaatttttaccatctaaatttccccccaatttggcagaaaatgatttggctttgctggtgaacttagagttctacagatcggatttgcatgtgtatgagtgtgttcattttgctgcacattgggagggattaagtggtttgcctgaggtgtatgaacaacttgcaccacaaccgtgtgtgggagaaactttacattctagcctcccacgagacagtgaactgtttgtgcctgaagaggggagcagcgagaaggagagcgaggacgcgccaaaaacatctcctccgacgcctgggaaacatggtttggaacagactggggaggaaaaagtgatggtgactgttcctgacaaaaatccaccttgtccttgctgtggtacccgggtaaactctgtgttgaatctgattgaacatctgaaagtgtcacacgggaaaaggggggtttgttttcggtgtgcaaaatgtggaaaggaaaatagtaactatcacagtgttgtttgtcattttccaaaatgcaggggtccagagacggagaaagccccagctggggagtggatttgtgaggtatgcaacagagattttacaaccaaaattggcctgggacaacacaagagattggcacacccagcagtgagaaatcaggaaaggatcgttgcttcccaaccgaaagaaacatcaaatagaggtgctcacaaaaggtgctggacaaaggaggaggaagaattactaataagactggaggctcagttcgagggaaacaaaaatattaataagcttattgcagaacacataaccaccaaaacagctaagcagatcagtgacaaaaggcgattgctgtccagaaagccagcagaggagccacgtgaggagcctggaacgtgtcatcacaccaggagagcagctgcgagcctgagaacggagcctgagatgagtcatcacgcccaggcagaggacagagataatggacctgggagacgccctctgccaggcagggcagctgccggagggagaacaatggacgagataagacgccaccctgataagggcaacggacagcagagacccaccaagcaaaaatcagaagaacagctgcaggcttactataaaaagacactagaggaacgactttcagctggggcacttaacaccttcccccgagcattcaagcaggtaatggaaggccgggatataaagctagtaatcaatcagacagcgcaggactgcttcggatgcctggaatccataagccaaataagaacggcaacccgagataaaaaggacacggtgacccgggagaaacacccaaagaaaccttttcagaagtggatgaaggacagagcaatcaaaaaaggtaattatcttcggttccagcgtttattttatcttgatagagggaaactggctaaaatcattttagatgatattgaatgcttgtcttgtgacataccactcagtgaaatttattcggtttttaaaacaagatgggaaacaactggtagctttaaaagccttggggactttaaaacttacgggaaggctgacaacactgccttcagagaattaattacggctaaagaaattgagaaaaatgtgcaggaaatgagcaaaggctcggctcccggtccagacgggattactcttggggacgtcgtaaagatggatcccgagttttcccggaccatggagattttcaatttatggttaacaactggtaaaatcccggacatggtgagggggtgcagaaccgttttgattccaaaatcatcaaagccggatcgtttgaaagacattaataactggagacctatcacgatcggttccatcttgctgagactgttctccaggattgtaacagctaggctgagcaaagcgtgccccctgaacccaaggcaaagaggctttatcagagcggcgggatgctctgaaaacttaaaactcctgcaaactataatttggtcggccaaaagagaacacagaccactgggtgttgtattcgtggacatcgccaaggcttttgacaccgtaagccaccagcacatcattcatgctttgcagcaaagagaggtggatccccacatcgtcggtctggtgagcaatatgtacgagaacatcagtacgtatatcaccacaaagaggaacacacacacagacaaaatccagatccgggttggagtaaagcagggtgacccgatgtcgccccttttatttaacctggcaatggaccctctattatgcaagctggaagagagtggcaaaggataccaccgaggacagagcagcatcacagcgatggcatttgcagacgatctggttttgctgagcgactcctgggaaaatatgaatacaaatattagcatactggagaccttctgcaatctgaccggactcaaaacacaggggcaaaagtgccacggcttttacatcaagccgacaaaggactcttacaccatcaatgactgcgctgcctggactatcaacggcacacccctgaacatgatcgaccccggcgaatctgagaaatacctcggcctgcagtttgacccgtggattggaatagcaaggtccggtctctccacaaaactagatttttggcttcagcggatcgatcaagcaccacttaaacctctgcagaaaactgatattctcaaaacatacaccatccctcggctgatctacatagctgaccactcagaagtgaaaactgcactactcgaaacccttgaccagaagatccggacagcggtcaaggaatggcttcacctacctccgtgcacctgcgatgccatcctgtactcgagcacgagagacggcggtttgggcatcaccaaattggcaggactgatccccagcgtgcaggcccgtagactgcatcggatcgcacagtcatctgacgatacgatgaaatgcttcatggaaaaagagaaaatggaacagctgcataagaaattgtggattcaagctggaggggacagagagaacataccctcgatttgggaagcaccaccgtcgggctccgagactcctggaacaagcgagagcgctacacctgagggcagcggcatccacggcgtgcccgccgctgccatgcagatgcaactggaagctaatgctgataccagcgtggaagaggaaagcttcggcccccagcctattagcagactggaacagtgcggcatcaacgccaacgacgtgaagaaactggaagaggcaggcttccatacagtggaagctgtggcttacgcccctaagaaggaactgatcaacatcaagggcatcagcgaggccaaggccgataagatcctggccgaggccgccaaactggtgccaatgggctttaccaccgagacagagttccaccagaggcggagcgagatcatccagatcacaaccggctcaaaggaactcgacaagctgctgcagggcggcatcgaaaccggcagcatcaccgagatgttcggcgagtttcgcaccggcaaaacccagatttgccacaccctggccgtgacatgccagctgcctatcgatagaggtggaggcgagggcaaggccatgtacatcgacaccgagggcaccttcagacctgagcggctgctggccgttgctgaaagatacggcctgagcggatctgatgtgctggacaacgtggcctacgccagagccttcaacaccgaccaccaaacacagctgctctaccaggcctctgccatgatggtggaatctcggtacgccctgctgatcgtggatagcgccacagccctgtatagaaccgactacagcggcagaggagaactgtccgccagacagatgcacctggccagattcctgcggatgctgctgagactggctgacgagttcggcgtggccgtggtgatcaccaaccaggtggtcgcccaggtggacggcgccgctatgtttgccgctgaccccaagaaacctatcggcggcaacatcatcgcccacgccagcacaacaagactgtacctgagaaagggccggggagaaaccagaatctgtaaaatctacgacagcccttgcctgcccgaggctgaggccatgttcgccatcaatgccgacggcgtgggagatgccaaggactccggctccgagactcctggaacaagcgagagcgctacacctccaccaaacaacgtgagcacaaattcggaatgggaagcaccgacccagaaagataaatttccaaagccttgcaattggaggaaaaacgaattcaaaaaatggaccaaattggcatcccaaggccgcggaattgtaaattttgaaagagacaaaattagtaaccattggatccaatactacagacgcatacctcacaggaaactcctcactgcactacaactcagggccaacgtttaccccacgagagaatttctagccaggggtagacaagaccaatacatcaaggcgtgtaggcactgcgatgcggacattgaatcctgcgcccacatcatcggcaactgcccagtgacacaggacgcccgaatcaagaggcacaattacatctgcgaactgcttctcgaggaggcgaagaagaaggactgggtagtgttcaaggaaccgcacataagggattccaacaaggaactgtacaaacctgacctgatatttgtgaaggatgcccgtgcacttgtcgtggatgtgacagtacggtatgaagcagccaaatcatcgctggaggaagccgctgcagagaaagtgagaaagtacaaacacctggaaacggaagtaagacatctcacgaatgcaaaggacgttacttttgtgggctttcccctaggagcgcgggggaaatggcaccaagataactttaaacttttgactgagcttggcctctccaaatcgaggcaagtgaaaatggcagagactttttccacagtagcgctcttttcatctgtggacattgtacatatgtttgccagtagggccagaaaatctatggttatgtaaaccggtagacatgataagatacattgatgagtttggacaaaccacaactagaatgcagtgaaaaaaatgctttatttgtgaaatttgtgatgctattgctttatttgtaaccattataagctgcaataaacaagttaacaacaacaaaaaaaaaaaaaaaaaaaaaaaaaaaaaaacgttgactaaaaaaaaaaaaaaaaaaaaaaaaaaaaaaaaaaaaaaaaaaaaaaaaaaaaaaaaaaaaaaaaaaaaaa

SEQ ID NO: 10121 - DNA, 5062 bp, synthetic construct
  source 1..5062: mol_type = other DNA
ggtctagttacaactgggcatcgctgcagagatcgcacctcctcgtggtcccgctggtagcccttcgaagggtgactaagtcgatctctgccccaggtacggagccgttgggactcaccagtccaacgtaactcctgcctaaattcggtgaaacaaattcctcggtaaaaagccccatggcttcttgcccgaaacctggccccccggtttcagcaggggcaatgagtttggaaagtggactgaccacccactccgttctcgccatcgaacgtggtcccaattcgttggcaaattccggatcagactttgggggggggggtctggggctaccgttacgcctattgagggtatcggtcggcactcagacctcccgctccgactgggtagacctggtgtcctggagccacccaggacccacgtctaagtcccagcaggttgacctggtgtctttatttcctaaacaccgggttgacctgttatccaaaaacgaccaggtagacctggtggctcaatttttaccatctaaatttccccccaatttggcagaaaatgatttggctttgctggtgaacttagagttctacagatcggatttgcatgtgtatgagtgtgttcattttgctgcacattgggagggattaagtggtttgcctgaggtgtatgaacaacttgcaccacaaccgtgtgtgggagaaactttacattctagcctcccacgagacagtgaactgtttgtgcctgaagaggggagcagcgagaaggagagcgaggacgcgccaaaaacatctcctccgacgcctgggaaacatggtttggaacagactggggaggaaaaagtgatggtgactgttcctgacaaaaatccaccttgtccttgctgtggtacccgggtaaactctgtgttgaatctgattgaacatctgaaagtgtcacacgggaaaaggggggtttgttttcggtgtgcaaaatgtggaaaggaaaatagtaactatcacagtgttgtttgtcattttccaaaatgcaggggtccagagacggagaaagccccagctggggagtggatttgtgaggtatgcaacagagattttacaaccaaaattggcctgggacaacacaagagattggcacacccagcagtgagaaatcaggaaaggatcgttgcttcccaaccgaaagaaacatcaaatagaggtgctcacaaaaggtgctggacaaaggaggaggaagaattactaataagactggaggctcagttcgagggaaacaaaaatattaataagcttattgcagaacacataaccaccaaaacagctaagcagatcagtgacaaaaggcgattgctgtccagaaagccagcagaggagccacgtgaggagcctggaacgtgtcatcacaccaggagagcagctgcgagcctgagaacggagcctgagatgagtcatcacgcccaggcagaggacagagataatggacctgggagacgccctctgccaggcagggcagctgccggagggagaacaatggacgagataagacgccaccctgataagggcaacggacagcagagacccaccaagcaaaaatcagaagaacagctgcaggcttactataaaaagacactagaggaacgactttcagctggggcacttaacaccttcccccgagcattcaagcaggtaatggaaggccgggatataaagctagtaatcaatcagacagcgcaggactgcttcggatgcctggaatccataagccaaataagaacggcaacccgagataaaaaggacacggtgacccgggagaaacacccaaagaaaccttttcagaagtggatgaaggacagagcaatcaaaaaaggtaattatcttcggttccagcgtttattttatcttgatagagggaaactggctaaaatcattttagatgatattgaatgcttgtcttgtgacataccactcagtgaaatttattcggtttttaaaacaagatgggaaacaactggtagctttaaaagccttggggactttaaaacttacgggaaggctgacaacactgccttcagagaattaattacggctaaagaaattgagaaaaatgtgcaggaaatgagcaaaggctcggctcccggtccagacgggattactcttggggacgtcgtaaagatggatcccgagttttcccggaccatggagattttcaatttatggttaacaactggtaaaatcccggacatggtgagggggtgcagaaccgttttgattccaaaatcatcaaagccggatcgtttgaaagacattaataactggagacctatcacgatcggttccatcttgctgagactgttctccaggattgtaacagctaggctgagcaaagcgtgccccctgaacccaaggcaaagaggctttatcagagcggcgggatgctctgaaaacttaaaactcctgcaaactataatttggtcggccaaaagagaacacagaccactgggtgttgtattcgtggacatcgccaaggcttttgacaccgtaagccaccagcacatcattcatgctttgcagcaaagagaggtggatccccacatcgtcggtctggtgagcaatatgtacgagaacatcagtacgtatatcaccacaaagaggaacacacacacagacaaaatccagatccgggttggagtaaagcagggtgacccgatgtcgccccttttatttaacctggcaatggaccctctattatgcaagctggaagagagtggcaaaggataccaccgaggacagagcagcatcacagcgatggcatttgcagacgatctggttttgctgagcgactcctgggaaaatatgaatacaaatattagcatactggagaccttctgcaatctgaccggactcaaaacacaggggcaaaagtgccacggcttttacatcaagccgacaaaggactcttacaccatcaatgactgcgctgcctggactatcaacggcacacccctgaacatgatcgaccccggcgaatctgagaaatacctcggcctgcagtttgacccgtggattggaatagcaaggtccggtctctccacaaaactagatttttggcttcagcggatcgatcaagcaccacttaaacctctgcagaaaactgatattctcaaaacatacaccatccctcggctgatctacatagctgaccactcagaagtgaaaactgcactactcgaaacccttgaccagaagatccggacagcggtcaaggaatggcttcacctacctccgtgcacctgcgatgccatcctgtactcgagcacgagagacggcggtttgggcatcaccaaattggcaggactgatccccagcgtgcaggcccgtagactgcatcggatcgcacagtcatctgacgatacgatgaaatgcttcatggaaaaagagaaaatggaacagctgcataagaaattgtggattcaagctggaggggacagagagaacataccctcgatttgggaagcaccaccgtcgggctccgagactcctggaacaagcgagagcgctacacctgagggcagcgaaagcacagtcggccctgcttgccccccaggaagaaccgtgaccaagcggccctgggccctggccgaggacacccctaggggccccgatagcccccccaaaagaccccggcctaacagcctgcctctgaccacaacattcagacctctgcctcctccacctcagaccaccagcgccgtggaccctagcagccactcccctgtgaacccccctcgggaccagcacgccacagataccgccgacgagaagcccagagccgcttctccagccctgagcgacgccagcggacctcctacccctgacatccccctgtctcctggcggcacccacgccagagatcctgatgctgatcctgactctccagacctggacagctccggctccgagactcctggaacaagcgagagcgctacacctccaccaaacaacgtgagcacaaattcggaatgggaagcaccgacccagaaagataaatttccaaagccttgcaattggaggaaaaacgaattcaaaaaatggaccaaattggcatcccaaggccgcggaattgtaaattttgaaagagacaaaattagtaaccattggatccaatactacagacgcatacctcacaggaaactcctcactgcactacaactcagggccaacgtttaccccacgagagaatttctagccaggggtagacaagaccaatacatcaaggcgtgtaggcactgcgatgcggacattgaatcctgcgcccacatcatcggcaactgcccagtgacacaggacgcccgaatcaagaggcacaattacatctgcgaactgcttctcgaggaggcgaagaagaaggactgggtagtgttcaaggaaccgcacataagggattccaacaaggaactgtacaaacctgacctgatatttgtgaaggatgcccgtgcacttgtcgtggatgtgacagtacggtatgaagcagccaaatcatcgctggaggaagccgctgcagagaaagtgagaaagtacaaacacctggaaacggaagtaagacatctcacgaatgcaaaggacgttacttttgtgggctttcccctaggagcgcgggggaaatggcaccaagataactttaaacttttgactgagcttggcctctccaaatcgaggcaagtgaaaatggcagagactttttccacagtagcgctcttttcatctgtggacattgtacatatgtttgccagtagggccagaaaatctatggttatgtaaaccggtagacatgataagatacattgatgagtttggacaaaccacaactagaatgcagtgaaaaaaatgctttatttgtgaaatttgtgatgctattgctttatttgtaaccattataagctgcaataaacaagttaacaacaacaaaaaaaaaaaaaaaaaaaaaaaaaaaaaaacgttgactaaaaaaaaaaaaaaaaaaaaaaaaaaaaaaaaaaaaaaaaaaaaaaaaaaaaaaaaaaaaaaaaaaaaaa

SEQ ID NO: 10122 - DNA, 4786 bp, synthetic construct
  source 1..4786: mol_type = other DNA
ggtctagttacaactgggcatcgctgcagagatcgcacctcctcgtggtcccgctggtagcccttcgaagggtgactaagtcgatctctgccccaggtacggagccgttgggactcaccagtccaacgtaactcctgcctaaattcggtgaaacaaattcctcggtaaaaagccccatggcttcttgcccgaaacctggccccccggtttcagcaggggcaatgagtttggaaagtggactgaccacccactccgttctcgccatcgaacgtggtcccaattcgttggcaaattccggatcagactttgggggggggggtctggggctaccgttacgcctattgagggtatcggtcggcactcagacctcccgctccgactgggtagacctggtgtcctggagccacccaggacccacgtctaagtcccagcaggttgacctggtgtctttatttcctaaacaccgggttgacctgttatccaaaaacgaccaggtagacctggtggctcaatttttaccatctaaatttccccccaatttggcagaaaatgatttggctttgctggtgaacttagagttctacagatcggatttgcatgtgtatgagtgtgttcattttgctgcacattgggagggattaagtggtttgcctgaggtgtatgaacaacttgcaccacaaccgtgtgtgggagaaactttacattctagcctcccacgagacagtgaactgtttgtgcctgaagaggggagcagcgagaaggagagcgaggacgcgccaaaaacatctcctccgacgcctgggaaacatggtttggaacagactggggaggaaaaagtgatggtgactgttcctgacaaaaatccaccttgtccttgctgtggtacccgggtaaactctgtgttgaatctgattgaacatctgaaagtgtcacacgggaaaaggggggtttgttttcggtgtgcaaaatgtggaaaggaaaatagtaactatcacagtgttgtttgtcattttccaaaatgcaggggtccagagacggagaaagccccagctggggagtggatttgtgaggtatgcaacagagattttacaaccaaaattggcctgggacaacacaagagattggcacacccagcagtgagaaatcaggaaaggatcgttgcttcccaaccgaaagaaacatcaaatagaggtgctcacaaaaggtgctggacaaaggaggaggaagaattactaataagactggaggctcagttcgagggaaacaaaaatattaataagcttattgcagaacacataaccaccaaaacagctaagcagatcagtgacaaaaggcgattgctgtccagaaagccagcagaggagccacgtgaggagcctggaacgtgtcatcacaccaggagagcagctgcgagcctgagaacggagcctgagatgagtcatcacgcccaggcagaggacagagataatggacctgggagacgccctctgccaggcagggcagctgccggagggagaacaatggacgagataagacgccaccctgataagggcaacggacagcagagacccaccaagcaaaaatcagaagaacagctgcaggcttactataaaaagacactagaggaacgactttcagctggggcacttaacaccttcccccgagcattcaagcaggtaatggaaggccgggatataaagctagtaatcaatcagacagcgcaggactgcttcggatgcctggaatccataagccaaataagaacggcaacccgagataaaaaggacacggtgacccgggagaaacacccaaagaaaccttttcagaagtggatgaaggacagagcaatcaaaaaaggtaattatcttcggttccagcgtttattttatcttgatagagggaaactggctaaaatcattttagatgatattgaatgcttgtcttgtgacataccactcagtgaaatttattcggtttttaaaacaagatgggaaacaactggtagctttaaaagccttggggactttaaaacttacgggaaggctgacaacactgccttcagagaattaattacggctaaagaaattgagaaaaatgtgcaggaaatgagcaaaggctcggctcccggtccagacgggattactcttggggacgtcgtaaagatggatcccgagttttcccggaccatggagattttcaatttatggttaacaactggtaaaatcccggacatggtgagggggtgcagaaccgttttgattccaaaatcatcaaagccggatcgtttgaaagacattaataactggagacctatcacgatcggttccatcttgctgagactgttctccaggattgtaacagctaggctgagcaaagcgtgccccctgaacccaaggcaaagaggctttatcagagcggcgggatgctctgaaaacttaaaactcctgcaaactataatttggtcggccaaaagagaacacagaccactgggtgttgtattcgtggacatcgccaaggcttttgacaccgtaagccaccagcacatcattcatgctttgcagcaaagagaggtggatccccacatcgtcggtctggtgagcaatatgtacgagaacatcagtacgtatatcaccacaaagaggaacacacacacagacaaaatccagatccgggttggagtaaagcagggtgacccgatgtcgccccttttatttaacctggcaatggaccctctattatgcaagctggaagagagtggcaaaggataccaccgaggacagagcagcatcacagcgatggcatttgcagacgatctggttttgctgagcgactcctgggaaaatatgaatacaaatattagcatactggagaccttctgcaatctgaccggactcaaaacacaggggcaaaagtgccacggcttttacatcaagccgacaaaggactcttacaccatcaatgactgcgctgcctggactatcaacggcacacccctgaacatgatcgaccccggcgaatctgagaaatacctcggcctgcagtttgacccgtggattggaatagcaaggtccggtctctccacaaaactagatttttggcttcagcggatcgatcaagcaccacttaaacctctgcagaaaactgatattctcaaaacatacaccatccctcggctgatctacatagctgaccactcagaagtgaaaactgcactactcgaaacccttgaccagaagatccggacagcggtcaaggaatggcttcacctacctccgtgcacctgcgatgccatcctgtactcgagcacgagagacggcggtttgggcatcaccaaattggcaggactgatccccagcgtgcaggcccgtagactgcatcggatcgcacagtcatctgacgatacgatgaaatgcttcatggaaaaagagaaaatggaacagctgcataagaaattgtggattcaagctggaggggacagagagaacataccctcgatttgggaagcaccaccgtcgggctccgagactcctggaacaagcgagagcgctacacctgagggcagccccacactgctgggcttccacaccgccagcggcaagaaggtgaagatcgccaaggaatccctggataaggtgaaaaacctgttcgacgagaaggagcagtccggctccgagactcctggaacaagcgagagcgctacacctccaccaaacaacgtgagcacaaattcggaatgggaagcaccgacccagaaagataaatttccaaagccttgcaattggaggaaaaacgaattcaaaaaatggaccaaattggcatcccaaggccgcggaattgtaaattttgaaagagacaaaattagtaaccattggatccaatactacagacgcatacctcacaggaaactcctcactgcactacaactcagggccaacgtttaccccacgagagaatttctagccaggggtagacaagaccaatacatcaaggcgtgtaggcactgcgatgcggacattgaatcctgcgcccacatcatcggcaactgcccagtgacacaggacgcccgaatcaagaggcacaattacatctgcgaactgcttctcgaggaggcgaagaagaaggactgggtagtgttcaaggaaccgcacataagggattccaacaaggaactgtacaaacctgacctgatatttgtgaaggatgcccgtgcacttgtcgtggatgtgacagtacggtatgaagcagccaaatcatcgctggaggaagccgctgcagagaaagtgagaaagtacaaacacctggaaacggaagtaagacatctcacgaatgcaaaggacgttacttttgtgggctttcccctaggagcgcgggggaaatggcaccaagataactttaaacttttgactgagcttggcctctccaaatcgaggcaagtgaaaatggcagagactttttccacagtagcgctcttttcatctgtggacattgtacatatgtttgccagtagggccagaaaatctatggttatgtaaaccggtagacatgataagatacattgatgagtttggacaaaccacaactagaatgcagtgaaaaaaatgctttatttgtgaaatttgtgatgctattgctttatttgtaaccattataagctgcaataaacaagttaacaacaacaaaaaaaaaaaaaaaaaaaaaaaaaaaaaaacgttgactaaaaaaaaaaaaaaaaaaaaaaaaaaaaaaaaaaaaaaaaaaaaaaaaaaaaaaaaaaaaaaaaaaaaaa

SEQ ID NO: 10123 - DNA, 7375 bp, synthetic construct
  source 1..7375: mol_type = other DNA
ggttgacgcgatgtgatttctgcccagtgctctgaatgtcaaagtgaagaaattcaatgaagcgcgggtaaacggcgggagtaactatgactctcttaagggtctagttacaactgggcatcgctgcagagatcgcacctcctcgtggtcccgctggtagcccttcgaagggtgactaagtcgatctctgccccaggtacggagccgttgggactcaccagtccaacgtaactcctgcctaaattcggtgaaacaaattcctcggtaaaaagccccatgcctaagagaaaggtgtccagcgccgagggcgctgccaaggaagagcctaaacggagaagcgccagactgagcgccaagccccccgccaaggtggaagccaagcctaagaaggccgccgctaaggacaagagcagcgataagaaagtccagaccaagggcaagcggggcgccaaaggcaaacaggccgaggtggccaaccaggagacaaaggaagatctgcctgctgagaacggcgaaaccaagaccgaggaatctccagcttctgacgaggccggagagaaggaggccaaaagcgacagcggctctgagacacctggaacaagcgagagcgccaccccggaatccgcttcttgcccgaaacctggccccccggtttcagcaggggcaatgagtttggaaagtggactgaccacccactccgttctcgccatcgaacgtggtcccaattcgttggcaaattccggatcagactttgggggggggggtctggggctaccgttacgcctattgagggtatcggtcggcactcagacctcccgctccgactgggtagacctggtgtcctggagccacccaggacccacgtctaagtcccagcaggttgacctggtgtctttatttcctaaacaccgggttgacctgttatccaaaaacgaccaggtagacctggtggctcaatttttaccatctaaatttccccccaatttggcagaaaatgatttggctttgctggtgaacttagagttctacagatcggatttgcatgtgtatgagtgtgttcattttgctgcacattgggagggattaagtggtttgcctgaggtgtatgaacaacttgcaccacaaccgtgtgtgggagaaactttacattctagcctcccacgagacagtgaactgtttgtgcctgaagaggggagcagcgagaaggagagcgaggacgcgccaaaaacatctcctccgacgcctgggaaacatggtttggaacagactggggaggaaaaagtgatggtgactgttcctgacaaaaatccaccttgtccttgctgtggtacccgggtaaactctgtgttgaatctgattgaacatctgaaagtgtcacacgggaaaaggggggtttgttttcggtgtgcaaaatgtggaaaggaaaatagtaactatcacagtgttgtttgtcattttccaaaatgcaggggtccagagacggagaaagccccagctggggagtggatttgtgaggtatgcaacagagattttacaaccaaaattggcctgggacaacacaagagattggcacacccagcagtgagaaatcaggaaaggatcgttgcttcccaaccgaaagaaacatcaaatagaggtgctcacaaaaggtgctggacaaaggaggaggaagaattactaataagactggaggctcagttcgagggaaacaaaaatattaataagcttattgcagaacacataaccaccaaaacagctaagcagatcagtgacaaaaggcgattgctgtccagaaagccagcagaggagccacgtgaggagcctggaacgtgtcatcacaccaggagagcagctgcgagcctgagaacggagcctgagatgagtcatcacgcccaggcagaggacagagataatggacctgggagacgccctctgccaggcagggcagctgccggagggagaacaatggacgagataagacgccaccctgataagggcaacggacagcagagacccaccaagcaaaaatcagaagaacagctgcaggcttactataaaaagacactagaggaacgactttcagctggggcacttaacaccttcccccgagcattcaagcaggtaatggaaggccgggatataaagctagtaatcaatcagacagcgcaggactgcttcggatgcctggaatccataagccaaataagaacggcaacccgagataaaaaggacacggtgacccgggagaaacacccaaagaaaccttttcagaagtggatgaaggacagagcaatcaaaaaaggtaattatcttcggttccagcgtttattttatcttgatagagggaaactggctaaaatcattttagatgatattgaatgcttgtcttgtgacataccactcagtgaaatttattcggtttttaaaacaagatgggaaacaactggtagctttaaaagccttggggactttaaaacttacgggaaggctgacaacactgccttcagagaattaattacggctaaagaaattgagaaaaatgtgcaggaaatgagcaaaggctcggctcccggtccagacgggattactcttggggacgtcgtaaagatggatcccgagttttcccggaccatggagattttcaatttatggttaacaactggtaaaatcccggacatggtgagggggtgcagaaccgttttgattccaaaatcatcaaagccggatcgtttgaaagacattaataactggagacctatcacgatcggttccatcttgctgagactgttctccaggattgtaacagctaggctgagcaaagcgtgccccctgaacccaaggcaaagaggctttatcagagcggcgggatgctctgaaaacttaaaactcctgcaaactataatttggtcggccaaaagagaacacagaccactgggtgttgtattcgtggacatcgccaaggcttttgacaccgtaagccaccagcacatcattcatgctttgcagcaaagagaggtggatccccacatcgtcggtctggtgagcaatatgtacgagaacatcagtacgtatatcaccacaaagaggaacacacacacagacaaaatccagatccgggttggagtaaagcagggtgacccgatgtcgccccttttatttaacctggcaatggaccctctattatgcaagctggaagagagtggcaaaggataccaccgaggacagagcagcatcacagcgatggcatttgcagacgatctggttttgctgagcgactcctgggaaaatatgaatacaaatattagcatactggagaccttctgcaatctgaccggtctcaaaacacaggggcaaaagtgccacggcttttacatcaagccgacaaaggactcttacaccatcaatgactgcgctgcctggactatcaacggcacacccctgaacatgatcgaccccggcgaatctgagaaatacctcggcctgcagtttgacccgtggattggaatagcaaggtccggtctctccacaaaactagatttttggcttcagcggatcgatcaagcaccacttaaacctctgcagaaaactgatattctcaaaacatacaccatccctcggctgatctacatagctgaccactcagaagtgaaaactgcactactcgaaacccttgaccagaagatccggacagcggtcaaggaatggcttcacctacctccgtgcacctgcgatgccatcctgtactcgagcacgagagacggcggtttgggcatcaccaaattggcaggactgatccccagcgtgcaggcccgtagactgcatcggatcgcacagtcatctgacgatacgatgaaatgcttcatggaaaaagagaaaatggaacagctgcataagaaattgtggattcaagctggaggggacagagagaacataccctcgatttgggaagcaccaccgtcgagtgaaccaccaaacaacgtgagcacaaattcggaatgggaagcaccgacccagaaagataaatttccaaagccttgcaattggaggaaaaacgaattcaaaaaatggaccaaattggcatcccaaggccgcggaattgtaaattttgaaagagacaaaattagtaaccattggatccaatactacagacgcatacctcacaggaaactcctcactgcactacaactcagggccaacgtttaccccacgagagaatttctagccaggggtagacaagaccaatacatcaaggcgtgtaggcactgcgatgcggacattgaatcctgcgcccacatcatcggcaactgcccagtgacacaggacgcccgaatcaagaggcacaattacatctgcgaactgcttctcgaggaggcgaagaagaaggactgggtagtgttcaaggaaccgcacataagggattccaacaaggaactgtacaaacctgacctgatatttgtgaaggatgcccgtgcacttgtcgtggatgtgacagtacggtatgaagcagccaaatcatcgctggaggaagccgctgcagagaaagtgagaaagtacaaacacctggaaacggaagtaagacatctcacgaatgcaaaggacgttacttttgtgggctttcccctaggagcgcgggggaaatggcaccaagataactttaaacttttgactgagcttggcctctccaaatcgaggcaagtgaaaatggcagagactttttccacagtagcgctcttttcatctgtggacattgtacatatgtttgccagtagggccagaaaatctatggttatgtccggctccgagactcctggaacaagcgagagcgctacacctgagggaaaaggcgaccccaagaaacctagaggcaagatgagcagctacgcctttttcgtgcagacctgtcgggaagagcacaagaaaaagcaccctgacgccagcgtgaacttctctgagttcagcaagaagtgcagcgagagatggaagacaatgtccgccaaggaaaagggcaagttcgaggacatggccaaggctgataaggccagatacgagcgggaaatgaaaacctacatcccacctaagggcgagggcggatctggcaaaagaaccgctgatggcagcgagttcgagagccccaagaaaaagagaaaggtgtaagcggcctactcgacggatcgatccgaacaaacgacccaacacccgtgcgttttattctgtctttttattgccgatcccctcagaagaactcgtcaagaaggcgatagaaggcgatgcgctgcgaatcgggagcggcgataccgtaaagcacgaggaagcggtcagcccattcgccgccaagctcttcagcaatatcacgggtagccaacgctatgtcctgatagcggtcggccgctttacttgtacagctcgtccatgccgagagtgatcccggcggcggtcacgaactccagcaggaccatgtgatcgcgcttctcgttggggtctttgctcagggcggactgggtgctcaggtagtggttgtcgggcagcagcacggggccgtcgccgatgggggtgttctgctggtagtggtcggccagctgcacgctgccgtcctcgatgttgtggcggatcttgaagttcaccttgatgccgttcttctgcttgtcggccatgatatagacgttgtggctgttgtagttgtactccagcttgtgccccaggatgttgccgtcctccttgaagtcgatgcccttcagctcgatgcggttcaccagggtgtcgccctcgaacttcacctcggcgcgggtcttgtagttgccgtcgtccttgaagaagatggtgcgctcctggacgtagccttcgggcatggcggacttgaagaagtcgtgctgcttcatgtggtcggggtagcggctgaagcactgcacgccgtaggtcagggtggtcacgagggtgggccagggcacgggcagcttgccggtggtgcagatgaacttcagggtcagcttgccgtaggtggcatcgccctcgccctcgccggacacgctgaacttgtggccgtttacgtcgccgtccagctcgaccaggatgggcaccaccccggtgaacagctcctcgcccttgctcaccatggtggcgaattcgaagcttgagctcgagatctgagtccggtagcgctagcggatctgacggttcactaaaccagctctgcttatatagacctcccaccgtacacgcctaccgcccatttgcgtcaatggggcggagttgttacgacattttggaaagtcccgttgattttggtgccaaaacaaactcccattgacgtcaatggggtggagacttggaaatccccgtgagtcaaaccgctatccacgcccattgatgtactgccaaaaccgcatcaccatggtaatagcgatgactaatacgtagatgtactgccaagtaggaaagtcccataaggtcatgtactgggcataatgccaggcgggccatttaccgtcattgacgtcaatagggggcgtacttggcatatgatacacttgatgtactgccaagtgggcagtttaccgtaaatactccacccattgacgtcaatggaaagtccctattggcgttactatgggaacatacgtcattattgacgtcaatgggcgggggtcgttgggcggtcagccaggcgggccatttaccgtaagttatgtaacgcggaactccatatatgggctatgaactaatgaccccgtaattgattactattaaattcctgcaggtttgggttcaggttatttagatgcttagtttttgtacctttcttgttttgtttaggattttgatagtgttagtatttttatatttttgtacgattgcataatgttcttttttatacagttctgttttaataaaatagacgatagctagagacgttagggcagccacaagccagttaggtagcggatagtaggtaggaacagacttttactatttcataacgcgtcaattaccacctgatttggaccaattcacgggatttgtccaaggtggacgggccacctttacttaacccggaaaaggaacatatataatttatgtgtgttcgataaatagccaaatgcctcgtcatctaattagtgacgcgcatgaatggatgaacgagattcccactgtccctacctactatccagcgaaaccacagccaagggaagcggccgcggatccgcgatgatgatcagacatgataagatacattgatgagtttggacaaaccacaactagaatgcagtgaaaaaaatgctttatttgtgaaatttgtgatgctattgctttatttgtaaccattataagctgcaataaacaagttaacaacaacaaaaaaaaaaaaaaaaaaaaattt

SEQ ID NO: 10124 - DNA, 6214 bp, synthetic construct
  source 1..6214: mol_type = other DNA
gtaataataataataataataataataataataataataatcccccccgcaggtgccaccttgacgtggtgggggcttagctgctccaatgatgactgagggctgtgctggcggtagtgtaactaccggcaggtccaaccaagccagagaggcctcagctgaggagcacaaccaagagcacctaacccattagcattatgcctaagagaaaggtgtccagcgccgagggcgctgccaaggaagagcctaaacggagaagcgccagactgagcgccaagccccccgccaaggtggaagccaagcctaagaaggccgccgctaaggacaagagcagcgataagaaagtccagaccaagggcaagcggggcgccaaaggcaaacaggccgaggtggccaaccaggagacaaaggaagatctgcctgctgagaacggcgaaaccaagaccgaggaatctccagcttctgacgaggccggagagaaggaggccaaaagcgacagcggctctgagacacctggaacaagcgagagcgccaccccggaatccgagaatcaaacccaaacgaagtctatactggctcggtcgtcgcccaggataaaaaggaccgcggtggatgctgctgattctggacatccatcgacaagtgggctacggaatcatcaaaacccaaatgaacagtcacagaagcggcaaaaatatacaatgccagaaaaccgcacaattatgaaatgctactacaaatctgaacctcaaaggcgtggctaccaaaaaaggatgcatcagctatggaaacaagagtaccctgactcacagataacagaaccccgactggctgaccaacgaagattcataatcagaaacaaagtgttcagtgaagttgaactcgaagaaatccagaaaatttgcaaagtagattaccatcagaccacagcacagacagcagcagagactccagcaacacttggaatggtggaacagattgaaccagaagaaagtgtggcgcttttgcaagaatttgaggaaccagcacttgaaacatctgttgaaccaccaggaaccttgacagcaagacaacaagagctcaaggataagatcatggctcatgctgcagcaaatgcaataagacagcggctcccaactctaaaaacagtgcccaagagacacctggcgcctctcatgaaagatgtgaatgcagcactctccactgtccaaataacatcaattgaacaaacaaaccagtttgcctacagtgcagcagtgatagtaacagaagaacttgggctcctacaaccaaggcagccccaaagaaaatcgactggaaaaccaaagtggaaggtcaggctagagttgaaaatcaagaaacttagatcagatgcaagtaacctgaaaaatatgaaagagaggaaactgaagaatgacaaaatcaagcaatacctgatccgaaagtactggctgaacaccagaaaaattgaagaagctttggaaatcgtgaaagaacaaattacagcaacagccagaaaaattgaaaggtatgaagccagaatcatccagtacagacaaaatcaactgtttcaatcagaccaaagacggttctaccagagtctgaaccaaacaacagacacagtaaccataaagccagagaaaactgcaacaacaaagttctggaaagaactttgggaaaataataaaaactacaacaaaaacgctgggtggataaaggagtttgaaggaaaattctcacagaacaaaatggaactgatggaaataacaactgaaatgatcagcaaacgagtgcaaaaagtcaagaactggacatcgcctggtagtgatcaacttcatggattttggctcaaacatctgattagtttacatggaaaaatggcccaacaattcaatgagatgctgcagaaaggaagtatcagtgaatggctaacaactggaagaacatacctgatacaaaaggatccagcaaaaggagcagcaccaggaaactacaggccaataacgtgtctgcccactatgtttaaactactgactggcatcatagctgacagaattcaagactatcttgaagaaaaaaacatcttgccagatgaacagaaaggcaacaaacggaaaagcaggggcacaaaagaccagttattgattgacaaaatgattctggagaactgtaagagccgaaaagctaatcttcacatgacgtggattgactacaaaaaggcctttgactcactcccacacagctggatcatcaagtgcctggacgccatcgggatttgtaaaacagttggcaccttcattgaaaacatgatggagcactggaaaactgaactgtttgttggaaatgaaagctatggacttgtcaacatcaggagaggaattttccagggagattcattgtcccctctgcttttcattattgccatgatccctctgtcaacaatcttacaaaaaacaaatctcggctatcaaatatctaagaattctcacaaaatttcacatttgatgtacatggatgacctgaagctatatgggaaaacggaaactgaaatccagtctctgaccaacactgtccgaatttttagcactgatatcaacatggagtttggtttggacaaatgttcgacagtggcattgaagaagggaaaaatcattgaaagtgagggcataaatatgcccaatggccaaacaataaagtgtcaccagccagaggcctataaatatctgggcatactacagctggacaacatcaagcatgaacatgtgaaaactgtggtcagcaaagaatacacacaaagggtcagaaaaattctcaaaagcaagctcaatggaggcaacaccatcaaggccataaacacctgggccatacctgtcataagatatactgctggcattataaattggacacaggtggaactggacaatttggacagaaaaacaagaaaactcatgaccattcatcattcactgcaccctcgcagtgatgttgaccggctatatctgcctagaagatcagggggcagaggactcttacaagtaaagcaagcagtcaaagaagaagaacatgccctggcagaatatgtcaagcaaagtgaagaacctgctttgattgaagtcaaaaatcagaaactcctcaaaacacagcagacaaaaaaccagtacaagaaaaccgcactacaaactagagctgacagctggcacaacaaaacactgcatggaaagttccttgacaaaattgaaggaaaagctgataaggagaagacctggctctggctcacgaatgggaccctgaagaaggagacagaaggcctgatccttgcagcccaggagcaagccatcagaacaaatgcaattaaggccaagattgaaaaatcagctgatgacccaaaatgcagactgtgcaaggaaaccgacgaaaccattgatcatatcctcagctgctgtaagaaaatcgcacagacagactacaaacagaggcacaactatgtggcccaaatgattcattggaacttatgcctcaagtaccacctcccagcagcaaagaactggtgggatcacaaacctgcaaaagtattggaaaatgaacatgcaaagatactgtgggacttccgaatccagactgacaaagttctggaacacaacacaccagacatcacagttgtggaaaagaacaaggtttggatcattgatgttgccatcccaggtgacagtcgcatagatgaaaaacaacaggaaaaactcagccgctatcaggacctcaagattgaacttcaaagactctggcagaaaccagtacaggtggtcccggtggtgatgggcacactgggtgctgtgccaaaagatctcagccggcatttggaaacaatagacattgacaaaatcaccatctgccaactgcaaaaggccaccctactgggatctgcacacatcatcagaaaatacatcacacagtcctccggctccgagactcctggaacaagcgagagcgctacacctgagggaaaaggcgaccccaagaaacctagaggcaagatgagcagctacgcctttttcgtgcagacctgtcgggaagagcacaagaaaaagcaccctgacgccagcgtgaacttctctgagttcagcaagaagtgcagcgagagatggaagacaatgtccgccaaggaaaagggcaagttcgaggacatggccaaggctgataaggccagatacgagcgggaaatgaaaacctacatcccacctaagggcgagggcggatctggcaaaagaaccgctgatggcagcgagttcgagagccccaagaaaaagagaaaggtgtaggcggcctactcgacggatcgatccgaacaaacgacccaacacccgtgcgttttattctgtctttttattgccgatcccctcagaagaactcgtcaagaaggcgatagaaggcgatgcgctgcgaatcgggagcggcgataccgtaaagcacgaggaagcggtcagcccattcgccgccaagctcttcagcaatatcacgggtagccaacgctatgtcctgatagcggtcggccgctttacttgtacagctcgtccatgccgagagtgatcccggcggcggtcacgaactccagcaggaccatgtgatcgcgcttctcgttggggtctttgctcagggcggactgggtgctcaggtagtggttgtcgggcagcagcacggggccgtcgccgatgggggtgttctgctggtagtggtcggccagctgcacgctgccgtcctcgatgttgtggcggatcttgaagttcaccttgatgccgttcttctgcttgtcggccatgatatagacgttgtggctgttgtagttgtactccagcttgtgccccaggatgttgccgtcctccttgaagtcgatgcccttcagctcgatgcggttcaccagggtgtcgccctcgaacttcacctcggcgcgggtcttgtagttgccgtcgtccttgaagaagatggtgcgctcctggacgtagccttcgggcatggcggacttgaagaagtcgtgctgcttcatgtggtcggggtagcggctgaagcactgcacgccgtaggtcagggtggtcacgagggtgggccagggcacgggcagcttgccggtggtgcagatgaacttcagggtcagcttgccgtaggtggcatcgccctcgccctcgccggacacgctgaacttgtggccgtttacgtcgccgtccagctcgaccaggatgggcaccaccccggtgaacagctcctcgcccttgctcaccatggtggcgaattcgaagcttgagctcgagatctgagtccggtagcgctagcggatctgacggttcactaaaccagctctgcttatatagacctcccaccgtacacgcctaccgcccatttgcgtcaatggggcggagttgttacgacattttggaaagtcccgttgattttggtgccaaaacaaactcccattgacgtcaatggggtggagacttggaaatccccgtgagtcaaaccgctatccacgcccattgatgtactgccaaaaccgcatcaccatggtaatagcgatgactaatacgtagatgtactgccaagtaggaaagtcccataaggtcatgtactgggcataatgccaggcgggccatttaccgtcattgacgtcaatagggggcgtacttggcatatgatacacttgatgtactgccaagtgggcagtttaccgtaaatactccacccattgacgtcaatggaaagtccctattggcgttactatgggaacatacgtcattattgacgtcaatgggcgggggtcgttgggcggtcagccaggcgggccatttaccgtaagttatgtaacgcggaactccatatatgggctatgaactaatgaccccgtaattgattactattaaattcctgcaggtttgggacacttgggaagtgttcgacttgtggttttgcgaaacgaaatccagcatatctatcttgtttgctgtgccatacaacgtcgttgtgttgataataataataagcggccgcggatccgcgatgatgatcagacatgataagatacattgatgagtttggacaaaccacaactagaatgcagtgaaaaaaatgctttatttgtgaaatttgtgatgctattgctttatttgtaaccattataagctgcaataaacaagttaacaacaacaaaaaaaaaaaaaaaaaaaaattt

SEQ ID NO: 10125 - DNA, 7801 bp, synthetic construct
  source 1..7801: mol_type = other DNA
ggttgacgcgatgtgatttctgcccagtgctctgaatgtcaaagtgaagaaattcaatgaagcgcgggtaaacggcgggagtaactatgactctcttaagggtctagttacaactgggcatcgctgcagagatcgcacctcctcgtggtcccgctggtagcccttcgaagggtgactaagtcgatctctgccccaggtacggagccgttgggactcaccagtccaacgtaactcctgcctaaattcggtgaaacaaattcctcggtaaaaagccccatgcctaagagaaaggtgtccagcgccgagggcgctgccaaggaagagcctaaacggagaagcgccagactgagcgccaagccccccgccaaggtggaagccaagcctaagaaggccgccgctaaggacaagagcagcgataagaaagtccagaccaagggcaagcggggcgccaaaggcaaacaggccgaggtggccaaccaggagacaaaggaagatctgcctgctgagaacggcgaaaccaagaccgaggaatctccagcttctgacgaggccggagagaaggaggccaaaagcgacagcggctctgagacacctggaacaagcgagagcgccaccccggaatccgcttcttgcccgaaacctggccccccggtttcagcaggggcaatgagtttggaaagtggactgaccacccactccgttctcgccatcgaacgtggtcccaattcgttggcaaattccggatcagactttgggggggggggtctggggctaccgttacgcctattgagggtatcggtcggcactcagacctcccgctccgactgggtagacctggtgtcctggagccacccaggacccacgtctaagtcccagcaggttgacctggtgtctttatttcctaaacaccgggttgacctgttatccaaaaacgaccaggtagacctggtggctcaatttttaccatctaaatttccccccaatttggcagaaaatgatttggctttgctggtgaacttagagttctacagatcggatttgcatgtgtatgagtgtgttcattttgctgcacattgggagggattaagtggtttgcctgaggtgtatgaacaacttgcaccacaaccgtgtgtgggagaaactttacattctagcctcccacgagacagtgaactgtttgtgcctgaagaggggagcagcgagaaggagagcgaggacgcgccaaaaacatctcctccgacgcctgggaaacatggtttggaacagactggggaggaaaaagtgatggtgactgttcctgacaaaaatccaccttgtccttgctgtggtacccgggtaaactctgtgttgaatctgattgaacatctgaaagtgtcacacgggaaaaggggggtttgttttcggtgtgcaaaatgtggaaaggaaaatagtaactatcacagtgttgtttgtcattttccaaaatgcaggggtccagagacggagaaagccccagctggggagtggatttgtgaggtatgcaacagagattttacaaccaaaattggcctgggacaacacaagagattggcacacccagcagtgagaaatcaggaaaggatcgttgcttcccaaccgaaagaaacatcaaatagaggtgctcacaaaaggtgctggacaaaggaggaggaagaattactaataagactggaggctcagttcgagggaaacaaaaatattaataagcttattgcagaacacataaccaccaaaacagctaagcagatcagtgacaaaaggcgattgctgtccagaaagccagcagaggagccacgtgaggagcctggaacgtgtcatcacaccaggagagcagctgcgagcctgagaacggagcctgagatgagtcatcacgcccaggcagaggacagagataatggacctgggagacgccctctgccaggcagggcagctgccggagggagaacaatggacgagataagacgccaccctgataagggcaacggacagcagagacccaccaagcaaaaatcagaagaacagctgcaggcttactataaaaagacactagaggaacgactttcagctggggcacttaacaccttcccccgagcattcaagcaggtaatggaaggccgggatataaagctagtaatcaatcagacagcgcaggactgcttcggatgcctggaatccataagccaaataagaacggcaacccgagataaaaaggacacggtgacccgggagaaacacccaaagaaaccttttcagaagtggatgaaggacagagcaatcaaaaaaggtaattatcttcggttccagcgtttattttatcttgatagagggaaactggctaaaatcattttagatgatattgaatgcttgtcttgtgacataccactcagtgaaatttattcggtttttaaaacaagatgggaaacaactggtagctttaaaagccttggggactttaaaacttacgggaaggctgacaacactgccttcagagaattaattacggctaaagaaattgagaaaaatgtgcaggaaatgagcaaaggctcggctcccggtccagacgggattactcttggggacgtcgtaaagatggatcccgagttttcccggaccatggagattttcaatttatggttaacaactggtaaaatcccggacatggtgagggggtgcagaaccgttttgattccaaaatcatcaaagccggatcgtttgaaagacattaataactggagacctatcacgatcggttccatcttgctgagactgttctccaggattgtaacagctaggctgagcaaagcgtgccccctgaacccaaggcaaagaggctttatcagagcggcgggatgctctgaaaacttaaaactcctgcaaactataatttggtcggccaaaagagaacacagaccactgggtgttgtattcgtggacatcgccaaggcttttgacaccgtaagccaccagcacatcattcatgctttgcagcaaagagaggtggatccccacatcgtcggtctggtgagcaatatgtacgagaacatcagtacgtatatcaccacaaagaggaacacacacacagacaaaatccagatccgggttggagtaaagcagggtgacccgatgtcgccccttttatttaacctggcaatggaccctctattatgcaagctggaagagagtggcaaaggataccaccgaggacagagcagcatcacagcgatggcatttgcagacgatctggttttgctgagcgactcctgggaaaatatgaatacaaatattagcatactggagaccttctgcaatctgaccggtctcaaaacacaggggcaaaagtgccacggcttttacatcaagccgacaaaggactcttacaccatcaatgactgcgctgcctggactatcaacggcacacccctgaacatgatcgaccccggcgaatctgagaaatacctcggcctgcagtttgacccgtggattggaatagcaaggtccggtctctccacaaaactagatttttggcttcagcggatcgatcaagcaccacttaaacctctgcagaaaactgatattctcaaaacatacaccatccctcggctgatctacatagctgaccactcagaagtgaaaactgcactactcgaaacccttgaccagaagatccggacagcggtcaaggaatggcttcacctacctccgtgcacctgcgatgccatcctgtactcgagcacgagagacggcggtttgggcatcaccaaattggcaggactgatccccagcgtgcaggcccgtagactgcatcggatcgcacagtcatctgacgatacgatgaaatgcttcatggaaaaagagaaaatggaacagctgcataagaaattgtggattcaagctggaggggacagagagaacataccctcgatttgggaagcaccaccgtcgagtgaaccaccaaacaacgtgagcacaaattcggaatgggaagcaccgacccagaaagataaatttccaaagccttgcaattggaggaaaaacgaattcaaaaaatggaccaaattggcatcccaaggccgcggaattgtaaattttgaaagagacaaaattagtaaccattggatccaatactacagacgcatacctcacaggaaactcctcactgcactacaactcagggccaacgtttaccccacgagagaatttctagccaggggtagacaagaccaatacatcaaggcgtgtaggcactgcgatgcggacattgaatcctgcgcccacatcatcggcaactgcccagtgacacaggacgcccgaatcaagaggcacaattacatctgcgaactgcttctcgaggaggcgaagaagaaggactgggtagtgttcaaggaaccgcacataagggattccaacaaggaactgtacaaacctgacctgatatttgtgaaggatgcccgtgcacttgtcgtggatgtgacagtacggtatgaagcagccaaatcatcgctggaggaagccgctgcagagaaagtgagaaagtacaaacacctggaaacggaagtaagacatctcacgaatgcaaaggacgttacttttgtgggctttcccctaggagcgcgggggaaatggcaccaagataactttaaacttttgactgagcttggcctctccaaatcgaggcaagtgaaaatggcagagactttttccacagtagcgctcttttcatctgtggacattgtacatatgtttgccagtagggccagaaaatctatggttatgtccggctccgagactcctggaacaagcgagagcgctacacctgagggcagcgaaagcacagtcggccctgcttgccccccaggaagaaccgtgaccaagcggccctgggccctggccgaggacacccctaggggccccgatagcccccccaaaagaccccggcctaacagcctgcctctgaccacaacattcagacctctgcctcctccacctcagaccaccagcgccgtggaccctagcagccactcccctgtgaacccccctcgggaccagcacgccacagataccgccgacgagaagcccagagccgcttctccagccctgagcgacgccagcggacctcctacccctgacatccccctgtctcctggcggcacccacgccagagatcctgatgctgatcctgactctccagacctggacagctccggctccgagactcctggaacaagcgagagcgctacacctgagggaaaaggcgaccccaagaaacctagaggcaagatgagcagctacgcctttttcgtgcagacctgtcgggaagagcacaagaaaaagcaccctgacgccagcgtgaacttctctgagttcagcaagaagtgcagcgagagatggaagacaatgtccgccaaggaaaagggcaagttcgaggacatggccaaggctgataaggccagatacgagcgggaaatgaaaacctacatcccacctaagggcgagggcggatctggcaaaagaaccgctgatggcagcgagttcgagagccccaagaaaaagagaaaggtgtaagcggcctactcgacggatcgatccgaacaaacgacccaacacccgtgcgttttattctgtctttttattgccgatcccctcagaagaactcgtcaagaaggcgatagaaggcgatgcgctgcgaatcgggagcggcgataccgtaaagcacgaggaagcggtcagcccattcgccgccaagctcttcagcaatatcacgggtagccaacgctatgtcctgatagcggtcggccgctttacttgtacagctcgtccatgccgagagtgatcccggcggcggtcacgaactccagcaggaccatgtgatcgcgcttctcgttggggtctttgctcagggcggactgggtgctcaggtagtggttgtcgggcagcagcacggggccgtcgccgatgggggtgttctgctggtagtggtcggccagctgcacgctgccgtcctcgatgttgtggcggatcttgaagttcaccttgatgccgttcttctgcttgtcggccatgatatagacgttgtggctgttgtagttgtactccagcttgtgccccaggatgttgccgtcctccttgaagtcgatgcccttcagctcgatgcggttcaccagggtgtcgccctcgaacttcacctcggcgcgggtcttgtagttgccgtcgtccttgaagaagatggtgcgctcctggacgtagccttcgggcatggcggacttgaagaagtcgtgctgcttcatgtggtcggggtagcggctgaagcactgcacgccgtaggtcagggtggtcacgagggtgggccagggcacgggcagcttgccggtggtgcagatgaacttcagggtcagcttgccgtaggtggcatcgccctcgccctcgccggacacgctgaacttgtggccgtttacgtcgccgtccagctcgaccaggatgggcaccaccccggtgaacagctcctcgcccttgctcaccatggtggcgaattcgaagcttgagctcgagatctgagtccggtagcgctagcggatctgacggttcactaaaccagctctgcttatatagacctcccaccgtacacgcctaccgcccatttgcgtcaatggggcggagttgttacgacattttggaaagtcccgttgattttggtgccaaaacaaactcccattgacgtcaatggggtggagacttggaaatccccgtgagtcaaaccgctatccacgcccattgatgtactgccaaaaccgcatcaccatggtaatagcgatgactaatacgtagatgtactgccaagtaggaaagtcccataaggtcatgtactgggcataatgccaggcgggccatttaccgtcattgacgtcaatagggggcgtacttggcatatgatacacttgatgtactgccaagtgggcagtttaccgtaaatactccacccattgacgtcaatggaaagtccctattggcgttactatgggaacatacgtcattattgacgtcaatgggcgggggtcgttgggcggtcagccaggcgggccatttaccgtaagttatgtaacgcggaactccatatatgggctatgaactaatgaccccgtaattgattactattaaattcctgcaggtttgggttcaggttatttagatgcttagtttttgtacctttcttgttttgtttaggattttgatagtgttagtatttttatatttttgtacgattgcataatgttcttttttatacagttctgttttaataaaatagacgatagctagagacgttagggcagccacaagccagttaggtagcggatagtaggtaggaacagacttttactatttcataacgcgtcaattaccacctgatttggaccaattcacgggatttgtccaaggtggacgggccacctttacttaacccggaaaaggaacatatataatttatgtgtgttcgataaatagccaaatgcctcgtcatctaattagtgacgcgcatgaatggatgaacgagattcccactgtccctacctactatccagcgaaaccacagccaagggaagcggccgcggatccgcgatgatgatcagacatgataagatacattgatgagtttggacaaaccacaactagaatgcagtgaaaaaaatgctttatttgtgaaatttgtgatgctattgctttatttgtaaccattataagctgcaataaacaagttaacaacaacaaaaaaaaaaaaaaaaaaaaattt

SEQ ID NO: 10126 - DNA, 6964 bp, synthetic construct
  source 1..6964: mol_type = other DNA
ggttgacgcgatgtgatttctgcccagtgctctgaatgtcaaagtgaagaaattcaatgaagcgcgggtaaacggcgggagtaactatgactctcttaagggtctagttacaactgggcatcgctgcagagatcgcacctcctcgtggtcccgctggtagcccttcgaagggtgactaagtcgatctctgccccaggtacggagccgttgggactcaccagtccaacgtaactcctgcctaaattcggtgaaacaaattcctcggtaaaaagccccatggcttcttgcccgaaacctggccccccggtttcagcaggggcaatgagtttggaaagtggactgaccacccactccgttctcgccatcgaacgtggtcccaattcgttggcaaattccggatcagactttgggggggggggtctggggctaccgttacgcctattgagggtatcggtcggcactcagacctcccgctccgactgggtagacctggtgtcctggagccacccaggacccacgtctaagtcccagcaggttgacctggtgtctttatttcctaaacaccgggttgacctgttatccaaaaacgaccaggtagacctggtggctcaatttttaccatctaaatttccccccaatttggcagaaaatgatttggctttgctggtgaacttagagttctacagatcggatttgcatgtgtatgagtgtgttcattttgctgcacattgggagggattaagtggtttgcctgaggtgtatgaacaacttgcaccacaaccgtgtgtgggagaaactttacattctagcctcccacgagacagtgaactgtttgtgcctgaagaggggagcagcgagaaggagagcgaggacgcgccaaaaacatctcctccgacgcctgggaaacatggtttggaacagactggggaggaaaaagtgatggtgactgttcctgacaaaaatccaccttgtccttgctgtggtacccgggtaaactctgtgttgaatctgattgaacatctgaaagtgtcacacgggaaaaggggggtttgttttcggtgtgcaaaatgtggaaaggaaaatagtaactatcacagtgttgtttgtcattttccaaaatgcaggggtccagagacggagaaagccccagctggggagtggatttgtgaggtatgcaacagagattttacaaccaaaattggcctgggacaacacaagagattggcacacccagcagtgagaaatcaggaaaggatcgttgcttcccaaccgaaagaaacatcaaatagaggtgctcacaaaaggtgctggacaaaggaggaggaagaattactaataagactggaggctcagttcgagggaaacaaaaatattaataagcttattgcagaacacataaccaccaaaacagctaagcagatcagtgacaaaaggcgattgctgtccagaaagccagcagaggagccacgtgaggagcctggaacgtgtcatcacaccaggagagcagctgcgagcctgagaacggagcctgagatgagtcatcacgcccaggcagaggacagagataatggacctgggagacgccctctgccaggcagggcagctgccggagggagaacaatggacgagataagacgccaccctgataagggcaacggacagcagagacccaccaagcaaaaatcagaagaacagctgcaggcttactataaaaagacactagaggaacgactttcagctggggcacttaacaccttcccccgagcattcaagcaggtaatggaaggccgggatataaagctagtaatcaatcagacagcgcaggactgcttcggatgcctggaatccataagccaaataagaacggcaacccgagataaaaaggacacggtgacccgggagaaacacccaaagaaaccttttcagaagtggatgaaggacagagcaatcaaaaaaggtaattatcttcggttccagcgtttattttatcttgatagagggaaactggctaaaatcattttagatgatattgaatgcttgtcttgtgacataccactcagtgaaatttattcggtttttaaaacaagatgggaaacaactggtagctttaaaagccttggggactttaaaacttacgggaaggctgacaacactgccttcagagaattaattacggctaaagaaattgagaaaaatgtgcaggaaatgagcaaaggctcggctcccggtccagacgggattactcttggggacgtcgtaaagatggatcccgagttttcccggaccatggagattttcaatttatggttaacaactggtaaaatcccggacatggtgagggggtgcagaaccgttttgattccaaaatcatcaaagccggatcgtttgaaagacattaataactggagacctatcacgatcggttccatcttgctgagactgttctccaggattgtaacagctaggctgagcaaagcgtgccccctgaacccaaggcaaagaggctttatcagagcggcgggatgctctgaaaacttaaaactcctgcaaactataatttggtcggccaaaagagaacacagaccactgggtgttgtattcgtggacatcgccaaggcttttgacaccgtaagccaccagcacatcattcatgctttgcagcaaagagaggtggatccccacatcgtcggtctggtgagcaatatgtacgagaacatcagtacgtatatcaccacaaagaggaacacacacacagacaaaatccagatccgggttggagtaaagcagggtgacccgatgtcgccccttttatttaacctggcaatggaccctctattatgcaagctggaagagagtggcaaaggataccaccgaggacagagcagcatcacagcgatggcatttgcagacgatctggttttgctgagcgactcctgggaaaatatgaatacaaatattagcatactggagaccttctgcaatctgaccggtctcaaaacacaggggcaaaagtgccacggcttttacatcaagccgacaaaggactcttacaccatcaatgactgcgctgcctggactatcaacggcacacccctgaacatgatcgaccccggcgaatctgagaaatacctcggcctgcagtttgacccgtggattggaatagcaaggtccggtctctccacaaaactagatttttggcttcagcggatcgatcaagcaccacttaaacctctgcagaaaactgatattctcaaaacatacaccatccctcggctgatctacatagctgaccactcagaagtgaaaactgcactactcgaaacccttgaccagaagatccggacagcggtcaaggaatggcttcacctacctccgtgcacctgcgatgccatcctgtactcgagcacgagagacggcggtttgggcatcaccaaattggcaggactgatccccagcgtgcaggcccgtagactgcatcggatcgcacagtcatctgacgatacgatgaaatgcttcatggaaaaagagaaaatggaacagctgcataagaaattgtggattcaagctggaggggacagagagaacataccctcgatttgggaagcaccaccgtcgagtgaaccaccaaacaacgtgagcacaaattcggaatgggaagcaccgacccagaaagataaatttccaaagccttgcaattggaggaaaaacgaattcaaaaaatggaccaaattggcatcccaaggccgcggaattgtaaattttgaaagagacaaaattagtaaccattggatccaatactacagacgcatacctcacaggaaactcctcactgcactacaactcagggccaacgtttaccccacgagagaatttctagccaggggtagacaagaccaatacatcaaggcgtgtaggcactgcgatgcggacattgaatcctgcgcccacatcatcggcaactgcccagtgacacaggacgcccgaatcaagaggcacaattacatctgcgaactgcttctcgaggaggcgaagaagaaggactgggtagtgttcaaggaaccgcacataagggattccaacaaggaactgtacaaacctgacctgatatttgtgaaggatgcccgtgcacttgtcgtggatgtgacagtacggtatgaagcagccaaatcatcgctggaggaagccgctgcagagaaagtgagaaagtacaaacacctggaaacggaagtaagacatctcacgaatgcaaaggacgttacttttgtgggctttcccctaggagcgcgggggaaatggcaccaagataactttaaacttttgactgagcttggcctctccaaatcgaggcaagtgaaaatggcagagactttttccacagtagcgctcttttcatctgtggacattgtacatatgtttgccagtagggccagaaaatctatggttatgtccggctccgagactcctggaacaagcgagagcgctacacctgagggcagcgtgaccgtgaagttcaagtacaagggcgaggaaaaggaagtggacatcagcaagatcaagaaggtctggcgggtgggcaagatgatcagctttacctacgacgataacggcaagacaggcagaggcgccgtgtccgagaaggacgcccctaaagagctgctgcagatgctggaaaaaggcggatctggcaaaagaaccgctgatggcagcgagttcgagagccccaagaaaaagagaaaggtgtaagcggcctactcgacggatcgatccgaacaaacgacccaacacccgtgcgttttattctgtctttttattgccgatcccctcagaagaactcgtcaagaaggcgatagaaggcgatgcgctgcgaatcgggagcggcgataccgtaaagcacgaggaagcggtcagcccattcgccgccaagctcttcagcaatatcacgggtagccaacgctatgtcctgatagcggtcggccgctttacttgtacagctcgtccatgccgagagtgatcccggcggcggtcacgaactccagcaggaccatgtgatcgcgcttctcgttggggtctttgctcagggcggactgggtgctcaggtagtggttgtcgggcagcagcacggggccgtcgccgatgggggtgttctgctggtagtggtcggccagctgcacgctgccgtcctcgatgttgtggcggatcttgaagttcaccttgatgccgttcttctgcttgtcggccatgatatagacgttgtggctgttgtagttgtactccagcttgtgccccaggatgttgccgtcctccttgaagtcgatgcccttcagctcgatgcggttcaccagggtgtcgccctcgaacttcacctcggcgcgggtcttgtagttgccgtcgtccttgaagaagatggtgcgctcctggacgtagccttcgggcatggcggacttgaagaagtcgtgctgcttcatgtggtcggggtagcggctgaagcactgcacgccgtaggtcagggtggtcacgagggtgggccagggcacgggcagcttgccggtggtgcagatgaacttcagggtcagcttgccgtaggtggcatcgccctcgccctcgccggacacgctgaacttgtggccgtttacgtcgccgtccagctcgaccaggatgggcaccaccccggtgaacagctcctcgcccttgctcaccatggtggcgaattcgaagcttgagctcgagatctgagtccggtagcgctagcggatctgacggttcactaaaccagctctgcttatatagacctcccaccgtacacgcctaccgcccatttgcgtcaatggggcggagttgttacgacattttggaaagtcccgttgattttggtgccaaaacaaactcccattgacgtcaatggggtggagacttggaaatccccgtgagtcaaaccgctatccacgcccattgatgtactgccaaaaccgcatcaccatggtaatagcgatgactaatacgtagatgtactgccaagtaggaaagtcccataaggtcatgtactgggcataatgccaggcgggccatttaccgtcattgacgtcaatagggggcgtacttggcatatgatacacttgatgtactgccaagtgggcagtttaccgtaaatactccacccattgacgtcaatggaaagtccctattggcgttactatgggaacatacgtcattattgacgtcaatgggcgggggtcgttgggcggtcagccaggcgggccatttaccgtaagttatgtaacgcggaactccatatatgggctatgaactaatgaccccgtaattgattactattaaattcctgcaggtttgggttcaggttatttagatgcttagtttttgtacctttcttgttttgtttaggattttgatagtgttagtatttttatatttttgtacgattgcataatgttcttttttatacagttctgttttaataaaatagacgatagctagagacgttagggcagccacaagccagttaggtagcggatagtaggtaggaacagacttttactatttcataacgcgtcaattaccacctgatttggaccaattcacgggatttgtccaaggtggacgggccacctttacttaacccggaaaaggaacatatataatttatgtgtgttcgataaatagccaaatgcctcgtcatctaattagtgacgcgcatgaatggatgaacgagattcccactgtccctacctactatccagcgaaaccacagccaagggaagcggccgcggatccgcgatgatgatcagacatgataagatacattgatgagtttggacaaaccacaactagaatgcagtgaaaaaaatgctttatttgtgaaatttgtgatgctattgctttatttgtaaccattataagctgcaataaacaagttaacaacaacaaaaaaaaaaaaaaaaaaaaattt

SEQ ID NO: 10127 - DNA, 7162 bp, synthetic construct
  source 1..7162: mol_type = other DNA
ggttgacgcgatgtgatttctgcccagtgctctgaatgtcaaagtgaagaaattcaatgaagcgcgggtaaacggcgggagtaactatgactctcttaagggtctagttacaactgggcatcgctgcagagatcgcacctcctcgtggtcccgctggtagcccttcgaagggtgactaagtcgatctctgccccaggtacggagccgttgggactcaccagtccaacgtaactcctgcctaaattcggtgaaacaaattcctcggtaaaaagccccatggcttcttgcccgaaacctggccccccggtttcagcaggggcaatgagtttggaaagtggactgaccacccactccgttctcgccatcgaacgtggtcccaattcgttggcaaattccggatcagactttgggggggggggtctggggctaccgttacgcctattgagggtatcggtcggcactcagacctcccgctccgactgggtagacctggtgtcctggagccacccaggacccacgtctaagtcccagcaggttgacctggtgtctttatttcctaaacaccgggttgacctgttatccaaaaacgaccaggtagacctggtggctcaatttttaccatctaaatttccccccaatttggcagaaaatgatttggctttgctggtgaacttagagttctacagatcggatttgcatgtgtatgagtgtgttcattttgctgcacattgggagggattaagtggtttgcctgaggtgtatgaacaacttgcaccacaaccgtgtgtgggagaaactttacattctagcctcccacgagacagtgaactgtttgtgcctgaagaggggagcagcgagaaggagagcgaggacgcgccaaaaacatctcctccgacgcctgggaaacatggtttggaacagactggggaggaaaaagtgatggtgactgttcctgacaaaaatccaccttgtccttgctgtggtacccgggtaaactctgtgttgaatctgattgaacatctgaaagtgtcacacgggaaaaggggggtttgttttcggtgtgcaaaatgtggaaaggaaaatagtaactatcacagtgttgtttgtcattttccaaaatgcaggggtccagagacggagaaagccccagctggggagtggatttgtgaggtatgcaacagagattttacaaccaaaattggcctgggacaacacaagagattggcacacccagcagtgagaaatcaggaaaggatcgttgcttcccaaccgaaagaaacatcaaatagaggtgctcacaaaaggtgctggacaaaggaggaggaagaattactaataagactggaggctcagttcgagggaaacaaaaatattaataagcttattgcagaacacataaccaccaaaacagctaagcagatcagtgacaaaaggcgattgctgtccagaaagccagcagaggagccacgtgaggagcctggaacgtgtcatcacaccaggagagcagctgcgagcctgagaacggagcctgagatgagtcatcacgcccaggcagaggacagagataatggacctgggagacgccctctgccaggcagggcagctgccggagggagaacaatggacgagataagacgccaccctgataagggcaacggacagcagagacccaccaagcaaaaatcagaagaacagctgcaggcttactataaaaagacactagaggaacgactttcagctggggcacttaacaccttcccccgagcattcaagcaggtaatggaaggccgggatataaagctagtaatcaatcagacagcgcaggactgcttcggatgcctggaatccataagccaaataagaacggcaacccgagataaaaaggacacggtgacccgggagaaacacccaaagaaaccttttcagaagtggatgaaggacagagcaatcaaaaaaggtaattatcttcggttccagcgtttattttatcttgatagagggaaactggctaaaatcattttagatgatattgaatgcttgtcttgtgacataccactcagtgaaatttattcggtttttaaaacaagatgggaaacaactggtagctttaaaagccttggggactttaaaacttacgggaaggctgacaacactgccttcagagaattaattacggctaaagaaattgagaaaaatgtgcaggaaatgagcaaaggctcggctcccggtccagacgggattactcttggggacgtcgtaaagatggatcccgagttttcccggaccatggagattttcaatttatggttaacaactggtaaaatcccggacatggtgagggggtgcagaaccgttttgattccaaaatcatcaaagccggatcgtttgaaagacattaataactggagacctatcacgatcggttccatcttgctgagactgttctccaggattgtaacagctaggctgagcaaagcgtgccccctgaacccaaggcaaagaggctttatcagagcggcgggatgctctgaaaacttaaaactcctgcaaactataatttggtcggccaaaagagaacacagaccactgggtgttgtattcgtggacatcgccaaggcttttgacaccgtaagccaccagcacatcattcatgctttgcagcaaagagaggtggatccccacatcgtcggtctggtgagcaatatgtacgagaacatcagtacgtatatcaccacaaagaggaacacacacacagacaaaatccagatccgggttggagtaaagcagggtgacccgatgtcgccccttttatttaacctggcaatggaccctctattatgcaagctggaagagagtggcaaaggataccaccgaggacagagcagcatcacagcgatggcatttgcagacgatctggttttgctgagcgactcctgggaaaatatgaatacaaatattagcatactggagaccttctgcaatctgaccggtctcaaaacacaggggcaaaagtgccacggcttttacatcaagccgacaaaggactcttacaccatcaatgactgcgctgcctggactatcaacggcacacccctgaacatgatcgaccccggcgaatctgagaaatacctcggcctgcagtttgacccgtggattggaatagcaaggtccggtctctccacaaaactagatttttggcttcagcggatcgatcaagcaccacttaaacctctgcagaaaactgatattctcaaaacatacaccatccctcggctgatctacatagctgaccactcagaagtgaaaactgcactactcgaaacccttgaccagaagatccggacagcggtcaaggaatggcttcacctacctccgtgcacctgcgatgccatcctgtactcgagcacgagagacggcggtttgggcatcaccaaattggcaggactgatccccagcgtgcaggcccgtagactgcatcggatcgcacagtcatctgacgatacgatgaaatgcttcatggaaaaagagaaaatggaacagctgcataagaaattgtggattcaagctggaggggacagagagaacataccctcgatttgggaagcaccaccgtcgagtgaaccaccaaacaacgtgagcacaaattcggaatgggaagcaccgacccagaaagataaatttccaaagccttgcaattggaggaaaaacgaattcaaaaaatggaccaaattggcatcccaaggccgcggaattgtaaattttgaaagagacaaaattagtaaccattggatccaatactacagacgcatacctcacaggaaactcctcactgcactacaactcagggccaacgtttaccccacgagagaatttctagccaggggtagacaagaccaatacatcaaggcgtgtaggcactgcgatgcggacattgaatcctgcgcccacatcatcggcaactgcccagtgacacaggacgcccgaatcaagaggcacaattacatctgcgaactgcttctcgaggaggcgaagaagaaggactgggtagtgttcaaggaaccgcacataagggattccaacaaggaactgtacaaacctgacctgatatttgtgaaggatgcccgtgcacttgtcgtggatgtgacagtacggtatgaagcagccaaatcatcgctggaggaagccgctgcagagaaagtgagaaagtacaaacacctggaaacggaagtaagacatctcacgaatgcaaaggacgttacttttgtgggctttcccctaggagcgcgggggaaatggcaccaagataactttaaacttttgactgagcttggcctctccaaatcgaggcaagtgaaaatggcagagactttttccacagtagcgctcttttcatctgtggacattgtacatatgtttgccagtagggccagaaaatctatggttatgtccggctccgagactcctggaacaagcgagagcgctacacctgagggcagcgaaagcacagtcggccctgcttgccccccaggaagaaccgtgaccaagcggccctgggccctggccgaggacacccctaggggccccgatagcccccccaaaagaccccggcctaacagcctgcctctgaccacaacattcagacctctgcctcctccacctcagaccaccagcgccgtggaccctagcagccactcccctgtgaacccccctcgggaccagcacgccacagataccgccgacgagaagcccagagccgcttctccagccctgagcgacgccagcggacctcctacccctgacatccccctgtctcctggcggcacccacgccagagatcctgatgctgatcctgactctccagacctggacagcggcggatctggcaaaagaaccgctgatggcagcgagttcgagagccccaagaaaaagagaaaggtgtaagcggcctactcgacggatcgatccgaacaaacgacccaacacccgtgcgttttattctgtctttttattgccgatcccctcagaagaactcgtcaagaaggcgatagaaggcgatgcgctgcgaatcgggagcggcgataccgtaaagcacgaggaagcggtcagcccattcgccgccaagctcttcagcaatatcacgggtagccaacgctatgtcctgatagcggtcggccgctttacttgtacagctcgtccatgccgagagtgatcccggcggcggtcacgaactccagcaggaccatgtgatcgcgcttctcgttggggtctttgctcagggcggactgggtgctcaggtagtggttgtcgggcagcagcacggggccgtcgccgatgggggtgttctgctggtagtggtcggccagctgcacgctgccgtcctcgatgttgtggcggatcttgaagttcaccttgatgccgttcttctgcttgtcggccatgatatagacgttgtggctgttgtagttgtactccagcttgtgccccaggatgttgccgtcctccttgaagtcgatgcccttcagctcgatgcggttcaccagggtgtcgccctcgaacttcacctcggcgcgggtcttgtagttgccgtcgtccttgaagaagatggtgcgctcctggacgtagccttcgggcatggcggacttgaagaagtcgtgctgcttcatgtggtcggggtagcggctgaagcactgcacgccgtaggtcagggtggtcacgagggtgggccagggcacgggcagcttgccggtggtgcagatgaacttcagggtcagcttgccgtaggtggcatcgccctcgccctcgccggacacgctgaacttgtggccgtttacgtcgccgtccagctcgaccaggatgggcaccaccccggtgaacagctcctcgcccttgctcaccatggtggcgaattcgaagcttgagctcgagatctgagtccggtagcgctagcggatctgacggttcactaaaccagctctgcttatatagacctcccaccgtacacgcctaccgcccatttgcgtcaatggggcggagttgttacgacattttggaaagtcccgttgattttggtgccaaaacaaactcccattgacgtcaatggggtggagacttggaaatccccgtgagtcaaaccgctatccacgcccattgatgtactgccaaaaccgcatcaccatggtaatagcgatgactaatacgtagatgtactgccaagtaggaaagtcccataaggtcatgtactgggcataatgccaggcgggccatttaccgtcattgacgtcaatagggggcgtacttggcatatgatacacttgatgtactgccaagtgggcagtttaccgtaaatactccacccattgacgtcaatggaaagtccctattggcgttactatgggaacatacgtcattattgacgtcaatgggcgggggtcgttgggcggtcagccaggcgggccatttaccgtaagttatgtaacgcggaactccatatatgggctatgaactaatgaccccgtaattgattactattaaattcctgcaggtttgggttcaggttatttagatgcttagtttttgtacctttcttgttttgtttaggattttgatagtgttagtatttttatatttttgtacgattgcataatgttcttttttatacagttctgttttaataaaatagacgatagctagagacgttagggcagccacaagccagttaggtagcggatagtaggtaggaacagacttttactatttcataacgcgtcaattaccacctgatttggaccaattcacgggatttgtccaaggtggacgggccacctttacttaacccggaaaaggaacatatataatttatgtgtgttcgataaatagccaaatgcctcgtcatctaattagtgacgcgcatgaatggatgaacgagattcccactgtccctacctactatccagcgaaaccacagccaagggaagcggccgcggatccgcgatgatgatcagacatgataagatacattgatgagtttggacaaaccacaactagaatgcagtgaaaaaaatgctttatttgtgaaatttgtgatgctattgctttatttgtaaccattataagctgcaataaacaagttaacaacaacaaaaaaaaaaaaaaaaaaaaattt

SEQ ID NO: 10128 - DNA, 6973 bp, synthetic construct
  source 1..6973: mol_type = other DNA
ggttgacgcgatgtgatttctgcccagtgctctgaatgtcaaagtgaagaaattcaatgaagcgcgggtaaacggcgggagtaactatgactctcttaagggtctagttacaactgggcatcgctgcagagatcgcacctcctcgtggtcccgctggtagcccttcgaagggtgactaagtcgatctctgccccaggtacggagccgttgggactcaccagtccaacgtaactcctgcctaaattcggtgaaacaaattcctcggtaaaaagccccatggcttcttgcccgaaacctggccccccggtttcagcaggggcaatgagtttggaaagtggactgaccacccactccgttctcgccatcgaacgtggtcccaattcgttggcaaattccggatcagactttgggggggggggtctggggctaccgttacgcctattgagggtatcggtcggcactcagacctcccgctccgactgggtagacctggtgtcctggagccacccaggacccacgtctaagtcccagcaggttgacctggtgtctttatttcctaaacaccgggttgacctgttatccaaaaacgaccaggtagacctggtggctcaatttttaccatctaaatttccccccaatttggcagaaaatgatttggctttgctggtgaacttagagttctacagatcggatttgcatgtgtatgagtgtgttcattttgctgcacattgggagggattaagtggtttgcctgaggtgtatgaacaacttgcaccacaaccgtgtgtgggagaaactttacattctagcctcccacgagacagtgaactgtttgtgcctgaagaggggagcagcgagaaggagagcgaggacgcgccaaaaacatctcctccgacgcctgggaaacatggtttggaacagactggggaggaaaaagtgatggtgactgttcctgacaaaaatccaccttgtccttgctgtggtacccgggtaaactctgtgttgaatctgattgaacatctgaaagtgtcacacgggaaaaggggggtttgttttcggtgtgcaaaatgtggaaaggaaaatagtaactatcacagtgttgtttgtcattttccaaaatgcaggggtccagagacggagaaagccccagctggggagtggatttgtgaggtatgcaacagagattttacaaccaaaattggcctgggacaacacaagagattggcacacccagcagtgagaaatcaggaaaggatcgttgcttcccaaccgaaagaaacatcaaatagaggtgctcacaaaaggtgctggacaaaggaggaggaagaattactaataagactggaggctcagttcgagggaaacaaaaatattaataagcttattgcagaacacataaccaccaaaacagctaagcagatcagtgacaaaaggcgattgctgtccagaaagccagcagaggagccacgtgaggagcctggaacgtgtcatcacaccaggagagcagctgcgagcctgagaacggagcctgagatgagtcatcacgcccaggcagaggacagagataatggacctgggagacgccctctgccaggcagggcagctgccggagggagaacaatggacgagataagacgccaccctgataagggcaacggacagcagagacccaccaagcaaaaatcagaagaacagctgcaggcttactataaaaagacactagaggaacgactttcagctggggcacttaacaccttcccccgagcattcaagcaggtaatggaaggccgggatataaagctagtaatcaatcagacagcgcaggactgcttcggatgcctggaatccataagccaaataagaacggcaacccgagataaaaaggacacggtgacccgggagaaacacccaaagaaaccttttcagaagtggatgaaggacagagcaatcaaaaaaggtaattatcttcggttccagcgtttattttatcttgatagagggaaactggctaaaatcattttagatgatattgaatgcttgtcttgtgacataccactcagtgaaatttattcggtttttaaaacaagatgggaaacaactggtagctttaaaagccttggggactttaaaacttacgggaaggctgacaacactgccttcagagaattaattacggctaaagaaattgagaaaaatgtgcaggaaatgagcaaaggctcggctcccggtccagacgggattactcttggggacgtcgtaaagatggatcccgagttttcccggaccatggagattttcaatttatggttaacaactggtaaaatcccggacatggtgagggggtgcagaaccgttttgattccaaaatcatcaaagccggatcgtttgaaagacattaataactggagacctatcacgatcggttccatcttgctgagactgttctccaggattgtaacagctaggctgagcaaagcgtgccccctgaacccaaggcaaagaggctttatcagagcggcgggatgctctgaaaacttaaaactcctgcaaactataatttggtcggccaaaagagaacacagaccactgggtgttgtattcgtggacatcgccaaggcttttgacaccgtaagccaccagcacatcattcatgctttgcagcaaagagaggtggatccccacatcgtcggtctggtgagcaatatgtacgagaacatcagtacgtatatcaccacaaagaggaacacacacacagacaaaatccagatccgggttggagtaaagcagggtgacccgatgtcgccccttttatttaacctggcaatggaccctctattatgcaagctggaagagagtggcaaaggataccaccgaggacagagcagcatcacagcgatggcatttgcagacgatctggttttgctgagcgactcctgggaaaatatgaatacaaatattagcatactggagaccttctgcaatctgaccggtctcaaaacacaggggcaaaagtgccacggcttttacatcaagccgacaaaggactcttacaccatcaatgactgcgctgcctggactatcaacggcacacccctgaacatgatcgaccccggcgaatctgagaaatacctcggcctgcagtttgacccgtggattggaatagcaaggtccggtctctccacaaaactagatttttggcttcagcggatcgatcaagcaccacttaaacctctgcagaaaactgatattctcaaaacatacaccatccctcggctgatctacatagctgaccactcagaagtgaaaactgcactactcgaaacccttgaccagaagatccggacagcggtcaaggaatggcttcacctacctccgtgcacctgcgatgccatcctgtactcgagcacgagagacggcggtttgggcatcaccaaattggcaggactgatccccagcgtgcaggcccgtagactgcatcggatcgcacagtcatctgacgatacgatgaaatgcttcatggaaaaagagaaaatggaacagctgcataagaaattgtggattcaagctggaggggacagagagaacataccctcgatttgggaagcaccaccgtcgagtgaaccaccaaacaacgtgagcacaaattcggaatgggaagcaccgacccagaaagataaatttccaaagccttgcaattggaggaaaaacgaattcaaaaaatggaccaaattggcatcccaaggccgcggaattgtaaattttgaaagagacaaaattagtaaccattggatccaatactacagacgcatacctcacaggaaactcctcactgcactacaactcagggccaacgtttaccccacgagagaatttctagccaggggtagacaagaccaatacatcaaggcgtgtaggcactgcgatgcggacattgaatcctgcgcccacatcatcggcaactgcccagtgacacaggacgcccgaatcaagaggcacaattacatctgcgaactgcttctcgaggaggcgaagaagaaggactgggtagtgttcaaggaaccgcacataagggattccaacaaggaactgtacaaacctgacctgatatttgtgaaggatgcccgtgcacttgtcgtggatgtgacagtacggtatgaagcagccaaatcatcgctggaggaagccgctgcagagaaagtgagaaagtacaaacacctggaaacggaagtaagacatctcacgaatgcaaaggacgttacttttgtgggctttcccctaggagcgcgggggaaatggcaccaagataactttaaacttttgactgagcttggcctctccaaatcgaggcaagtgaaaatggcagagactttttccacagtagcgctcttttcatctgtggacattgtacatatgtttgccagtagggccagaaaatctatggttatgtccggctccgagactcctggaacaagcgagagcgctacacctgagggcagcgctacagtgaagttcaagtacaagggcgaggaaaaagaggtggatatctctaagatcaagaaagtgtggcgggtgggcaagatgatcagcttcacctacgacgagggcggaggaaaaaccggcagaggcgccgtcagcgagaaggacgcccctaaggaactgctgcagatgctggaaaagcagaagaagggcggatctggcaaaagaaccgccgacggcagcgaattcgagcccaagaagaagaggaaagtctaagcggcctactcgacggatcgatccgaacaaacgacccaacacccgtgcgttttattctgtctttttattgccgatcccctcagaagaactcgtcaagaaggcgatagaaggcgatgcgctgcgaatcgggagcggcgataccgtaaagcacgaggaagcggtcagcccattcgccgccaagctcttcagcaatatcacgggtagccaacgctatgtcctgatagcggtcggccgctttacttgtacagctcgtccatgccgagagtgatcccggcggcggtcacgaactccagcaggaccatgtgatcgcgcttctcgttggggtctttgctcagggcggactgggtgctcaggtagtggttgtcgggcagcagcacggggccgtcgccgatgggggtgttctgctggtagtggtcggccagctgcacgctgccgtcctcgatgttgtggcggatcttgaagttcaccttgatgccgttcttctgcttgtcggccatgatatagacgttgtggctgttgtagttgtactccagcttgtgccccaggatgttgccgtcctccttgaagtcgatgcccttcagctcgatgcggttcaccagggtgtcgccctcgaacttcacctcggcgcgggtcttgtagttgccgtcgtccttgaagaagatggtgcgctcctggacgtagccttcgggcatggcggacttgaagaagtcgtgctgcttcatgtggtcggggtagcggctgaagcactgcacgccgtaggtcagggtggtcacgagggtgggccagggcacgggcagcttgccggtggtgcagatgaacttcagggtcagcttgccgtaggtggcatcgccctcgccctcgccggacacgctgaacttgtggccgtttacgtcgccgtccagctcgaccaggatgggcaccaccccggtgaacagctcctcgcccttgctcaccatggtggcgaattcgaagcttgagctcgagatctgagtccggtagcgctagcggatctgacggttcactaaaccagctctgcttatatagacctcccaccgtacacgcctaccgcccatttgcgtcaatggggcggagttgttacgacattttggaaagtcccgttgattttggtgccaaaacaaactcccattgacgtcaatggggtggagacttggaaatccccgtgagtcaaaccgctatccacgcccattgatgtactgccaaaaccgcatcaccatggtaatagcgatgactaatacgtagatgtactgccaagtaggaaagtcccataaggtcatgtactgggcataatgccaggcgggccatttaccgtcattgacgtcaatagggggcgtacttggcatatgatacacttgatgtactgccaagtgggcagtttaccgtaaatactccacccattgacgtcaatggaaagtccctattggcgttactatgggaacatacgtcattattgacgtcaatgggcgggggtcgttgggcggtcagccaggcgggccatttaccgtaagttatgtaacgcggaactccatatatgggctatgaactaatgaccccgtaattgattactattaaattcctgcaggtttgggttcaggttatttagatgcttagtttttgtacctttcttgttttgtttaggattttgatagtgttagtatttttatatttttgtacgattgcataatgttcttttttatacagttctgttttaataaaatagacgatagctagagacgttagggcagccacaagccagttaggtagcggatagtaggtaggaacagacttttactatttcataacgcgtcaattaccacctgatttggaccaattcacgggatttgtccaaggtggacgggccacctttacttaacccggaaaaggaacatatataatttatgtgtgttcgataaatagccaaatgcctcgtcatctaattagtgacgcgcatgaatggatgaacgagattcccactgtccctacctactatccagcgaaaccacagccaagggaagcggccgcggatccgcgatgatgatcagacatgataagatacattgatgagtttggacaaaccacaactagaatgcagtgaaaaaaatgctttatttgtgaaatttgtgatgctattgctttatttgtaaccattataagctgcaataaacaagttaacaacaacaaaaaaaaaaaaaaaaaaaaattt

SEQ ID NO: 10129 - DNA, 7006 bp, synthetic construct
  source 1..7006: mol_type = other DNA
ggttgacgcgatgtgatttctgcccagtgctctgaatgtcaaagtgaagaaattcaatgaagcgcgggtaaacggcgggagtaactatgactctcttaagggtctagttacaactgggcatcgctgcagagatcgcacctcctcgtggtcccgctggtagcccttcgaagggtgactaagtcgatctctgccccaggtacggagccgttgggactcaccagtccaacgtaactcctgcctaaattcggtgaaacaaattcctcggtaaaaagccccatggcttcttgcccgaaacctggccccccggtttcagcaggggcaatgagtttggaaagtggactgaccacccactccgttctcgccatcgaacgtggtcccaattcgttggcaaattccggatcagactttgggggggggggtctggggctaccgttacgcctattgagggtatcggtcggcactcagacctcccgctccgactgggtagacctggtgtcctggagccacccaggacccacgtctaagtcccagcaggttgacctggtgtctttatttcctaaacaccgggttgacctgttatccaaaaacgaccaggtagacctggtggctcaatttttaccatctaaatttccccccaatttggcagaaaatgatttggctttgctggtgaacttagagttctacagatcggatttgcatgtgtatgagtgtgttcattttgctgcacattgggagggattaagtggtttgcctgaggtgtatgaacaacttgcaccacaaccgtgtgtgggagaaactttacattctagcctcccacgagacagtgaactgtttgtgcctgaagaggggagcagcgagaaggagagcgaggacgcgccaaaaacatctcctccgacgcctgggaaacatggtttggaacagactggggaggaaaaagtgatggtgactgttcctgacaaaaatccaccttgtccttgctgtggtacccgggtaaactctgtgttgaatctgattgaacatctgaaagtgtcacacgggaaaaggggggtttgttttcggtgtgcaaaatgtggaaaggaaaatagtaactatcacagtgttgtttgtcattttccaaaatgcaggggtccagagacggagaaagccccagctggggagtggatttgtgaggtatgcaacagagattttacaaccaaaattggcctgggacaacacaagagattggcacacccagcagtgagaaatcaggaaaggatcgttgcttcccaaccgaaagaaacatcaaatagaggtgctcacaaaaggtgctggacaaaggaggaggaagaattactaataagactggaggctcagttcgagggaaacaaaaatattaataagcttattgcagaacacataaccaccaaaacagctaagcagatcagtgacaaaaggcgattgctgtccagaaagccagcagaggagccacgtgaggagcctggaacgtgtcatcacaccaggagagcagctgcgagcctgagaacggagcctgagatgagtcatcacgcccaggcagaggacagagataatggacctgggagacgccctctgccaggcagggcagctgccggagggagaacaatggacgagataagacgccaccctgataagggcaacggacagcagagacccaccaagcaaaaatcagaagaacagctgcaggcttactataaaaagacactagaggaacgactttcagctggggcacttaacaccttcccccgagcattcaagcaggtaatggaaggccgggatataaagctagtaatcaatcagacagcgcaggactgcttcggatgcctggaatccataagccaaataagaacggcaacccgagataaaaaggacacggtgacccgggagaaacacccaaagaaaccttttcagaagtggatgaaggacagagcaatcaaaaaaggtaattatcttcggttccagcgtttattttatcttgatagagggaaactggctaaaatcattttagatgatattgaatgcttgtcttgtgacataccactcagtgaaatttattcggtttttaaaacaagatgggaaacaactggtagctttaaaagccttggggactttaaaacttacgggaaggctgacaacactgccttcagagaattaattacggctaaagaaattgagaaaaatgtgcaggaaatgagcaaaggctcggctcccggtccagacgggattactcttggggacgtcgtaaagatggatcccgagttttcccggaccatggagattttcaatttatggttaacaactggtaaaatcccggacatggtgagggggtgcagaaccgttttgattccaaaatcatcaaagccggatcgtttgaaagacattaataactggagacctatcacgatcggttccatcttgctgagactgttctccaggattgtaacagctaggctgagcaaagcgtgccccctgaacccaaggcaaagaggctttatcagagcggcgggatgctctgaaaacttaaaactcctgcaaactataatttggtcggccaaaagagaacacagaccactgggtgttgtattcgtggacatcgccaaggcttttgacaccgtaagccaccagcacatcattcatgctttgcagcaaagagaggtggatccccacatcgtcggtctggtgagcaatatgtacgagaacatcagtacgtatatcaccacaaagaggaacacacacacagacaaaatccagatccgggttggagtaaagcagggtgacccgatgtcgccccttttatttaacctggcaatggaccctctattatgcaagctggaagagagtggcaaaggataccaccgaggacagagcagcatcacagcgatggcatttgcagacgatctggttttgctgagcgactcctgggaaaatatgaatacaaatattagcatactggagaccttctgcaatctgaccggtctcaaaacacaggggcaaaagtgccacggcttttacatcaagccgacaaaggactcttacaccatcaatgactgcgctgcctggactatcaacggcacacccctgaacatgatcgaccccggcgaatctgagaaatacctcggcctgcagtttgacccgtggattggaatagcaaggtccggtctctccacaaaactagatttttggcttcagcggatcgatcaagcaccacttaaacctctgcagaaaactgatattctcaaaacatacaccatccctcggctgatctacatagctgaccactcagaagtgaaaactgcactactcgaaacccttgaccagaagatccggacagcggtcaaggaatggcttcacctacctccgtgcacctgcgatgccatcctgtactcgagcacgagagacggcggtttgggcatcaccaaattggcaggactgatccccagcgtgcaggcccgtagactgcatcggatcgcacagtcatctgacgatacgatgaaatgcttcatggaaaaagagaaaatggaacagctgcataagaaattgtggattcaagctggaggggacagagagaacataccctcgatttgggaagcaccaccgtcgagtgaaccaccaaacaacgtgagcacaaattcggaatgggaagcaccgacccagaaagataaatttccaaagccttgcaattggaggaaaaacgaattcaaaaaatggaccaaattggcatcccaaggccgcggaattgtaaattttgaaagagacaaaattagtaaccattggatccaatactacagacgcatacctcacaggaaactcctcactgcactacaactcagggccaacgtttaccccacgagagaatttctagccaggggtagacaagaccaatacatcaaggcgtgtaggcactgcgatgcggacattgaatcctgcgcccacatcatcggcaactgcccagtgacacaggacgcccgaatcaagaggcacaattacatctgcgaactgcttctcgaggaggcgaagaagaaggactgggtagtgttcaaggaaccgcacataagggattccaacaaggaactgtacaaacctgacctgatatttgtgaaggatgcccgtgcacttgtcgtggatgtgacagtacggtatgaagcagccaaatcatcgctggaggaagccgctgcagagaaagtgagaaagtacaaacacctggaaacggaagtaagacatctcacgaatgcaaaggacgttacttttgtgggctttcccctaggagcgcgggggaaatggcaccaagataactttaaacttttgactgagcttggcctctccaaatcgaggcaagtgaaaatggcagagactttttccacagtagcgctcttttcatctgtggacattgtacatatgtttgccagtagggccagaaaatctatggttatgtccggctccgagactcctggaacaagcgagagcgctacacctgagggcagcagcgtgtccatggtgcacagcgaaagactgcctctgctgatgaaccggaacggcatcagattccagagcgaggtgatcgaccccaaccctccaaagaaggtgaaatgggtcctgacaggcagcggcggcaacatgttcaccgccaacgtgcggggatctaatgtttctagcctggtgaagcacacctggagcgaggcctttgtgtccctgatcgaagatagaggcggatctggcaaaagaaccgccgacggcagcgaattcgagcccaagaagaagaggaaagtctaagcggcctactcgacggatcgatccgaacaaacgacccaacacccgtgcgttttattctgtctttttattgccgatcccctcagaagaactcgtcaagaaggcgatagaaggcgatgcgctgcgaatcgggagcggcgataccgtaaagcacgaggaagcggtcagcccattcgccgccaagctcttcagcaatatcacgggtagccaacgctatgtcctgatagcggtcggccgctttacttgtacagctcgtccatgccgagagtgatcccggcggcggtcacgaactccagcaggaccatgtgatcgcgcttctcgttggggtctttgctcagggcggactgggtgctcaggtagtggttgtcgggcagcagcacggggccgtcgccgatgggggtgttctgctggtagtggtcggccagctgcacgctgccgtcctcgatgttgtggcggatcttgaagttcaccttgatgccgttcttctgcttgtcggccatgatatagacgttgtggctgttgtagttgtactccagcttgtgccccaggatgttgccgtcctccttgaagtcgatgcccttcagctcgatgcggttcaccagggtgtcgccctcgaacttcacctcggcgcgggtcttgtagttgccgtcgtccttgaagaagatggtgcgctcctggacgtagccttcgggcatggcggacttgaagaagtcgtgctgcttcatgtggtcggggtagcggctgaagcactgcacgccgtaggtcagggtggtcacgagggtgggccagggcacgggcagcttgccggtggtgcagatgaacttcagggtcagcttgccgtaggtggcatcgccctcgccctcgccggacacgctgaacttgtggccgtttacgtcgccgtccagctcgaccaggatgggcaccaccccggtgaacagctcctcgcccttgctcaccatggtggcgaattcgaagcttgagctcgagatctgagtccggtagcgctagcggatctgacggttcactaaaccagctctgcttatatagacctcccaccgtacacgcctaccgcccatttgcgtcaatggggcggagttgttacgacattttggaaagtcccgttgattttggtgccaaaacaaactcccattgacgtcaatggggtggagacttggaaatccccgtgagtcaaaccgctatccacgcccattgatgtactgccaaaaccgcatcaccatggtaatagcgatgactaatacgtagatgtactgccaagtaggaaagtcccataaggtcatgtactgggcataatgccaggcgggccatttaccgtcattgacgtcaatagggggcgtacttggcatatgatacacttgatgtactgccaagtgggcagtttaccgtaaatactccacccattgacgtcaatggaaagtccctattggcgttactatgggaacatacgtcattattgacgtcaatgggcgggggtcgttgggcggtcagccaggcgggccatttaccgtaagttatgtaacgcggaactccatatatgggctatgaactaatgaccccgtaattgattactattaaattcctgcaggtttgggttcaggttatttagatgcttagtttttgtacctttcttgttttgtttaggattttgatagtgttagtatttttatatttttgtacgattgcataatgttcttttttatacagttctgttttaataaaatagacgatagctagagacgttagggcagccacaagccagttaggtagcggatagtaggtaggaacagacttttactatttcataacgcgtcaattaccacctgatttggaccaattcacgggatttgtccaaggtggacgggccacctttacttaacccggaaaaggaacatatataatttatgtgtgttcgataaatagccaaatgcctcgtcatctaattagtgacgcgcatgaatggatgaacgagattcccactgtccctacctactatccagcgaaaccacagccaagggaagcggccgcggatccgcgatgatgatcagacatgataagatacattgatgagtttggacaaaccacaactagaatgcagtgaaaaaaatgctttatttgtgaaatttgtgatgctattgctttatttgtaaccattataagctgcaataaacaagttaacaacaacaaaaaaaaaaaaaaaaaaaaattt

SEQ ID NO: 10130 - DNA, 6712 bp, synthetic construct
  source 1..6712: mol_type = other DNA
ggttgacgcgatgtgatttctgcccagtgctctgaatgtcaaagtgaagaaattcaatgaagcgcgggtaaacggcgggagtaactatgactctcttaaggcgcctcccgggttcaagcgattctcctgcctcagcctcccgagtctagttacaactgggcatcgctgcagagatcgcacctcctcgtggtcccgctggtagcccttcgaagggtgactaagtcgatctctgccccaggtacggagccgttgggactcaccagtccaacgtaactcctgcctaaattcggtgaaacaaattcctcggtaaaaagccccatggcttcttgcccgaaacctggccccccggtttcagcaggggcaatgagtttggaaagtggactgaccacccactccgttctcgccatcgaacgtggtcccaattcgttggcaaattccggatcagactttgggggggggggtctggggctaccgttacgcctattgagggtatcggtcggcactcagacctcccgctccgactgggtagacctggtgtcctggagccacccaggacccacgtctaagtcccagcaggttgacctggtgtctttatttcctaaacaccgggttgacctgttatccaaaaacgaccaggtagacctggtggctcaatttttaccatctaaatttccccccaatttggcagaaaatgatttggctttgctggtgaacttagagttctacagatcggatttgcatgtgtatgagtgtgttcattttgctgcacattgggagggattaagtggtttgcctgaggtgtatgaacaacttgcaccacaaccgtgtgtgggagaaactttacattctagcctcccacgagacagtgaactgtttgtgcctgaagaggggagcagcgagaaggagagcgaggacgcgccaaaaacatctcctccgacgcctgggaaacatggtttggaacagactggggaggaaaaagtgatggtgactgttcctgacaaaaatccaccttgtccttgctgtggtacccgggtaaactctgtgttgaatctgattgaacatctgaaagtgtcacacgggaaaaggggggtttgttttcggtgtgcaaaatgtggaaaggaaaatagtaactatcacagtgttgtttgtcattttccaaaatgcaggggtccagagacggagaaagccccagctggggagtggatttgtgaggtatgcaacagagattttacaaccaaaattggcctgggacaacacaagagattggcacacccagcagtgagaaatcaggaaaggatcgttgcttcccaaccgaaagaaacatcaaatagaggtgctcacaaaaggtgctggacaaaggaggaggaagaattactaataagactggaggctcagttcgagggaaacaaaaatattaataagcttattgcagaacacataaccaccaaaacagctaagcagatcagtgacaaaaggcgattgctgtccagaaagccagcagaggagccacgtgaggagcctggaacgtgtcatcacaccaggagagcagctgcgagcctgagaacggagcctgagatgagtcatcacgcccaggcagaggacagagataatggacctgggagacgccctctgccaggcagggcagctgccggagggagaacaatggacgagataagacgccaccctgataagggcaacggacagcagagacccaccaagcaaaaatcagaagaacagctgcaggcttactataaaaagacactagaggaacgactttcagctggggcacttaacaccttcccccgagcattcaagcaggtaatggaaggccgggatataaagctagtaatcaatcagacagcgcaggactgcttcggatgcctggaatccataagccaaataagaacggcaacccgagataaaaaggacacggtgacccgggagaaacacccaaagaaaccttttcagaagtggatgaaggacagagcaatcaaaaaaggtaattatcttcggttccagcgtttattttatcttgatagagggaaactggctaaaatcattttagatgatattgaatgcttgtcttgtgacataccactcagtgaaatttattcggtttttaaaacaagatgggaaacaactggtagctttaaaagccttggggactttaaaacttacgggaaggctgacaacactgccttcagagaattaattacggctaaagaaattgagaaaaatgtgcaggaaatgagcaaaggctcggctcccggtccagacgggattactcttggggacgtcgtaaagatggatcccgagttttcccggaccatggagattttcaatttatggttaacaactggtaaaatcccggacatggtgagggggtgcagaaccgttttgattccaaaatcatcaaagccggatcgtttgaaagacattaataactggagacctatcacgatcggttccatcttgctgagactgttctccaggattgtaacagctaggctgagcaaagcgtgccccctgaacccaaggcaaagaggctttatcagagcggcgggatgctctgaaaacttaaaactcctgcaaactataatttggtcggccaaaagagaacacagaccactgggtgttgtattcgtggacatcgccaaggcttttgacaccgtaagccaccagcacatcattcatgctttgcagcaaagagaggtggatccccacatcgtcggtctggtgagcaatatgtacgagaacatcagtacgtatatcaccacaaagaggaacacacacacagacaaaatccagatccgggttggagtaaagcagggtgacccgatgtcgccccttttatttaacctggcaatggaccctctattatgcaagctggaagagagtggcaaaggataccaccgaggacagagcagcatcacagcgatggcatttgcagacgatctggttttgctgagcgactcctgggaaaatatgaatacaaatattagcatactggagaccttctgcaatctgaccggtctcaaaacacaggggcaaaagtgccacggcttttacatcaagccgacaaaggactcttacaccatcaatgactgcgctgcctggactatcaacggcacacccctgaacatgatcgaccccggcgaatctgagaaatacctcggcctgcagtttgacccgtggattggaatagcaaggtccggtctctccacaaaactagatttttggcttcagcggatcgatcaagcaccacttaaacctctgcagaaaactgatattctcaaaacatacaccatccctcggctgatctacatagctgaccactcagaagtgaaaactgcactactcgaaacccttgaccagaagatccggacagcggtcaaggaatggcttcacctacctccgtgcacctgcgatgccatcctgtactcgagcacgagagacggcggtttgggcatcaccaaattggcaggactgatccccagcgtgcaggcccgtagactgcatcggatcgcacagtcatctgacgatacgatgaaatgcttcatggaaaaagagaaaatggaacagctgcataagaaattgtggattcaagctggaggggacagagagaacataccctcgatttgggaagcaccaccgtcgagtgaaccaccaaacaacgtgagcacaaattcggaatgggaagcaccgacccagaaagataaatttccaaagccttgcaattggaggaaaaacgaattcaaaaaatggaccaaattggcatcccaaggccgcggaattgtaaattttgaaagagacaaaattagtaaccattggatccaatactacagacgcatacctcacaggaaactcctcactgcactacaactcagggccaacgtttaccccacgagagaatttctagccaggggtagacaagaccaatacatcaaggcgtgtaggcactgcgatgcggacattgaatcctgcgcccacatcatcggcaactgcccagtgacacaggacgcccgaatcaagaggcacaattacatctgcgaactgcttctcgaggaggcgaagaagaaggactgggtagtgttcaaggaaccgcacataagggattccaacaaggaactgtacaaacctgacctgatatttgtgaaggatgcccgtgcacttgtcgtggatgtgacagtacggtatgaagcagccaaatcatcgctggaggaagccgctgcagagaaagtgagaaagtacaaacacctggaaacggaagtaagacatctcacgaatgcaaaggacgttacttttgtgggctttcccctaggagcgcgggggaaatggcaccaagataactttaaacttttgactgagcttggcctctccaaatcgaggcaagtgaaaatggcagagactttttccacagtagcgctcttttcatctgtggacattgtacatatgtttgccagtagggccagaaaatctatggttatgtaagcggcctactcgacggatcgatccgaacaaacgacccaacacccgtgcgttttattctgtctttttattgccgatcccctcagaagaactcgtcaagaaggcgatagaaggcgatgcgctgcgaatcgggagcggcgataccgtaaagcacgaggaagcggtcagcccattcgccgccaagctcttcagcaatatcacgggtagccaacgctatgtcctgatagcggtcggccgctttacttgtacagctcgtccatgccgagagtgatcccggcggcggtcacgaactccagcaggaccatgtgatcgcgcttctcgttggggtctttgctcagggcggactgggtgctcaggtagtggttgtcgggcagcagcacggggccgtcgccgatgggggtgttctgctggtagtggtcggccagctgcacgctgccgtcctcgatgttgtggcggatcttgaagttcaccttgatgccgttcttctgcttgtcggccatgatatagacgttgtggctgttgtagttgtactccagcttgtgccccaggatgttgccgtcctccttgaagtcgatgcccttcagctcgatgcggttcaccagggtgtcgccctcgaacttcacctcggcgcgggtcttgtagttgccgtcgtccttgaagaagatggtgcgctcctggacgtagccttcgggcatggcggacttgaagaagtcgtgctgcttcatgtggtcggggtagcggctgaagcactgcacgccgtaggtcagggtggtcacgagggtgggccagggcacgggcagcttgccggtggtgcagatgaacttcagggtcagcttgccgtaggtggcatcgccctcgccctcgccggacacgctgaacttgtggccgtttacgtcgccgtccagctcgaccaggatgggcaccaccccggtgaacagctcctcgcccttgctcaccatggtggcgaattcgaagcttgagctcgagatctgagtccggtagcgctagcggatctgacggttcactaaaccagctctgcttatatagacctcccaccgtacacgcctaccgcccatttgcgtcaatggggcggagttgttacgacattttggaaagtcccgttgattttggtgccaaaacaaactcccattgacgtcaatggggtggagacttggaaatccccgtgagtcaaaccgctatccacgcccattgatgtactgccaaaaccgcatcaccatggtaatagcgatgactaatacgtagatgtactgccaagtaggaaagtcccataaggtcatgtactgggcataatgccaggcgggccatttaccgtcattgacgtcaatagggggcgtacttggcatatgatacacttgatgtactgccaagtgggcagtttaccgtaaatactccacccattgacgtcaatggaaagtccctattggcgttactatgggaacatacgtcattattgacgtcaatgggcgggggtcgttgggcggtcagccaggcgggccatttaccgtaagttatgtaacgcggaactccatatatgggctatgaactaatgaccccgtaattgattactattaaattcctgcaggtttgggttcaggttatttagatgcttagtttttgtacctttcttgttttgtttaggattttgatagtgttagtatttttatatttttgtacgattgcataatgttcttttttatacagttctgttttaataaaatagacgatagctagagacgttagggcagccacaagccagttaggtagcggatagtaggtaggaacagacttttactatttcataacgcgtcaattaccacctgatttggaccaattcacgggatttgtccaaggtggacgggccacctttacttaacccggaaaaggaacatatataatttatgtgtgttcgataaatagccaaatgcctcgtcatctaattagtgacgcgcatgaatggatgaacgagattcccactgtccctacctactatccagcgaaaccacagccaagggaagcggccgcggatccgcgatgatgatcagacatgataagatacattgatgagtttggacaaaccacaactagaatgcagtgaaaaaaatgctttatttgtgaaatttgtgatgctattgctttatttgtaaccattataagctgcaataaacaagttaacaacaacaaaaaaaaaaaaaaaaaaaaattt

SEQ ID NO: 10131 - DNA, 6670 bp, synthetic construct
  source 1..6670: mol_type = other DNA
ggttgacgcgatgtgatttctgcccagtgctctgaatgtcaaagtgaagaaattcaatgaagcgcgggtaaacggcgggagtaactatgactctcttaagggtctagttacaactgggcatcgctgcagagatcgcacctcctcgtggtcccgctggtagcccttcgaagggtgactaagtcgatctctgccccaggtacggagccgttgggactcaccagtccaacgtaactcctgcctaaattcggtgaaacaaattcctcggtaaaaagccccatggcttcttgcccgaaacctggccccccggtttcagcaggggcaatgagtttggaaagtggactgaccacccactccgttctcgccatcgaacgtggtcccaattcgttggcaaattccggatcagactttgggggggggggtctggggctaccgttacgcctattgagggtatcggtcggcactcagacctcccgctccgactgggtagacctggtgtcctggagccacccaggacccacgtctaagtcccagcaggttgacctggtgtctttatttcctaaacaccgggttgacctgttatccaaaaacgaccaggtagacctggtggctcaatttttaccatctaaatttccccccaatttggcagaaaatgatttggctttgctggtgaacttagagttctacagatcggatttgcatgtgtatgagtgtgttcattttgctgcacattgggagggattaagtggtttgcctgaggtgtatgaacaacttgcaccacaaccgtgtgtgggagaaactttacattctagcctcccacgagacagtgaactgtttgtgcctgaagaggggagcagcgagaaggagagcgaggacgcgccaaaaacatctcctccgacgcctgggaaacatggtttggaacagactggggaggaaaaagtgatggtgactgttcctgacaaaaatccaccttgtccttgctgtggtacccgggtaaactctgtgttgaatctgattgaacatctgaaagtgtcacacgggaaaaggggggtttgttttcggtgtgcaaaatgtggaaaggaaaatagtaactatcacagtgttgtttgtcattttccaaaatgcaggggtccagagacggagaaagccccagctggggagtggatttgtgaggtatgcaacagagattttacaaccaaaattggcctgggacaacacaagagattggcacacccagcagtgagaaatcaggaaaggatcgttgcttcccaaccgaaagaaacatcaaatagaggtgctcacaaaaggtgctggacaaaggaggaggaagaattactaataagactggaggctcagttcgagggaaacaaaaatattaataagcttattgcagaacacataaccaccaaaacagctaagcagatcagtgacaaaaggcgattgctgtccagaaagccagcagaggagccacgtgaggagcctggaacgtgtcatcacaccaggagagcagctgcgagcctgagaacggagcctgagatgagtcatcacgcccaggcagaggacagagataatggacctgggagacgccctctgccaggcagggcagctgccggagggagaacaatggacgagataagacgccaccctgataagggcaacggacagcagagacccaccaagcaaaaatcagaagaacagctgcaggcttactataaaaagacactagaggaacgactttcagctggggcacttaacaccttcccccgagcattcaagcaggtaatggaaggccgggatataaagctagtaatcaatcagacagcgcaggactgcttcggatgcctggaatccataagccaaataagaacggcaacccgagataaaaaggacacggtgacccgggagaaacacccaaagaaaccttttcagaagtggatgaaggacagagcaatcaaacggaaaagacggcagacaagcatgaccgacttctaccactctaagcggagactgatcttcagcaagagaaagcctattgaatgcttgtcttgtgacataccactcagtgaaatttattcggtttttaaaacaagatgggaaacaactggtagctttaaaagccttggggactttaaaacttacgggaaggctgacaacactgccttcagagaattaattacggctaaagaaattgagaaaaatgtgcaggaaatgagcaaaggctcggctcccggtccagacgggattactcttggggacgtcgtaaagatggatcccgagttttcccggaccatggagattttcaatttatggttaacaactggtaaaatcccggacatggtgagggggtgcagaaccgttttgattccaaaatcatcaaagccggatcgtttgaaagacattaataactggagacctatcacgatcggttccatcttgctgagactgttctccaggattgtaacagctaggctgagcaaagcgtgccccctgaacccaaggcaaagaggctttatcagagcggcgggatgctctgaaaacttaaaactcctgcaaactataatttggtcggccaaaagagaacacagaccactgggtgttgtattcgtggacatcgccaaggcttttgacaccgtaagccaccagcacatcattcatgctttgcagcaaagagaggtggatccccacatcgtcggtctggtgagcaatatgtacgagaacatcagtacgtatatcaccacaaagaggaacacacacacagacaaaatccagatccgggttggagtaaagcagggtgacccgatgtcgccccttttatttaacctggcaatggaccctctattatgcaagctggaagagagtggcaaaggataccaccgaggacagagcagcatcacagcgatggcatttgcagacgatctggttttgctgagcgactcctgggaaaatatgaatacaaatattagcatactggagaccttctgcaatctgaccggtctcaaaacacaggggcaaaagtgccacggcttttacatcaagccgacaaaggactcttacaccatcaatgactgcgctgcctggactatcaacggcacacccctgaacatgatcgaccccggcgaatctgagaaatacctcggcctgcagtttgacccgtggattggaatagcaaggtccggtctctccacaaaactagatttttggcttcagcggatcgatcaagcaccacttaaacctctgcagaaaactgatattctcaaaacatacaccatccctcggctgatctacatagctgaccactcagaagtgaaaactgcactactcgaaacccttgaccagaagatccggacagcggtcaaggaatggcttcacctacctccgtgcacctgcgatgccatcctgtactcgagcacgagagacggcggtttgggcatcaccaaattggcaggactgatccccagcgtgcaggcccgtagactgcatcggatcgcacagtcatctgacgatacgatgaaatgcttcatggaaaaagagaaaatggaacagctgcataagaaattgtggattcaagctggaggggacagagagaacataccctcgatttgggaagcaccaccgtcgagtgaaccaccaaacaacgtgagcacaaattcggaatgggaagcaccgacccagaaagataaatttccaaagccttgcaattggaggaaaaacgaattcaaaaaatggaccaaattggcatcccaaggccgcggaattgtaaattttgaaagagacaaaattagtaaccattggatccaatactacagacgcatacctcacaggaaactcctcactgcactacaactcagggccaacgtttaccccacgagagaatttctagccaggggtagacaagaccaatacatcaaggcgtgtaggcactgcgatgcggacattgaatcctgcgcccacatcatcggcaactgcccagtgacacaggacgcccgaatcaagaggcacaattacatctgcgaactgcttctcgaggaggcgaagaagaaggactgggtagtgttcaaggaaccgcacataagggattccaacaaggaactgtacaaacctgacctgatatttgtgaaggatgcccgtgcacttgtcgtggatgtgacagtacggtatgaagcagccaaatcatcgctggaggaagccgctgcagagaaagtgagaaagtacaaacacctggaaacggaagtaagacatctcacgaatgcaaaggacgttacttttgtgggctttcccctaggagcgcgggggaaatggcaccaagataactttaaacttttgactgagcttggcctctccaaatcgaggcaagtgaaaatggcagagactttttccacagtagcgctcttttcatctgtggacattgtacatatgtttgccagtagggccagaaaatctatggttatgtaagcggcctactcgacggatcgatccgaacaaacgacccaacacccgtgcgttttattctgtctttttattgccgatcccctcagaagaactcgtcaagaaggcgatagaaggcgatgcgctgcgaatcgggagcggcgataccgtaaagcacgaggaagcggtcagcccattcgccgccaagctcttcagcaatatcacgggtagccaacgctatgtcctgatagcggtcggccgctttacttgtacagctcgtccatgccgagagtgatcccggcggcggtcacgaactccagcaggaccatgtgatcgcgcttctcgttggggtctttgctcagggcggactgggtgctcaggtagtggttgtcgggcagcagcacggggccgtcgccgatgggggtgttctgctggtagtggtcggccagctgcacgctgccgtcctcgatgttgtggcggatcttgaagttcaccttgatgccgttcttctgcttgtcggccatgatatagacgttgtggctgttgtagttgtactccagcttgtgccccaggatgttgccgtcctccttgaagtcgatgcccttcagctcgatgcggttcaccagggtgtcgccctcgaacttcacctcggcgcgggtcttgtagttgccgtcgtccttgaagaagatggtgcgctcctggacgtagccttcgggcatggcggacttgaagaagtcgtgctgcttcatgtggtcggggtagcggctgaagcactgcacgccgtaggtcagggtggtcacgagggtgggccagggcacgggcagcttgccggtggtgcagatgaacttcagggtcagcttgccgtaggtggcatcgccctcgccctcgccggacacgctgaacttgtggccgtttacgtcgccgtccagctcgaccaggatgggcaccaccccggtgaacagctcctcgcccttgctcaccatggtggcgaattcgaagcttgagctcgagatctgagtccggtagcgctagcggatctgacggttcactaaaccagctctgcttatatagacctcccaccgtacacgcctaccgcccatttgcgtcaatggggcggagttgttacgacattttggaaagtcccgttgattttggtgccaaaacaaactcccattgacgtcaatggggtggagacttggaaatccccgtgagtcaaaccgctatccacgcccattgatgtactgccaaaaccgcatcaccatggtaatagcgatgactaatacgtagatgtactgccaagtaggaaagtcccataaggtcatgtactgggcataatgccaggcgggccatttaccgtcattgacgtcaatagggggcgtacttggcatatgatacacttgatgtactgccaagtgggcagtttaccgtaaatactccacccattgacgtcaatggaaagtccctattggcgttactatgggaacatacgtcattattgacgtcaatgggcgggggtcgttgggcggtcagccaggcgggccatttaccgtaagttatgtaacgcggaactccatatatgggctatgaactaatgaccccgtaattgattactattaaattcctgcaggtttgggttcaggttatttagatgcttagtttttgtacctttcttgttttgtttaggattttgatagtgttagtatttttatatttttgtacgattgcataatgttcttttttatacagttctgttttaataaaatagacgatagctagagacgttagggcagccacaagccagttaggtagcggatagtaggtaggaacagacttttactatttcataacgcgtcaattaccacctgatttggaccaattcacgggatttgtccaaggtggacgggccacctttacttaacccggaaaaggaacatatataatttatgtgtgttcgataaatagccaaatgcctcgtcatctaattagtgacgcgcatgaatggatgaacgagattcccactgtccctacctactatccagcgaaaccacagccaagggaagcggccgcggatccgcgatgatgatcagacatgataagatacattgatgagtttggacaaaccacaactagaatgcagtgaaaaaaatgctttatttgtgaaatttgtgatgctattgctttatttgtaaccattataagctgcaataaacaagttaacaacaacaaaaaaaaaaaaaaaaaaaaattt

SEQ ID NO: 10132 - DNA, 5986 bp, synthetic construct
  source 1..5986: mol_type = other DNA
gtaataataataataataataataataataataataataatcccccccgcaggtgccaccttgacgtggtgggggcttagctgctccaatgatgactgagggctgtgctggcggtagtgtaactaccggcaggtccaaccaagccagagaggcctcagctgaggagcacaaccaagagcacctaacccattagcattatggagaatcaaacccaaacgaagtctatactggctcggtcgtcgcccaggataaaaaggaccgcggtggatgctgctgattctggacatccatcgacaagtgggctacggaatcatcaaaacccaaatgaacagtcacagaagcggcaaaaatatacaatgccagaaaaccgcacaattatgaaatgctactacaaatctgaacctcaaaggcgtggctaccaaaaaaggatgcatcagctatggaaacaagagtaccctgactcacagataacagaaccccgactggctgaccaacgaagattcataatcagaaacaaagtgttcagtgaagttgaactcgaagaaatccagaaaatttgcaaagtagattaccatcagaccacagcacagacagcagcagagactccagcaacacttggaatggtggaacagattgaaccagaagaaagtgtggcgcttttgcaagaatttgaggaaccagcacttgaaacatctgttgaaccaccaggaaccttgacagcaagacaacaagagctcaaggataagatcatggctcatgctgcagcaaatgcaataagacagcggctcccaactctaaaaacagtgcccaagagacacctggcgcctctcatgaaagatgtgaatgcagcactctccactgtccaaataacatcaattgaacaaacaaaccagtttgcctacagtgcagcagtgatagtaacagaagaacttgggctcctacaaccaaggcagccccaaagaaaatcgactggaaaaccaaagtggaaggtcaggctagagttgaaaatcaagaaacttagatcagatgcaagtaacctgaaaaatatgaaagagaggaaactgaagaatgacaaaatcaagcaatacctgatccgaaagtactggctgaacaccagaaaaattgaagaagctttggaaatcgtgaaagaacaaattacagcaacagccagaaaaattgaaaggtatgaagccagaatcatccagtacagacaaaatcaactgtttcaatcagaccaaagacggttctaccagagtctgaaccaaacaacagacacagtaaccataaagccagagaaaactgcaacaacaaagttctggaaagaactttgggaaaataataaaaactacaacaaaaacgctgggtggataaaggagtttgaaggaaaattctcacagaacaaaatggaactgatggaaataacaactgaaatgatcagcaaacgagtgcaaaaagtcaagaactggacatcgcctggtagtgatcaacttcatggattttggctcaaacatctgattagtttacatggaaaaatggcccaacaattcaatgagatgctgcagaaaggaagtatcagtgaatggctaacaactggaagaacatacctgatacaaaaggatccagcaaaaggagcagcaccaggaaactacaggccaataacgtgtctgcccactatgtttaaactactgactggcatcatagctgacagaattcaagactatcttgaagaaaaaaacatcttgccagatgaacagaaaggcaacaaacggaaaagcaggggcacaaaagaccagttattgattgacaaaatgattctggagaactgtaagagccgaaaagctaatcttcacatgacgtggattgactacaaaaaggcctttgactcactcccacacagctggatcatcaagtgcctggacgccatcgggatttgtaaaacagttggcaccttcattgaaaacatgatggagcactggaaaactgaactgtttgttggaaatgaaagctatggacttgtcaacatcaggagaggaattttccagggagattcattgtcccctctgcttttcattattgccatgatccctctgtcaacaatcttacaaaaaacaaatctcggctatcaaatatctaagaattctcacaaaatttcacatttgatgtacatggatgacctgaagctatatgggaaaacggaaactgaaatccagtctctgaccaacactgtccgaatttttagcactgatatcaacatggagtttggtttggacaaatgttcgacagtggcattgaagaagggaaaaatcattgaaagtgagggcataaatatgcccaatggccaaacaataaagtgtcaccagccagaggcctataaatatctgggcatactacagctggacaacatcaagcatgaacatgtgaaaactgtggtcagcaaagaatacacacaaagggtcagaaaaattctcaaaagcaagctcaatggaggcaacaccatcaaggccataaacacctgggccatacctgtcataagatatactgctggcattataaattggacacaggtggaactggacaatttggacagaaaaacaagaaaactcatgaccattcatcattcactgcaccctcgcagtgatgttgaccggctatatctgcctagaagatcagggggcagaggactcttacaagtaaagcaagcagtcaaagaagaagaacatgccctggcagaatatgtcaagcaaagtgaagaacctgctttgattgaagtcaaaaatcagaaactcctcaaaacacagcagacaaaaaaccagtacaagaaaaccgcactacaaactagagctgacagctggcacaacaaaacactgcatggaaagttccttgacaaaattgaaggaaaagctgataaggagaagacctggctctggctcacgaatgggaccctgaagaaggagacagaaggcctgatccttgcagcccaggagcaagccatcagaacaaatgcaattaaggccaagattgaaaaatcagctgatgacccaaaatgcagactgtgcaaggaaaccgacgaaaccattgatcatatcctcagctgctgtaagaaaatcgcacagacagactacaaacagaggcacaactatgtggcccaaatgattcattggaacttatgcctcaagtaccacctcccagcagcaaagaactggtgggatcacaaacctgcaaaagtattggaaaatgaacatgcaaagatactgtgggacttccgaatccagactgacaaagttctggaacacaacacaccagacatcacagttgtggaaaagaacaaggtttggatcattgatgttgccatcccaggtgacagtcgcatagatgaaaaacaacaggaaaaactcagccgctatcaggacctcaagattgaacttcaaagactctggcagaaaccagtacaggtggtcccggtggtgatgggcacactgggtgctgtgccaaaagatctcagccggcatttggaaacaatagacattgacaaaatcaccatctgccaactgcaaaaggccaccctactgggatctgcacacatcatcagaaaatacatcacacagtcctccggctccgagactcctggaacaagcgagagcgctacacctgagggcagcgtggacatgatggacctgcctagatctagaatcaacgccggcatgctggcccagtttatcgacaagcctgtgtgcttcgtgggacggctggaaaagatccaccctaccggcaaaatgttcatcctgagcgacggcgagggcaagaatggcacaatcgagctgatggaacctctggacgaggagatctccggcatcgtcgaggtggtgggcagagtgaccgccaaggctacaatcctctgtaccagctacgtgcagtttaaggaagatagccaccccttcgacctgggactgtacaacgaggccgtgaaaattatccatgatttcccacagttctaccccctgggcatcgtgcaacacgatggcggatctggcaaaagaaccgctgatggcagcgagttcgagagccccaagaaaaagagaaaggtgtaggcggcctactcgacggatcgatccgaacaaacgacccaacacccgtgcgttttattctgtctttttattgccgatcccctcagaagaactcgtcaagaaggcgatagaaggcgatgcgctgcgaatcgggagcggcgataccgtaaagcacgaggaagcggtcagcccattcgccgccaagctcttcagcaatatcacgggtagccaacgctatgtcctgatagcggtcggccgctttacttgtacagctcgtccatgccgagagtgatcccggcggcggtcacgaactccagcaggaccatgtgatcgcgcttctcgttggggtctttgctcagggcggactgggtgctcaggtagtggttgtcgggcagcagcacggggccgtcgccgatgggggtgttctgctggtagtggtcggccagctgcacgctgccgtcctcgatgttgtggcggatcttgaagttcaccttgatgccgttcttctgcttgtcggccatgatatagacgttgtggctgttgtagttgtactccagcttgtgccccaggatgttgccgtcctccttgaagtcgatgcccttcagctcgatgcggttcaccagggtgtcgccctcgaacttcacctcggcgcgggtcttgtagttgccgtcgtccttgaagaagatggtgcgctcctggacgtagccttcgggcatggcggacttgaagaagtcgtgctgcttcatgtggtcggggtagcggctgaagcactgcacgccgtaggtcagggtggtcacgagggtgggccagggcacgggcagcttgccggtggtgcagatgaacttcagggtcagcttgccgtaggtggcatcgccctcgccctcgccggacacgctgaacttgtggccgtttacgtcgccgtccagctcgaccaggatgggcaccaccccggtgaacagctcctcgcccttgctcaccatggtggcgaattcgaagcttgagctcgagatctgagtccggtagcgctagcggatctgacggttcactaaaccagctctgcttatatagacctcccaccgtacacgcctaccgcccatttgcgtcaatggggcggagttgttacgacattttggaaagtcccgttgattttggtgccaaaacaaactcccattgacgtcaatggggtggagacttggaaatccccgtgagtcaaaccgctatccacgcccattgatgtactgccaaaaccgcatcaccatggtaatagcgatgactaatacgtagatgtactgccaagtaggaaagtcccataaggtcatgtactgggcataatgccaggcgggccatttaccgtcattgacgtcaatagggggcgtacttggcatatgatacacttgatgtactgccaagtgggcagtttaccgtaaatactccacccattgacgtcaatggaaagtccctattggcgttactatgggaacatacgtcattattgacgtcaatgggcgggggtcgttgggcggtcagccaggcgggccatttaccgtaagttatgtaacgcggaactccatatatgggctatgaactaatgaccccgtaattgattactattaaattcctgcaggtttgggacacttgggaagtgttcgacttgtggttttgcgaaacgaaatccagcatatctatcttgtttgctgtgccatacaacgtcgttgtgttgataataataataagcggccgcggatccgcgatgatgatcagacatgataagatacattgatgagtttggacaaaccacaactagaatgcagtgaaaaaaatgctttatttgtgaaatttgtgatgctattgctttatttgtaaccattataagctgcaataaacaagttaacaacaacaaaaaaaaaaaaaaaaaaaaattt

SEQ ID NO: 10133 - DNA, 4600 bp, synthetic construct
  source 1..4600: mol_type = other DNA
ggtctagttacaactgggcatcgctgcagagatcgcacctcctcgtggtcccgctggtagcccttcgaagggtgactaagtcgatctctgccccaggtacggagccgttgggactcaccagtccaacgtaactcctgcctaaattcggtgaaacaaattcctcggtaaaaagccccatggcttcttgcccgaaacctggccccccggtttcagcaggggcaatgagtttggaaagtggactgaccacccactccgttctcgccatcgaacgtggtcccaattcgttggcaaattccggatcagactttgggggggggggtctggggctaccgttacgcctattgagggtatcggtcggcactcagacctcccgctccgactgggtagacctggtgtcctggagccacccaggacccacgtctaagtcccagcaggttgacctggtgtctttatttcctaaacaccgggttgacctgttatccaaaaacgaccaggtagacctggtggctcaatttttaccatctaaatttccccccaatttggcagaaaatgatttggctttgctggtgaacttagagttctacagatcggatttgcatgtgtatgagtgtgttcattttgctgcacattgggagggattaagtggtttgcctgaggtgtatgaacaacttgcaccacaaccgtgtgtgggagaaactttacattctagcctcccacgagacagtgaactgtttgtgcctgaagaggggagcagcgagaaggagagcgaggacgcgccaaaaacatctcctccgacgcctgggaaacatggtttggaacagactggggaggaaaaagtgatggtgactgttcctgacaaaaatccaccttgtccttgctgtggtacccgggtaaactctgtgttgaatctgattgaacatctgaaagtgtcacacgggaaaaggggggtttgttttcggtgtgcaaaatgtggaaaggaaaatagtaactatcacagtgttgtttgtcattttccaaaatgcaggggtccagagacggagaaagccccagctggggagtggatttgtgaggtatgcaacagagattttacaaccaaaattggcctgggacaacacaagagattggcacacccagcagtgagaaatcaggaaaggatcgttgcttcccaaccgaaagaaacatcaaatagaggtgctcacaaaaggtgctggacaaaggaggaggaagaattactaataagactggaggctcagttcgagggaaacaaaaatattaataagcttattgcagaacacataaccaccaaaacagctaagcagatcagtgacaaaaggcgattgctgtccagaaagccagcagaggagccacgtgaggagcctggaacgtgtcatcacaccaggagagcagctgcgagcctgagaacggagcctgagatgagtcatcacgcccaggcagaggacagagataatggacctgggagacgccctctgccaggcagggcagctgccggagggagaacaatggacgagataagacgccaccctgataagggcaacggacagcagagacccaccaagcaaaaatcagaagaacagctgcaggcttactataaaaagacactagaggaacgactttcagctggggcacttaacaccttcccccgagcattcaagcaggtaatggaaggccgggatataaagctagtaatcaatcagacagcgcaggactgcttcggatgcctggaatccataagccaaataagaacggcaacccgagataaaaaggacacggtgacccgggagaaacacccaaagaaaccttttcagaagtggatgaaggacagagcaatcaaaaaaggtaattatcttcggttccagcgtttattttatcttgatagagggaaactggctaaaatcattttagatgatattgaatgcttgtcttgtgacataccactcagtgaaatttattcggtttttaaaacaagatgggaaacaactggtagctttaaaagccttggggactttaaaacttacgggaaggctgacaacactgccttcagagaattaattacggctaaagaaattgagaaaaatgtgcaggaaatgagcaaaggctcggctcccggtccagacgggattactcttggggacgtcgtaaagatggatcccgagttttcccggaccatggagattttcaatttatggttaacaactggtaaaatcccggacatggtgagggggtgcagaaccgttttgattccaaaatcatcaaagccggatcgtttgaaagacattaataactggagacctatcacgatcggttccatcttgctgagactgttctccaggattgtaacagctaggctgagcaaagcgtgccccctgaacccaaggcaaagaggctttatcagagcggcgggatgctctgaaaacttaaaactcctgcaaactataatttggtcggccaaaagagaacacagaccactgggtgttgtattcgtggacatcgccaaggcttttgacaccgtaagccaccagcacatcattcatgctttgcagcaaagagaggtggatccccacatcgtcggtctggtgagcaatatgtacgagaacatcagtacgtatatcaccacaaagaggaacacacacacagacaaaatccagatccgggttggagtaaagcagggtgacccgatgtcgccccttttatttaacctggcaatggaccctctattatgcaagctggaagagagtggcaaaggataccaccgaggacagagcagcatcacagcgatggcatttgcagacgatctggttttgctgagcgactcctgggaaaatatgaatacaaatattagcatactggagaccttctgcaatctgaccggactcaaaacacaggggcaaaagtgccacggcttttacatcaagccgacaaaggactcttacaccatcaatgactgcgctgcctggactatcaacggcacacccctgaacatgatcgaccccggcgaatctgagaaatacctcggcctgcagtttgacccgtggattggaatagcaaggtccggtctctccacaaaactagatttttggcttcagcggatcgatcaagcaccacttaaacctctgcagaaaactgatattctcaaaacatacaccatccctcggctgatctacatagctgaccactcagaagtgaaaactgcactactcgaaacccttgaccagaagatccggacagcggtcaaggaatggcttcacctacctccgtgcacctgcgatgccatcctgtactcgagcacgagagacggcggtttgggcatcaccaaattggcaggactgatccccagcgtgcaggcccgtagactgcatcggatcgcacagtcatctgacgatacgatgaaatgcttcatggaaaaagagaaaatggaacagctgcataagaaattgtggattcaagctggaggggacagagagaacataccctcgatttgggaagcaccaccgtcgagtgaaccaccaaacaacgtgagcacaaattcggaatgggaagcaccgacccagaaagataaatttccaaagccttgcaattggaggaaaaacgaattcaaaaaatggaccaaattggcatcccaaggccgcggaattgtaaattttgaaagagacaaaattagtaaccattggatccaatactacagacgcatacctcacaggaaactcctcactgcactacaactcagggccaacgtttaccccacgagagaatttctagccaggggtagacaagaccaatacatcaaggcgtgtaggcactgcgatgcggacattgaatcctgcgcccacatcatcggcttttgcccagtaacgaaggacgcccgaatcaagaggcacaatcgcatatgcgacaggctttgcgaggaggcagctaagagggaatgggtggtgttcaaggagccgcacttgagggatgccaccacggaactgtttaaaccggatgtgatattcgtgaaagaggaccgtgcactggttgtggatgtgacagtacgatatgaatcagccaagacaacgctggaggcagctgctatggagaaagtggacaagtacaaacatctggaggcagaagtgaaggaactcaccaacgcaaaggacgttgtttttatggggttcccccttggagcgcgagggaaattctacaaagggaactttaacttgctagagactcttggcctcccaaaaacgaggcaattgagtgtggcaaagactctatccacgtacgcgctcatgtcatctgtggacattgtgcatatgtttgccagtagatctaggaaaccaaatgtctagaccggtagacatgataagatacattgatgagtttggacaaaccacaactagaatgcagtgaaaaaaatgctttatttgtgaaatttgtgatgctattgctttatttgtaaccattataagctgcaataaacaagttaacaacaacaaaaaaaaaaaaaaaaaaaaaaaaaaaaaaacgttgactaaaaaaaaaaaaaaaaaaaaaaaaaaaaaaaaaaaaaaaaaaaaaaaaaaaaaaaaaaaaaaaaaaaaaa

SEQ ID NO: 10134 - DNA, 4603 bp, synthetic construct
  source 1..4603: mol_type = other DNA
ggtctagttacaactgggcatcgctgcagagatcgcacctcctcgtggtcccgctggtagcccttcgaagggtgactaagtcgatctctgccccaggtacggagccgttgggactcaccagtccaacgtaactcctgcctaaattcggtgaaacaaattcctcggtaaaaagccccatggcttcttgcccgaaacctggccccccggtttcagcaggggcaatgagtttggaaagtggactgaccacccactccgttctcgccatcgaacgtggtcccaattcgttggcaaattccggatcagactttgggggggggggtctggggctaccgttacgcctattgagggtatcggtcggcactcagacctcccgctccgactgggtagacctggtgtcctggagccacccaggacccacgtctaagtcccagcaggttgacctggtgtctttatttcctaaacaccgggttgacctgttatccaaaaacgaccaggtagacctggtggctcaatttttaccatctaaatttccccccaatttggcagaaaatgatttggctttgctggtgaacttagagttctacagatcggatttgcatgtgtatgagtgtgttcattttgctgcacattgggagggattaagtggtttgcctgaggtgtatgaacaacttgcaccacaaccgtgtgtgggagaaactttacattctagcctcccacgagacagtgaactgtttgtgcctgaagaggggagcagcgagaaggagagcgaggacgcgccaaaaacatctcctccgacgcctgggaaacatggtttggaacagactggggaggaaaaagtgatggtgactgttcctgacaaaaatccaccttgtccttgctgtggtacccgggtaaactctgtgttgaatctgattgaacatctgaaagtgtcacacgggaaaaggggggtttgttttcggtgtgcaaaatgtggaaaggaaaatagtaactatcacagtgttgtttgtcattttccaaaatgcaggggtccagagacggagaaagccccagctggggagtggatttgtgaggtatgcaacagagattttacaaccaaaattggcctgggacaacacaagagattggcacacccagcagtgagaaatcaggaaaggatcgttgcttcccaaccgaaagaaacatcaaatagaggtgctcacaaaaggtgctggacaaaggaggaggaagaattactaataagactggaggctcagttcgagggaaacaaaaatattaataagcttattgcagaacacataaccaccaaaacagctaagcagatcagtgacaaaaggcgattgctgtccagaaagccagcagaggagccacgtgaggagcctggaacgtgtcatcacaccaggagagcagctgcgagcctgagaacggagcctgagatgagtcatcacgcccaggcagaggacagagataatggacctgggagacgccctctgccaggcagggcagctgccggagggagaacaatggacgagataagacgccaccctgataagggcaacggacagcagagacccaccaagcaaaaatcagaagaacagctgcaggcttactataaaaagacactagaggaacgactttcagctggggcacttaacaccttcccccgagcattcaagcaggtaatggaaggccgggatataaagctagtaatcaatcagacagcgcaggactgcttcggatgcctggaatccataagccaaataagaacggcaacccgagataaaaaggacacggtgacccgggagaaacacccaaagaaaccttttcagaagtggatgaaggacagagcaatcaaaaaaggtaattatcttcggttccagcgtttattttatcttgatagagggaaactggctaaaatcattttagatgatattgaatgcttgtcttgtgatatatcacccagtgaaatttattcggtattcaaggccagatgggaaacacctggacacttcaacggccttggggactttgaaattaaagggaaggccaacaacaaagccttcagggacttcatcacggctaaagaaattgaaaagaacgtgcgggaaatgagtaagggttcggcgccaggtccagatgggatcgcccttggggacatcaagaagatggatcccgggtattcccggaccgccgagctattcaacttgtggctgacagctggtgacatcccggacatggtgagggggtgcaggactgttttgatcccgaaatcgacgacaccggagcgcctaaaggacatcaacaactggagacccatcacgattggttccatcttgctaaggctgttctccaggatcataacggcgaggatgactaaggcgtgccccctcaacccgagacagagaggcttcatcagtgcgccgggatgctctgagaacctgaaactcctgcaatctataattcggactgccaaaaatgagcacaagccgctgggtgttattttcgtggacattgctaaggcttttgacaccgtgagccaccaacacatcatacacgttttacagcaacggagggttgacccccacattgttggactggtgaacaatatgtacaaggacatcagtacgtatgtcaccacaaagaagaacacacacacggacaaaatccagatccgggttggagtgaagcagggtgacccactatcaccccttctattcaacttggcaatggaccccctgttgtgtaagctggaagaaagtggcaaaggattccatcgaggacagagctcaataaccgcgatggcgttcgccgacgatctggtcttgttaagcgactcctgggagaacatgaaagagaacatcaaaatactggagaccttttgcaatctcaccggactcaaaacacagggtcagaagtgccacggcttttacatcaagcctacaaaggactcttacaccatcaacaactgccctgcatggaccatcaacggcacacccctgaacatgatcaaccccggggagtcagagaaatacctcggcctgcagatcgacccatggactggagtagcaaaatacgatctctccacaaaattgaaaatatggctcgaaagcattgaccgagctccacttaaacctctgcaaaaattagacatcctcaaaacatacaccattcctcgactgacctacctggctgaccattcagagatgaaagcaggggctctggaagcactcgaccagcagattcgaacagcggtcaaagactggctgcacctacctccgtgcacctgcgatgccatcctgtactcgagcacgagagacggcggtttgggcatcaccaaattggcaggactgatccccagcgtgcaggcccgtagactgcatcggatcgcacagtcatctgacgatacgatgaaatgcttcatggaaaaagagaaaatggaacagctgcataagaaattgtggattcaagctggaggggacagagagaacataccctcgatttgggaagcaccaccgtcgagtgaaccaccaaacaacgtgagcacaaattcggaatgggaagcaccgacccagaaagataaatttccaaagccttgcaattggaggaaaaacgaattcaaaaaatggaccaaattggcatcccaaggccgcggaattgtaaattttgaaagagacaaaattagtaaccattggatccaatactacagacgcatacctcacaggaaactcctcactgcactacaactcagggccaacgtttaccccacgagagaatttctagccaggggtagacaagaccaatacatcaaggcgtgtaggcactgcgatgcggacattgaatcctgcgcccacatcatcggcaactgcccagtgacacaggacgcccgaatcaagaggcacaattacatctgcgaactgcttctcgaggaggcgaagaagaaggactgggtagtgttcaaggaaccgcacataagggattccaacaaggaactgtacaaacctgacctgatatttgtgaaggatgcccgtgcacttgtcgtggatgtgacagtacggtatgaagcagccaaatcatcgctggaggaagccgctgcagagaaagtgagaaagtacaaacacctggaaacggaagtaagacatctcacgaatgcaaaggacgttacttttgtgggctttcccctaggagcgcgggggaaatggcaccaagataactttaaacttttgactgagcttggcctctccaaatcgaggcaagtgaaaatggcagagactttttccacagtagcgctcttttcatctgtggacattgtacatatgtttgccagtagggccagaaaatctatggttatgtaaaccggtagacatgataagatacattgatgagtttggacaaaccacaactagaatgcagtgaaaaaaatgctttatttgtgaaatttgtgatgctattgctttatttgtaaccattataagctgcaataaacaagttaacaacaacaaaaaaaaaaaaaaaaaaaaaaaaaaaaaaacgttgactaaaaaaaaaaaaaaaaaaaaaaaaaaaaaaaaaaaaaaaaaaaaaaaaaaaaaaaaaaaaaaaaaaaaaa

SEQ ID NO: 10135 - DNA, 4657 bp, synthetic construct
  source 1..4657: mol_type = other DNA
ggtctagttacaactgggcatcgctgcagagatcgcacctcctcgtggtcccgctggtagcccttcgaagggtgactaagtcgatctctgccccaggtacggagccgttgggactcaccagtccaacgtaactcctgcctaaattcggtgaaacaaattcctcggtaaaaagccccatggctaaacggacagccgacggaagcgagttcgagtcaccaaagaagaagcggaaagtctcttgcccgaaacctggccccccggtttcagcaggggcaatgagtttggaaagtggactgaccacccactccgttctcgccatcgaacgtggtcccaattcgttggcaaattccggatcagactttgggggggggggtctggggctaccgttacgcctattgagggtatcggtcggcactcagacctcccgctccgactgggtagacctggtgtcctggagccacccaggacccacgtctaagtcccagcaggttgacctggtgtctttatttcctaaacaccgggttgacctgttatccaaaaacgaccaggtagacctggtggctcaatttttaccatctaaatttccccccaatttggcagaaaatgatttggctttgctggtgaacttagagttctacagatcggatttgcatgtgtatgagtgtgttcattttgctgcacattgggagggattaagtggtttgcctgaggtgtatgaacaacttgcaccacaaccgtgtgtgggagaaactttacattctagcctcccacgagacagtgaactgtttgtgcctgaagaggggagcagcgagaaggagagcgaggacgcgccaaaaacatctcctccgacgcctgggaaacatggtttggaacagactggggaggaaaaagtgatggtgactgttcctgacaaaaatccaccttgtccttgctgtggtacccgggtaaactctgtgttgaatctgattgaacatctgaaagtgtcacacgggaaaaggggggtttgttttcggtgtgcaaaatgtggaaaggaaaatagtaactatcacagtgttgtttgtcattttccaaaatgcaggggtccagagacggagaaagccccagctggggagtggatttgtgaggtatgcaacagagattttacaaccaaaattggcctgggacaacacaagagattggcacacccagcagtgagaaatcaggaaaggatcgttgcttcccaaccgaaagaaacatcaaatagaggtgctcacaaaaggtgctggacaaaggaggaggaagaattactaataagactggaggctcagttcgagggaaacaaaaatattaataagcttattgcagaacacataaccaccaaaacagctaagcagatcagtgacaaaaggcgattgctgtccagaaagccagcagaggagccacgtgaggagcctggaacgtgtcatcacaccaggagagcagctgcgagcctgagaacggagcctgagatgagtcatcacgcccaggcagaggacagagataatggacctgggagacgccctctgccaggcagggcagctgccggagggagaacaatggacgagataagacgccaccctgataagggcaacggacagcagagacccaccaagcaaaaatcagaagaacagctgcaggcttactataaaaagacactagaggaacgactttcagctggggcacttaacaccttcccccgagcattcaagcaggtaatggaaggccgggatataaagctagtaatcaatcagacagcgcaggactgcttcggatgcctggaatccataagccaaataagaacggcaacccgagataaaaaggacacggtgacccgggagaaacacccaaagaaaccttttcagaagtggatgaaggacagagcaatcaaaaaaggtaattatcttcggttccagcgtttattttatcttgatagagggaaactggctaaaatcattttagatgatattgaatgcttgtcttgtgacataccactcagtgaaatttattcggtttttaaaacaagatgggaaacaactggtagctttaaaagccttggggactttaaaacttacgggaaggctgacaacactgccttcagagaattaattacggctaaagaaattgagaaaaatgtgcaggaaatgagcaaaggctcggctcccggtccagacgggattactcttggggacgtcgtaaagatggatcccgagttttcccggaccatggagattttcaatttatggttaacaactggtaaaatcccggacatggtgagggggtgcagaaccgttttgattccaaaatcatcaaagccggatcgtttgaaagacattaataactggagacctatcacgatcggttccatcttgctgagactgttctccaggattgtaacagctaggctgagcaaagcgtgccccctgaacccaaggcaaagaggctttatcagagcggcgggatgctctgaaaacttaaaactcctgcaaactataatttggtcggccaaaagagaacacagaccactgggtgttgtattcgtggacatcgccaaggcttttgacaccgtaagccaccagcacatcattcatgctttgcagcaaagagaggtggatccccacatcgtcggtctggtgagcaatatgtacgagaacatcagtacgtatatcaccacaaagaggaacacacacacagacaaaatccagatccgggttggagtaaagcagggtgacccgatgtcgccccttttatttaacctggcaatggaccctctattatgcaagctggaagagagtggcaaaggataccaccgaggacagagcagcatcacagcgatggcatttgcagacgatctggttttgctgagcgactcctgggaaaatatgaatacaaatattagcatactggagaccttctgcaatctgaccggactcaaaacacaggggcaaaagtgccacggcttttacatcaagccgacaaaggactcttacaccatcaatgactgcgctgcctggactatcaacggcacacccctgaacatgatcgaccccggcgaatctgagaaatacctcggcctgcagtttgacccgtggattggaatagcaaggtccggtctctccacaaaactagatttttggcttcagcggatcgatcaagcaccacttaaacctctgcagaaaactgatattctcaaaacatacaccatccctcggctgatctacatagctgaccactcagaagtgaaaactgcactactcgaaacccttgaccagaagatccggacagcggtcaaggaatggcttcacctacctccgtgcacctgcgatgccatcctgtactcgagcacgagagacggcggtttgggcatcaccaaattggcaggactgatccccagcgtgcaggcccgtagactgcatcggatcgcacagtcatctgacgatacgatgaaatgcttcatggaaaaagagaaaatggaacagctgcataagaaattgtggattcaagctggaggggacagagagaacataccctcgatttgggaagcaccaccgtcgagtgaaccaccaaacaacgtgagcacaaattcggaatgggaagcaccgacccagaaagataaatttccaaagccttgcaattggaggaaaaacgaattcaaaaaatggaccaaattggcatcccaaggccgcggaattgtaaattttgaaagagacaaaattagtaaccattggatccaatactacagacgcatacctcacaggaaactcctcactgcactacaactcagggccaacgtttaccccacgagagaatttctagccaggggtagacaagaccaatacatcaaggcgtgtaggcactgcgatgcggacattgaatcctgcgcccacatcatcggcaactgcccagtgacacaggacgcccgaatcaagaggcacaattacatctgcgaactgcttctcgaggaggcgaagaagaaggactgggtagtgttcaaggaaccgcacataagggattccaacaaggaactgtacaaacctgacctgatatttgtgaaggatgcccgtgcacttgtcgtggatgtgacagtacggtatgaagcagccaaatcatcgctggaggaagccgctgcagagaaagtgagaaagtacaaacacctggaaacggaagtaagacatctcacgaatgcaaaggacgttacttttgtgggctttcccctaggagcgcgggggaaatggcaccaagataactttaaacttttgactgagcttggcctctccaaatcgaggcaagtgaaaatggcagagactttttccacagtagcgctcttttcatctgtggacattgtacatatgtttgccagtagggccagaaaatctatggttatgtaaaccggtagacatgataagatacattgatgagtttggacaaaccacaactagaatgcagtgaaaaaaatgctttatttgtgaaatttgtgatgctattgctttatttgtaaccattataagctgcaataaacaagttaacaacaacaaaaaaaaaaaaaaaaaaaaaaaaaaaaaaacgttgactaaaaaaaaaaaaaaaaaaaaaaaaaaaaaaaaaaaaaaaaaaaaaaaaaaaaaaaaaaaaaaaaaaaaaa

SEQ ID NO: 10136 - DNA, 5170 bp, synthetic construct
  source 1..5170: mol_type = other DNA
ggtctagttacaactgggcatcgctgcagagatcgcacctcctcgtggtcccgctggtagcccttcgaagggtgactaagtcgatctctgccccaggtacggagccgttgggactcaccagtccaacgtaactcctgcctaaattcggtgaaacaaattcctcggtaaaaagccccatggcttcttgcccgaaacctggccccccggtttcagcaggggcaatgagtttggaaagtggactgaccacccactccgttctcgccatcgaacgtggtcccaattcgttggcaaattccggatcagactttgggggggggggtctggggctaccgttacgcctattgagggtatcggtcggcactcagacctcccgctccgactgggtagacctggtgtcctggagccacccaggacccacgtctaagtcccagcaggttgacctggtgtctttatttcctaaacaccgggttgacctgttatccaaaaacgaccaggtagacctggtggctcaatttttaccatctaaatttccccccaatttggcagaaaatgatttggctttgctggtgaacttagagttctacagatcggatttgcatgtgtatgagtgtgttcattttgctgcacattgggagggattaagtggtttgcctgaggtgtatgaacaacttgcaccacaaccgtgtgtgggagaaactttacattctagcctcccacgagacagtgaactgtttgtgcctgaagaggggagcagcgagaaggagagcgaggacgcgccaaaaacatctcctccgacgcctgggaaacatggtttggaacagactggggaggaaaaagtgatggtgactgttcctgacaaaaatccaccttgtccttgctgtggtacccgggtaaactctgtgttgaatctgattgaacatctgaaagtgtcacacgggaaaaggggggtttgttttcggtgtgcaaaatgtggaaaggaaaatagtaactatcacagtgttgtttgtcattttccaaaatgcaggggtccagagacggagaaagccccagctggggagtggatttgtgaggtatgcaacagagattttacaaccaaaattggcctgggacaacacaagagattggcacacccagcagtgagaaatcaggaaaggatcgttgcttcccaaccgaaagaaacatcaaatagaggtgctcacaaaaggtgctggacaaaggaggaggaagaattactaataagactggaggctcagttcgagggaaacaaaaatattaataagcttattgcagaacacataaccaccaaaacagctaagcagatcagtgacaaaaggcgattgctgtccagaaagccagcagaggagccacgtgaggagcctggaacgtgtcatcacaccaggagagcagctgcgagcctgagaacggagcctgagatgagtcatcacgcccaggcagaggacagagataatggacctgggagacgccctctgccaggcagggcagctgccggagggagaacaatggacgagataagacgccaccctgataagggcaacggacagcagagacccaccaagcaaaaatcagaagaacagctgcaggcttactataaaaagacactagaggaacgactttcagctggggcacttaacaccttcccccgagcattcaagcaggtaatggaaggccgggatataaagctagtaatcaatcagacagcgcaggactgcttcggatgcctggaatccataagccaaataagaacggcaacccgagataaaaaggacacggtgacccgggagaaacacccaaagaaaccttttcagaagtggatgaaggacagagcaatcaaaaaaggtaattatcttcggttccagcgtttattttatcttgatagagggaaactggctaaaatcattttagatgatattgaatgcttgtcttgtgacataccactcagtgaaatttattcggtttttaaaacaagatgggaaacaactggtagctttaaaagccttggggactttaaaacttacgggaaggctgacaacactgccttcagagaattaattacggctaaagaaattgagaaaaatgtgcaggaaatgagcaaaggctcggctcccggtccagacgggattactcttggggacgtcgtaaagatggatcccgagttttcccggaccatggagattttcaatttatggttaacaactggtaaaatcccggacatggtgagggggtgcagaaccgttttgattccaaaatcatcaaagccggatcgtttgaaagacattaataactggagacctatcacgatcggttccatcttgctgagactgttctccaggattgtaacagctaggctgagcaaagcgtgccccctgaacccaaggcaaagaggctttatcagagcggcgggatgctctgaaaacttaaaactcctgcaaactataatttggtcggccaaaagagaacacagaccactgggtgttgtattcgtggacatcgccaaggcttttgacaccgtaagccaccagcacatcattcatgctttgcagcaaagagaggtggatccccacatcgtcggtctggtgagcaatatgtacgagaacatcagtacgtatatcaccacaaagaggaacacacacacagacaaaatccagatccgggttggagtaaagcagggtgacccgatgtcgccccttttatttaacctggcaatggaccctctattatgcaagctggaagagagtggcaaaggataccaccgaggacagagcagcatcacagcgatggcatttgcagacgatctggttttgctgagcgactcctgggaaaatatgaatacaaatattagcatactggagaccttctgcaatctgaccggactcaaaacacaggggcaaaagtgccacggcttttacatcaagccgacaaaggactcttacaccatcaatgactgcgctgcctggactatcaacggcacacccctgaacatgatcgaccccggcgaatctgagaaatacctcggcctgcagtttgacccgtggattggaatagcaaggtccggtctctccacaaaactagatttttggcttcagcggatcgatcaagcaccacttaaacctctgcagaaaactgatattctcaaaacatacaccatccctcggctgatctacatagctgaccactcagaagtgaaaactgcactactcgaaacccttgaccagaagatccggacagcggtcaaggaatggcttcacctacctccgtgcacctgcgatgccatcctgtactcgagcacgagagacggcggtttgggcatcaccaaattggcaggactgatccccagcgtgcaggcccgtagactgcatcggatcgcacagtcatctgacgatacgatgaaatgcttcatggaaaaagagaaaatggaacagctgcataagaaattgtggattcaagctggaggggacagagagaacataccctcgatttgggaagcaccaccgtcgagtgaaccaccaaacaacgtgagcacaaattcggaatgggaagcaccgacccagaaagataaatttccaaagccttgcaattggaggaaaaacgaattcaaaaaatggaccaaattggcatcccaaggccgcggaattgtaaattttgaaagagacaaaattagtaaccattggatccaatactacagacgcatacctcacaggaaactcctcactgcactacaactcagggccaacgtttaccccacgagagaatttctagccaggggtagacaagaccaatacatcaaggcgtgtaggcactgcgatgcggacattgaatcctgcgcccacatcatcggcaactgcccagtgacacaggacgcccgaatcaagaggcacaattacatctgcgaactgcttctcgaggaggcgaagaagaaggactgggtagtgttcaaggaaccgcacataagggattccaacaaggaactgtacaaacctgacctgatatttgtgaaggatgcccgtgcacttgtcgtggatgtgacagtacggtatgaagcagccaaatcatcgctggaggaagccgctgcagagaaagtgagaaagtacaaacacctggaaacggaagtaagacatctcacgaatgcaaaggacgttacttttgtgggctttcccctaggagcgcgggggaaatggcaccaagataactttaaacttttgactgagcttggcctctccaaatcgaggcaagtgaaaatggcagagactttttccacagtagcgctcttttcatctgtggacattgtacatatgtttgccagtagggccagaaaatctatggttatgtccggctccgagactcctggaacaagcgagagcgctacacctgagggcagctcaacacccgctagaagaaggctgatgagagattttaaaagactgcaagaagatcctccagccggagtgtccggcgcccctagcgagaacaacatcatggtctggaacgccgtgatcttcggccccgagggcaccccttttgaggacggcaccttcaagctcacaatcgagttcaccgaggaatatcctaacaagcctcctaccgtgcggttcgtgagcaagatgttccaccccaacgtgtacgccgacggcagcatttgcctggatatcctgcagaacagatggagccctacatacgacgtgagctctatcctgaccagcatccagagcctgctggacgagcctaaccccaattctccagctaatagccaggccgcccagctgtaccaggaaaacaagcgggaatacgagaagagagtgtccgccatcgtggaacagagctggcgggactgtggcggatctggcaaaagaaccgccgacggcagcgaattcgagcccaagaagaagaggaaagtctaaaccggtagacatgataagatacattgatgagtttggacaaaccacaactagaatgcagtgaaaaaaatgctttatttgtgaaatttgtgatgctattgctttatttgtaaccattataagctgcaataaacaagttaacaacaacaaaaaaaaaaaaaaaaaaaaaaaaaaaaaaacgttgactaaaaaaaaaaaaaaaaaaaaaaaaaaaaaaaaaaaaaaaaaaaaaaaaaaaaaaaaaaaaaaaaaaaaaa

SEQ ID NO: 10137 - DNA, 4624 bp, synthetic construct
  source 1..4624: mol_type = other DNA
ggtctagttacaactgggcatcgctgcagagatcgcacctcctcgtggtcccgctggtagcccttcgaagggtgactaagtcgatctctgccccaggtacggagccgttgggactcaccagtccaacgtaactcctgcctaaattcggtgaaacaaattcctcggtaaaaagccccatgaggcagaggaagaggcacaaggcttcttgcccgaaacctggccccccggtttcagcaggggcaatgagtttggaaagtggactgaccacccactccgttctcgccatcgaacgtggtcccaattcgttggcaaattccggatcagactttgggggggggggtctggggctaccgttacgcctattgagggtatcggtcggcactcagacctcccgctccgactgggtagacctggtgtcctggagccacccaggacccacgtctaagtcccagcaggttgacctggtgtctttatttcctaaacaccgggttgacctgttatccaaaaacgaccaggtagacctggtggctcaatttttaccatctaaatttccccccaatttggcagaaaatgatttggctttgctggtgaacttagagttctacagatcggatttgcatgtgtatgagtgtgttcattttgctgcacattgggagggattaagtggtttgcctgaggtgtatgaacaacttgcaccacaaccgtgtgtgggagaaactttacattctagcctcccacgagacagtgaactgtttgtgcctgaagaggggagcagcgagaaggagagcgaggacgcgccaaaaacatctcctccgacgcctgggaaacatggtttggaacagactggggaggaaaaagtgatggtgactgttcctgacaaaaatccaccttgtccttgctgtggtacccgggtaaactctgtgttgaatctgattgaacatctgaaagtgtcacacgggaaaaggggggtttgttttcggtgtgcaaaatgtggaaaggaaaatagtaactatcacagtgttgtttgtcattttccaaaatgcaggggtccagagacggagaaagccccagctggggagtggatttgtgaggtatgcaacagagattttacaaccaaaattggcctgggacaacacaagagattggcacacccagcagtgagaaatcaggaaaggatcgttgcttcccaaccgaaagaaacatcaaatagaggtgctcacaaaaggtgctggacaaaggaggaggaagaattactaataagactggaggctcagttcgagggaaacaaaaatattaataagcttattgcagaacacataaccaccaaaacagctaagcagatcagtgacaaaaggcgattgctgtccagaaagccagcagaggagccacgtgaggagcctggaacgtgtcatcacaccaggagagcagctgcgagcctgagaacggagcctgagatgagtcatcacgcccaggcagaggacagagataatggacctgggagacgccctctgccaggcagggcagctgccggagggagaacaatggacgagataagacgccaccctgataagggcaacggacagcagagacccaccaagcaaaaatcagaagaacagctgcaggcttactataaaaagacactagaggaacgactttcagctggggcacttaacaccttcccccgagcattcaagcaggtaatggaaggccgggatataaagctagtaatcaatcagacagcgcaggactgcttcggatgcctggaatccataagccaaataagaacggcaacccgagataaaaaggacacggtgacccgggagaaacacccaaagaaaccttttcagaagtggatgaaggacagagcaatcaaaaaaggtaattatcttcggttccagcgtttattttatcttgatagagggaaactggctaaaatcattttagatgatattgaatgcttgtcttgtgacataccactcagtgaaatttattcggtttttaaaacaagatgggaaacaactggtagctttaaaagccttggggactttaaaacttacgggaaggctgacaacactgccttcagagaattaattacggctaaagaaattgagaaaaatgtgcaggaaatgagcaaaggctcggctcccggtccagacgggattactcttggggacgtcgtaaagatggatcccgagttttcccggaccatggagattttcaatttatggttaacaactggtaaaatcccggacatggtgagggggtgcagaaccgttttgattccaaaatcatcaaagccggatcgtttgaaagacattaataactggagacctatcacgatcggttccatcttgctgagactgttctccaggattgtaacagctaggctgagcaaagcgtgccccctgaacccaaggcaaagaggctttatcagagcggcgggatgctctgaaaacttaaaactcctgcaaactataatttggtcggccaaaagagaacacagaccactgggtgttgtattcgtggacatcgccaaggcttttgacaccgtaagccaccagcacatcattcatgctttgcagcaaagagaggtggatccccacatcgtcggtctggtgagcaatatgtacgagaacatcagtacgtatatcaccacaaagaggaacacacacacagacaaaatccagatccgggttggagtaaagcagggtgacccgatgtcgccccttttatttaacctggcaatggaccctctattatgcaagctggaagagagtggcaaaggataccaccgaggacagagcagcatcacagcgatggcatttgcagacgatctggttttgctgagcgactcctgggaaaatatgaatacaaatattagcatactggagaccttctgcaatctgaccggactcaaaacacaggggcaaaagtgccacggcttttacatcaagccgacaaaggactcttacaccatcaatgactgcgctgcctggactatcaacggcacacccctgaacatgatcgaccccggcgaatctgagaaatacctcggcctgcagtttgacccgtggattggaatagcaaggtccggtctctccacaaaactagatttttggcttcagcggatcgatcaagcaccacttaaacctctgcagaaaactgatattctcaaaacatacaccatccctcggctgatctacatagctgaccactcagaagtgaaaactgcactactcgaaacccttgaccagaagatccggacagcggtcaaggaatggcttcacctacctccgtgcacctgcgatgccatcctgtactcgagcacgagagacggcggtttgggcatcaccaaattggcaggactgatccccagcgtgcaggcccgtagactgcatcggatcgcacagtcatctgacgatacgatgaaatgcttcatggaaaaagagaaaatggaacagctgcataagaaattgtggattcaagctggaggggacagagagaacataccctcgatttgggaagcaccaccgtcgagtgaaccaccaaacaacgtgagcacaaattcggaatgggaagcaccgacccagaaagataaatttccaaagccttgcaattggaggaaaaacgaattcaaaaaatggaccaaattggcatcccaaggccgcggaattgtaaattttgaaagagacaaaattagtaaccattggatccaatactacagacgcatacctcacaggaaactcctcactgcactacaactcagggccaacgtttaccccacgagagaatttctagccaggggtagacaagaccaatacatcaaggcgtgtaggcactgcgatgcggacattgaatcctgcgcccacatcatcggcaactgcccagtgacacaggacgcccgaatcaagaggcacaattacatctgcgaactgcttctcgaggaggcgaagaagaaggactgggtagtgttcaaggaaccgcacataagggattccaacaaggaactgtacaaacctgacctgatatttgtgaaggatgcccgtgcacttgtcgtggatgtgacagtacggtatgaagcagccaaatcatcgctggaggaagccgctgcagagaaagtgagaaagtacaaacacctggaaacggaagtaagacatctcacgaatgcaaaggacgttacttttgtgggctttcccctaggagcgcgggggaaatggcaccaagataactttaaacttttgactgagcttggcctctccaaatcgaggcaagtgaaaatggcagagactttttccacagtagcgctcttttcatctgtggacattgtacatatgtttgccagtagggccagaaaatctatggttatgtaaaccggtagacatgataagatacattgatgagtttggacaaaccacaactagaatgcagtgaaaaaaatgctttatttgtgaaatttgtgatgctattgctttatttgtaaccattataagctgcaataaacaagttaacaacaacaaaaaaaaaaaaaaaaaaaaaaaaaaaaaaacgttgactaaaaaaaaaaaaaaaaaaaaaaaaaaaaaaaaaaaaaaaaaaaaaaaaaaaaaaaaaaaaaaaaaaaaaa

SEQ ID NO: 10138 - DNA, 4624 bp, synthetic construct
  source 1..4624: mol_type = other DNA
ggtctagttacaactgggcatcgctgcagagatcgcacctcctcgtggtcccgctggtagcccttcgaagggtgactaagtcgatctctgccccaggtacggagccgttgggactcaccagtccaacgtaactcctgcctaaattcggtgaaacaaattcctcggtaaaaagccccatgcccagccagcagaagaggaaggcttcttgcccgaaacctggccccccggtttcagcaggggcaatgagtttggaaagtggactgaccacccactccgttctcgccatcgaacgtggtcccaattcgttggcaaattccggatcagactttgggggggggggtctggggctaccgttacgcctattgagggtatcggtcggcactcagacctcccgctccgactgggtagacctggtgtcctggagccacccaggacccacgtctaagtcccagcaggttgacctggtgtctttatttcctaaacaccgggttgacctgttatccaaaaacgaccaggtagacctggtggctcaatttttaccatctaaatttccccccaatttggcagaaaatgatttggctttgctggtgaacttagagttctacagatcggatttgcatgtgtatgagtgtgttcattttgctgcacattgggagggattaagtggtttgcctgaggtgtatgaacaacttgcaccacaaccgtgtgtgggagaaactttacattctagcctcccacgagacagtgaactgtttgtgcctgaagaggggagcagcgagaaggagagcgaggacgcgccaaaaacatctcctccgacgcctgggaaacatggtttggaacagactggggaggaaaaagtgatggtgactgttcctgacaaaaatccaccttgtccttgctgtggtacccgggtaaactctgtgttgaatctgattgaacatctgaaagtgtcacacgggaaaaggggggtttgttttcggtgtgcaaaatgtggaaaggaaaatagtaactatcacagtgttgtttgtcattttccaaaatgcaggggtccagagacggagaaagccccagctggggagtggatttgtgaggtatgcaacagagattttacaaccaaaattggcctgggacaacacaagagattggcacacccagcagtgagaaatcaggaaaggatcgttgcttcccaaccgaaagaaacatcaaatagaggtgctcacaaaaggtgctggacaaaggaggaggaagaattactaataagactggaggctcagttcgagggaaacaaaaatattaataagcttattgcagaacacataaccaccaaaacagctaagcagatcagtgacaaaaggcgattgctgtccagaaagccagcagaggagccacgtgaggagcctggaacgtgtcatcacaccaggagagcagctgcgagcctgagaacggagcctgagatgagtcatcacgcccaggcagaggacagagataatggacctgggagacgccctctgccaggcagggcagctgccggagggagaacaatggacgagataagacgccaccctgataagggcaacggacagcagagacccaccaagcaaaaatcagaagaacagctgcaggcttactataaaaagacactagaggaacgactttcagctggggcacttaacaccttcccccgagcattcaagcaggtaatggaaggccgggatataaagctagtaatcaatcagacagcgcaggactgcttcggatgcctggaatccataagccaaataagaacggcaacccgagataaaaaggacacggtgacccgggagaaacacccaaagaaaccttttcagaagtggatgaaggacagagcaatcaaaaaaggtaattatcttcggttccagcgtttattttatcttgatagagggaaactggctaaaatcattttagatgatattgaatgcttgtcttgtgacataccactcagtgaaatttattcggtttttaaaacaagatgggaaacaactggtagctttaaaagccttggggactttaaaacttacgggaaggctgacaacactgccttcagagaattaattacggctaaagaaattgagaaaaatgtgcaggaaatgagcaaaggctcggctcccggtccagacgggattactcttggggacgtcgtaaagatggatcccgagttttcccggaccatggagattttcaatttatggttaacaactggtaaaatcccggacatggtgagggggtgcagaaccgttttgattccaaaatcatcaaagccggatcgtttgaaagacattaataactggagacctatcacgatcggttccatcttgctgagactgttctccaggattgtaacagctaggctgagcaaagcgtgccccctgaacccaaggcaaagaggctttatcagagcggcgggatgctctgaaaacttaaaactcctgcaaactataatttggtcggccaaaagagaacacagaccactgggtgttgtattcgtggacatcgccaaggcttttgacaccgtaagccaccagcacatcattcatgctttgcagcaaagagaggtggatccccacatcgtcggtctggtgagcaatatgtacgagaacatcagtacgtatatcaccacaaagaggaacacacacacagacaaaatccagatccgggttggagtaaagcagggtgacccgatgtcgccccttttatttaacctggcaatggaccctctattatgcaagctggaagagagtggcaaaggataccaccgaggacagagcagcatcacagcgatggcatttgcagacgatctggttttgctgagcgactcctgggaaaatatgaatacaaatattagcatactggagaccttctgcaatctgaccggactcaaaacacaggggcaaaagtgccacggcttttacatcaagccgacaaaggactcttacaccatcaatgactgcgctgcctggactatcaacggcacacccctgaacatgatcgaccccggcgaatctgagaaatacctcggcctgcagtttgacccgtggattggaatagcaaggtccggtctctccacaaaactagatttttggcttcagcggatcgatcaagcaccacttaaacctctgcagaaaactgatattctcaaaacatacaccatccctcggctgatctacatagctgaccactcagaagtgaaaactgcactactcgaaacccttgaccagaagatccggacagcggtcaaggaatggcttcacctacctccgtgcacctgcgatgccatcctgtactcgagcacgagagacggcggtttgggcatcaccaaattggcaggactgatccccagcgtgcaggcccgtagactgcatcggatcgcacagtcatctgacgatacgatgaaatgcttcatggaaaaagagaaaatggaacagctgcataagaaattgtggattcaagctggaggggacagagagaacataccctcgatttgggaagcaccaccgtcgagtgaaccaccaaacaacgtgagcacaaattcggaatgggaagcaccgacccagaaagataaatttccaaagccttgcaattggaggaaaaacgaattcaaaaaatggaccaaattggcatcccaaggccgcggaattgtaaattttgaaagagacaaaattagtaaccattggatccaatactacagacgcatacctcacaggaaactcctcactgcactacaactcagggccaacgtttaccccacgagagaatttctagccaggggtagacaagaccaatacatcaaggcgtgtaggcactgcgatgcggacattgaatcctgcgcccacatcatcggcaactgcccagtgacacaggacgcccgaatcaagaggcacaattacatctgcgaactgcttctcgaggaggcgaagaagaaggactgggtagtgttcaaggaaccgcacataagggattccaacaaggaactgtacaaacctgacctgatatttgtgaaggatgcccgtgcacttgtcgtggatgtgacagtacggtatgaagcagccaaatcatcgctggaggaagccgctgcagagaaagtgagaaagtacaaacacctggaaacggaagtaagacatctcacgaatgcaaaggacgttacttttgtgggctttcccctaggagcgcgggggaaatggcaccaagataactttaaacttttgactgagcttggcctctccaaatcgaggcaagtgaaaatggcagagactttttccacagtagcgctcttttcatctgtggacattgtacatatgtttgccagtagggccagaaaatctatggttatgtaaaccggtagacatgataagatacattgatgagtttggacaaaccacaactagaatgcagtgaaaaaaatgctttatttgtgaaatttgtgatgctattgctttatttgtaaccattataagctgcaataaacaagttaacaacaacaaaaaaaaaaaaaaaaaaaaaaaaaaaaaaacgttgactaaaaaaaaaaaaaaaaaaaaaaaaaaaaaaaaaaaaaaaaaaaaaaaaaaaaaaaaaaaaaaaaaaaaaa

SEQ ID NO: 10139 - DNA, 4621 bp, synthetic construct
  source 1..4621: mol_type = other DNA
ggtctagttacaactgggcatcgctgcagagatcgcacctcctcgtggtcccgctggtagcccttcgaagggtgactaagtcgatctctgccccaggtacggagccgttgggactcaccagtccaacgtaactcctgcctaaattcggtgaaacaaattcctcggtaaaaagccccatgaagaagaagagcaagaaggcttcttgcccgaaacctggccccccggtttcagcaggggcaatgagtttggaaagtggactgaccacccactccgttctcgccatcgaacgtggtcccaattcgttggcaaattccggatcagactttgggggggggggtctggggctaccgttacgcctattgagggtatcggtcggcactcagacctcccgctccgactgggtagacctggtgtcctggagccacccaggacccacgtctaagtcccagcaggttgacctggtgtctttatttcctaaacaccgggttgacctgttatccaaaaacgaccaggtagacctggtggctcaatttttaccatctaaatttccccccaatttggcagaaaatgatttggctttgctggtgaacttagagttctacagatcggatttgcatgtgtatgagtgtgttcattttgctgcacattgggagggattaagtggtttgcctgaggtgtatgaacaacttgcaccacaaccgtgtgtgggagaaactttacattctagcctcccacgagacagtgaactgtttgtgcctgaagaggggagcagcgagaaggagagcgaggacgcgccaaaaacatctcctccgacgcctgggaaacatggtttggaacagactggggaggaaaaagtgatggtgactgttcctgacaaaaatccaccttgtccttgctgtggtacccgggtaaactctgtgttgaatctgattgaacatctgaaagtgtcacacgggaaaaggggggtttgttttcggtgtgcaaaatgtggaaaggaaaatagtaactatcacagtgttgtttgtcattttccaaaatgcaggggtccagagacggagaaagccccagctggggagtggatttgtgaggtatgcaacagagattttacaaccaaaattggcctgggacaacacaagagattggcacacccagcagtgagaaatcaggaaaggatcgttgcttcccaaccgaaagaaacatcaaatagaggtgctcacaaaaggtgctggacaaaggaggaggaagaattactaataagactggaggctcagttcgagggaaacaaaaatattaataagcttattgcagaacacataaccaccaaaacagctaagcagatcagtgacaaaaggcgattgctgtccagaaagccagcagaggagccacgtgaggagcctggaacgtgtcatcacaccaggagagcagctgcgagcctgagaacggagcctgagatgagtcatcacgcccaggcagaggacagagataatggacctgggagacgccctctgccaggcagggcagctgccggagggagaacaatggacgagataagacgccaccctgataagggcaacggacagcagagacccaccaagcaaaaatcagaagaacagctgcaggcttactataaaaagacactagaggaacgactttcagctggggcacttaacaccttcccccgagcattcaagcaggtaatggaaggccgggatataaagctagtaatcaatcagacagcgcaggactgcttcggatgcctggaatccataagccaaataagaacggcaacccgagataaaaaggacacggtgacccgggagaaacacccaaagaaaccttttcagaagtggatgaaggacagagcaatcaaaaaaggtaattatcttcggttccagcgtttattttatcttgatagagggaaactggctaaaatcattttagatgatattgaatgcttgtcttgtgacataccactcagtgaaatttattcggtttttaaaacaagatgggaaacaactggtagctttaaaagccttggggactttaaaacttacgggaaggctgacaacactgccttcagagaattaattacggctaaagaaattgagaaaaatgtgcaggaaatgagcaaaggctcggctcccggtccagacgggattactcttggggacgtcgtaaagatggatcccgagttttcccggaccatggagattttcaatttatggttaacaactggtaaaatcccggacatggtgagggggtgcagaaccgttttgattccaaaatcatcaaagccggatcgtttgaaagacattaataactggagacctatcacgatcggttccatcttgctgagactgttctccaggattgtaacagctaggctgagcaaagcgtgccccctgaacccaaggcaaagaggctttatcagagcggcgggatgctctgaaaacttaaaactcctgcaaactataatttggtcggccaaaagagaacacagaccactgggtgttgtattcgtggacatcgccaaggcttttgacaccgtaagccaccagcacatcattcatgctttgcagcaaagagaggtggatccccacatcgtcggtctggtgagcaatatgtacgagaacatcagtacgtatatcaccacaaagaggaacacacacacagacaaaatccagatccgggttggagtaaagcagggtgacccgatgtcgccccttttatttaacctggcaatggaccctctattatgcaagctggaagagagtggcaaaggataccaccgaggacagagcagcatcacagcgatggcatttgcagacgatctggttttgctgagcgactcctgggaaaatatgaatacaaatattagcatactggagaccttctgcaatctgaccggactcaaaacacaggggcaaaagtgccacggcttttacatcaagccgacaaaggactcttacaccatcaatgactgcgctgcctggactatcaacggcacacccctgaacatgatcgaccccggcgaatctgagaaatacctcggcctgcagtttgacccgtggattggaatagcaaggtccggtctctccacaaaactagatttttggcttcagcggatcgatcaagcaccacttaaacctctgcagaaaactgatattctcaaaacatacaccatccctcggctgatctacatagctgaccactcagaagtgaaaactgcactactcgaaacccttgaccagaagatccggacagcggtcaaggaatggcttcacctacctccgtgcacctgcgatgccatcctgtactcgagcacgagagacggcggtttgggcatcaccaaattggcaggactgatccccagcgtgcaggcccgtagactgcatcggatcgcacagtcatctgacgatacgatgaaatgcttcatggaaaaagagaaaatggaacagctgcataagaaattgtggattcaagctggaggggacagagagaacataccctcgatttgggaagcaccaccgtcgagtgaaccaccaaacaacgtgagcacaaattcggaatgggaagcaccgacccagaaagataaatttccaaagccttgcaattggaggaaaaacgaattcaaaaaatggaccaaattggcatcccaaggccgcggaattgtaaattttgaaagagacaaaattagtaaccattggatccaatactacagacgcatacctcacaggaaactcctcactgcactacaactcagggccaacgtttaccccacgagagaatttctagccaggggtagacaagaccaatacatcaaggcgtgtaggcactgcgatgcggacattgaatcctgcgcccacatcatcggcaactgcccagtgacacaggacgcccgaatcaagaggcacaattacatctgcgaactgcttctcgaggaggcgaagaagaaggactgggtagtgttcaaggaaccgcacataagggattccaacaaggaactgtacaaacctgacctgatatttgtgaaggatgcccgtgcacttgtcgtggatgtgacagtacggtatgaagcagccaaatcatcgctggaggaagccgctgcagagaaagtgagaaagtacaaacacctggaaacggaagtaagacatctcacgaatgcaaaggacgttacttttgtgggctttcccctaggagcgcgggggaaatggcaccaagataactttaaacttttgactgagcttggcctctccaaatcgaggcaagtgaaaatggcagagactttttccacagtagcgctcttttcatctgtggacattgtacatatgtttgccagtagggccagaaaatctatggttatgtaaaccggtagacatgataagatacattgatgagtttggacaaaccacaactagaatgcagtgaaaaaaatgctttatttgtgaaatttgtgatgctattgctttatttgtaaccattataagctgcaataaacaagttaacaacaacaaaaaaaaaaaaaaaaaaaaaaaaaaaaaaacgttgactaaaaaaaaaaaaaaaaaaaaaaaaaaaaaaaaaaaaaaaaaaaaaaaaaaaaaaaaaaaaaaaaaaaaaa

SEQ ID NO: 10140 - DNA, 4759 bp, synthetic construct
  source 1..4759: mol_type = other DNA
ggtctagttacaactgggcatcgctgcagagatcgcacctcctcgtggtcccgctggtagcccttcgaagggtgactaagtcgatctctgccccaggtacggagccgttgggactcaccagtccaacgtaactcctgcctaaattcggtgaaacaaattcctcggtaaaaagccccatggcttcttgcccgaaacctggccccccggtttcagcaggggcaatgagtttggaaagtggactgaccacccactccgttctcgccatcgaacgtggtcccaattcgttggcaaattccggatcagactttgggggggggggtctggggctaccgttacgcctattgagggtatcggtcggcactcagacctcccgctccgactgggtagacctggtgtcctggagccacccaggacccacgtctaagtcccagcaggttgacctggtgtctttatttcctaaacaccgggttgacctgttatccaaaaacgaccaggtagacctggtggctcaatttttaccatctaaatttccccccaatttggcagaaaatgatttggctttgctggtgaacttagagttctacagatcggatttgcatgtgtatgagtgtgttcattttgctgcacattgggagggattaagtggtttgcctgaggtgtatgaacaacttgcaccacaaccgtgtgtgggagaaactttacattctagcctcccacgagacagtgaactgtttgtgcctgaagaggggagcagcgagaaggagagcgaggacgcgccaaaaacatctcctccgacgcctgggaaacatggtttggaacagactggggaggaaaaagtgatggtgactgttcctgacaaaaatccaccttgtccttgctgtggtacccgggtaaactctgtgttgaatctgattgaacatctgaaagtgtcacacgggaaaaggggggtttgttttcggtgtgcaaaatgtggaaaggaaaatagtaactatcacagtgttgtttgtcattttccaaaatgcaggggtccagagacggagaaagccccagctggggagtggatttgtgaggtatgcaacagagattttacaaccaaaattggcctgggacaacacaagagattggcacacccagcagtgagaaatcaggaaaggatcgttgcttcccaaccgaaagaaacatcaaatagaggtgctcacaaaaggtgctggacaaaggaggaggaagaattactaataagactggaggctcagttcgagggaaacaaaaatattaataagcttattgcagaacacataaccaccaaaacagctaagcagatcagtgacaaaaggcgattgctgtccagaaagccagcagaggagccacgtgaggagcctggaacgtgtcatcacaccaggagagcagctgcgagcctgagaacggagcctgagatgagtcatcacgcccaggcagaggacagagataatggacctgggagacgccctctgccaggcagggcagctgccggagggagaacaatggacgagataagacgccaccctgataagggcaacggacagcagagacccaccaagcaaaaatcagaagaacagctgcaggcttactataaaaagacactagaggaacgactttcagctggggcacttaacaccttcccccgagcattcaagcaggtaatggaaggccgggatataaagctagtaatcaatcagacagcgcaggactgcttcggatgcctggaatccataagccaaataagaacggcaacccgagataaaaaggacacggtgacccgggagaaacacccaaagaaaccttttcagaagtggatgaaggacagagcaatcaaaaaaggtaattatcttcggttccagcgtttattttatcttgatagagggaaactggctaaaatcattttagatgatattgaatgcttgtcttgtgacataccactcagtgaaatttattcggtttttaaaacaagatgggaaacaactggtagctttaaaagccttggggactttaaaacttacgggaaggctgacaacactgccttcagagaattaattacggctaaagaaattgagaaaaatgtgcaggaaatgagcaaaggctcggctcccggtccagacgggattactcttggggacgtcgtaaagatggatcccgagttttcccggaccatggagattttcaatttatggttaacaactggtaaaatcccggacatggtgagggggtgcagaaccgttttgattccaaaatcatcaaagccggatcgtttgaaagacattaataactggagacctatcacgatcggttccatcttgctgagactgttctccaggattgtaacagctaggctgagcaaagcgtgccccctgaacccaaggcaaagaggctttatcagagcggcgggatgctctgaaaacttaaaactcctgcaaactataatttggtcggccaaaagagaacacagaccactgggtgttgtattcgtggacatcgccaaggcttttgacaccgtaagccaccagcacatcattcatgctttgcagcaaagagaggtggatccccacatcgtcggtctggtgagcaatatgtacgagaacatcagtacgtatatcaccacaaagaggaacacacacacagacaaaatccagatccgggttggagtaaagcagggtgacccgatgtcgccccttttatttaacctggcaatggaccctctattatgcaagctggaagagagtggcaaaggataccaccgaggacagagcagcatcacagcgatggcatttgcagacgatctggttttgctgagcgactcctgggaaaatatgaatacaaatattagcatactggagaccttctgcaatctgaccggactcaaaacacaggggcaaaagtgccacggcttttacatcaagccgacaaaggactcttacaccatcaatgactgcgctgcctggactatcaacggcacacccctgaacatgatcgaccccggcgaatctgagaaatacctcggcctgcagtttgacccgtggattggaatagcaaggtccggtctctccacaaaactagatttttggcttcagcggatcgatcaagcaccacttaaacctctgcagaaaactgatattctcaaaacatacaccatccctcggctgatctacatagctgaccactcagaagtgaaaactgcactactcgaaacccttgaccagaagatccggacagcggtcaaggaatggcttcacctacctccgtgcacctgcgatgccatcctgtactcgagcacgagagacggcggtttgggcatcaccaaattggcaggactgatccccagcgtgcaggcccgtagactgcatcggatcgcacagtcatctgacgatacgatgaaatgcttcatggaaaaagagaaaatggaacagctgcataagaaattgtggattcaagctggaggggacagagagaacataccctcgatttgggaagcaccaccgtcgagtgaaccaccaaacaacgtgagcacaaattcggaatgggaagcaccgacccagaaagataaatttccaaagccttgcaattggaggaaaaacgaattcaaaaaatggaccaaattggcatcccaaggccgcggaattgtaaattttgaaagagacaaaattagtaaccattggatccaatactacagacgcatacctcacaggaaactcctcactgcactacaactcagggccaacgtttaccccacgagagaatttctagccaggggtagacaagaccaatacatcaaggcgtgtaggcactgcgatgcggacattgaatcctgcgcccacatcatcggcaactgcccagtgacacaggacgcccgaatcaagaggcacaattacatctgcgaactgcttctcgaggaggcgaagaagaaggactgggtagtgttcaaggaaccgcacataagggattccaacaaggaactgtacaaacctgacctgatatttgtgaaggatgcccgtgcacttgtcgtggatgtgacagtacggtatgaagcagccaaatcatcgctggaggaagccgctgcagagaaagtgagaaagtacaaacacctggaaacggaagtaagacatctcacgaatgcaaaggacgttacttttgtgggctttcccctaggagcgcgggggaaatggcaccaagataactttaaacttttgactgagcttggcctctccaaatcgaggcaagtgaaaatggcagagactttttccacagtagcgctcttttcatctgtggacattgtacatatgtttgccagtagggccagaaaatctatggttggcggcagcggctctgagacacctggaacaagcgagagcgccaccccggaatccggcggctccggcgagaagaggacccccctgcacgccgccgcctacctgggcgacgccgagatcatcgagctgctgatcctgagcggcgccagggtgaacgccatgtaaaccggtagacatgataagatacattgatgagtttggacaaaccacaactagaatgcagtgaaaaaaatgctttatttgtgaaatttgtgatgctattgctttatttgtaaccattataagctgcaataaacaagttaacaacaacaaaaaaaaaaaaaaaaaaaaaaaaaaaaaaacgttgactaaaaaaaaaaaaaaaaaaaaaaaaaaaaaaaaaaaaaaaaaaaaaaaaaaaaaaaaaaaaaaaaaaaaaa

SEQ ID NO: 10141 - DNA, 5326 bp, synthetic construct
  source 1..5326: mol_type = other DNA
ggtctagttacaactgggcatcgctgcagagatcgcacctcctcgtggtcccgctggtagcccttcgaagggtgactaagtcgatctctgccccaggtacggagccgttgggactcaccagtccaacgtaactcctgcctaaattcggtgaaacaaattcctcggtaaaaagccccatggcttcttgcccgaaacctggccccccggtttcagcaggggcaatgagtttggaaagtggactgaccacccactccgttctcgccatcgaacgtggtcccaattcgttggcaaattccggatcagactttgggggggggggtctggggctaccgttacgcctattgagggtatcggtcggcactcagacctcccgctccgactgggtagacctggtgtcctggagccacccaggacccacgtctaagtcccagcaggttgacctggtgtctttatttcctaaacaccgggttgacctgttatccaaaaacgaccaggtagacctggtggctcaatttttaccatctaaatttccccccaatttggcagaaaatgatttggctttgctggtgaacttagagttctacagatcggatttgcatgtgtatgagtgtgttcattttgctgcacattgggagggattaagtggtttgcctgaggtgtatgaacaacttgcaccacaaccgtgtgtgggagaaactttacattctagcctcccacgagacagtgaactgtttgtgcctgaagaggggagcagcgagaaggagagcgaggacgcgccaaaaacatctcctccgacgcctgggaaacatggtttggaacagactggggaggaaaaagtgatggtgactgttcctgacaaaaatccaccttgtccttgctgtggtacccgggtaaactctgtgttgaatctgattgaacatctgaaagtgtcacacgggaaaaggggggtttgttttcggtgtgcaaaatgtggaaaggaaaatagtaactatcacagtgttgtttgtcattttccaaaatgcaggggtccagagacggagaaagccccagctggggagtggatttgtgaggtatgcaacagagattttacaaccaaaattggcctgggacaacacaagagattggcacacccagcagtgagaaatcaggaaaggatcgttgcttcccaaccgaaagaaacatcaaatagaggtgctcacaaaaggtgctggacaaaggaggaggaagaattactaataagactggaggctcagttcgagggaaacaaaaatattaataagcttattgcagaacacataaccaccaaaacagctaagcagatcagtgacaaaaggcgattgctgtccagaaagccagcagaggagccacgtgaggagcctggaacgtgtcatcacaccaggagagcagctgcgagcctgagaacggagcctgagatgagtcatcacgcccaggcagaggacagagataatggacctgggagacgccctctgccaggcagggcagctgccggagggagaacaatggacgagataagacgccaccctgataagggcaacggacagcagagacccaccaagcaaaaatcagaagaacagctgcaggcttactataaaaagacactagaggaacgactttcagctggggcacttaacaccttcccccgagcattcaagcaggtaatggaaggccgggatataaagctagtaatcaatcagacagcgcaggactgcttcggatgcctggaatccataagccaaataagaacggcaacccgagataaaaaggacacggtgacccgggagaaacacccaaagaaaccttttcagaagtggatgaaggacagagcaatcaaaaaaggtaattatcttcggttccagcgtttattttatcttgatagagggaaactggctaaaatcattttagatgatattgaatgcttgtcttgtgacataccactcagtgaaatttattcggtttttaaaacaagatgggaaacaactggtagctttaaaagccttggggactttaaaacttacgggaaggctgacaacactgccttcagagaattaattacggctaaagaaattgagaaaaatgtgcaggaaatgagcaaaggctcggctcccggtccagacgggattactcttggggacgtcgtaaagatggatcccgagttttcccggaccatggagattttcaatttatggttaacaactggtaaaatcccggacatggtgagggggtgcagaaccgttttgattccaaaatcatcaaagccggatcgtttgaaagacattaataactggagacctatcacgatcggttccatcttgctgagactgttctccaggattgtaacagctaggctgagcaaagcgtgccccctgaacccaaggcaaagaggctttatcagagcggcgggatgctctgaaaacttaaaactcctgcaaactataatttggtcggccaaaagagaacacagaccactgggtgttgtattcgtggacatcgccaaggcttttgacaccgtaagccaccagcacatcattcatgctttgcagcaaagagaggtggatccccacatcgtcggtctggtgagcaatatgtacgagaacatcagtacgtatatcaccacaaagaggaacacacacacagacaaaatccagatccgggttggagtaaagcagggtgacccgatgtcgccccttttatttaacctggcaatggaccctctattatgcaagctggaagagagtggcaaaggataccaccgaggacagagcagcatcacagcgatggcatttgcagacgatctggttttgctgagcgactcctgggaaaatatgaatacaaatattagcatactggagaccttctgcaatctgaccggactcaaaacacaggggcaaaagtgccacggcttttacatcaagccgacaaaggactcttacaccatcaatgactgcgctgcctggactatcaacggcacacccctgaacatgatcgaccccggcgaatctgagaaatacctcggcctgcagtttgacccgtggattggaatagcaaggtccggtctctccacaaaactagatttttggcttcagcggatcgatcaagcaccacttaaacctctgcagaaaactgatattctcaaaacatacaccatccctcggctgatctacatagctgaccactcagaagtgaaaactgcactactcgaaacccttgaccagaagatccggacagcggtcaaggaatggcttcacctacctccgtgcacctgcgatgccatcctgtactcgagcacgagagacggcggtttgggcatcaccaaattggcaggactgatccccagcgtgcaggcccgtagactgcatcggatcgcacagtcatctgacgatacgatgaaatgcttcatggaaaaagagaaaatggaacagctgcataagaaattgtggattcaagctggaggggacagagagaacataccctcgatttgggaagcaccaccgtcgagtgaaccaccaaacaacgtgagcacaaattcggaatgggaagcaccgacccagaaagataaatttccaaagccttgcaattggaggaaaaacgaattcaaaaaatggaccaaattggcatcccaaggccgcggaattgtaaattttgaaagagacaaaattagtaaccattggatccaatactacagacgcatacctcacaggaaactcctcactgcactacaactcagggccaacgtttaccccacgagagaatttctagccaggggtagacaagaccaatacatcaaggcgtgtaggcactgcgatgcggacattgaatcctgcgcccacatcatcggcaactgcccagtgacacaggacgcccgaatcaagaggcacaattacatctgcgaactgcttctcgaggaggcgaagaagaaggactgggtagtgttcaaggaaccgcacataagggattccaacaaggaactgtacaaacctgacctgatatttgtgaaggatgcccgtgcacttgtcgtggatgtgacagtacggtatgaagcagccaaatcatcgctggaggaagccgctgcagagaaagtgagaaagtacaaacacctggaaacggaagtaagacatctcacgaatgcaaaggacgttacttttgtgggctttcccctaggagcgcgggggaaatggcaccaagataactttaaacttttgactgagcttggcctctccaaatcgaggcaagtgaaaatggcagagactttttccacagtagcgctcttttcatctgtggacattgtacatatgtttgccagtagggccagaaaatctatggttggcggcagcggctctgagacacctggaacaagcgagagcgccaccccggaatccggcggctccggcgaggacacccaggccatcgactgggacgtggaggaggaggaggagaccgagcagagcagcgagagcctgaggtgcaacgtggagcccgtgggcaggctgcacatcttcagcggcgcccacggccccgagaaggacttccccctgcacctgggcaagaacgtggtgggcaggatgcccgactgcagcgtggccctgcccttccccagcatcagcaagcagcacgccgagatcgagatcctggcctgggacaaggcccccatcctgagggactgcggcagcctgaacggcacccagatcctgaggccccccaaggtgctgagccccggcgtgagccacaggctgagggaccaggagctgatcctgttcgccgacctgctgtgccagtaccacaggctggacgtgagcctgcccttcgtgagcaggggccccctgaccgtggaggagacccccagggtgcagggcgagacccagccccagaggctgctgctggccgaggacagcgaggaggaggtggacttcctgagcgagaggaggatggtgaagaagagcaggaccaccagcagcagcgtgatcgtgcccgagagcgacgaggagggccacagccccgtgctgggcggcctgggcccccccttcgccttcaacctgaacagcgacaccatgtaaaccggtagacatgataagatacattgatgagtttggacaaaccacaactagaatgcagtgaaaaaaatgctttatttgtgaaatttgtgatgctattgctttatttgtaaccattataagctgcaataaacaagttaacaacaacaaaaaaaaaaaaaaaaaaaaaaaaaaaaaaacgttgactaaaaaaaaaaaaaaaaaaaaaaaaaaaaaaaaaaaaaaaaaaaaaaaaaaaaaaaaaaaaaaaaaaaaaa

SEQ ID NO: 10142 - DNA, 4918 bp, synthetic construct
  source 1..4918: mol_type = other DNA
ggtctagttacaactgggcatcgctgcagagatcgcacctcctcgtggtcccgctggtagcccttcgaagggtgactaagtcgatctctgccccaggtacggagccgttgggactcaccagtccaacgtaactcctgcctaaattcggtgaaacaaattcctcggtaaaaagccccatggcttcttgcccgaaacctggccccccggtttcagcaggggcaatgagtttggaaagtggactgaccacccactccgttctcgccatcgaacgtggtcccaattcgttggcaaattccggatcagactttgggggggggggtctggggctaccgttacgcctattgagggtatcggtcggcactcagacctcccgctccgactgggtagacctggtgtcctggagccacccaggacccacgtctaagtcccagcaggttgacctggtgtctttatttcctaaacaccgggttgacctgttatccaaaaacgaccaggtagacctggtggctcaatttttaccatctaaatttccccccaatttggcagaaaatgatttggctttgctggtgaacttagagttctacagatcggatttgcatgtgtatgagtgtgttcattttgctgcacattgggagggattaagtggtttgcctgaggtgtatgaacaacttgcaccacaaccgtgtgtgggagaaactttacattctagcctcccacgagacagtgaactgtttgtgcctgaagaggggagcagcgagaaggagagcgaggacgcgccaaaaacatctcctccgacgcctgggaaacatggtttggaacagactggggaggaaaaagtgatggtgactgttcctgacaaaaatccaccttgtccttgctgtggtacccgggtaaactctgtgttgaatctgattgaacatctgaaagtgtcacacgggaaaaggggggtttgttttcggtgtgcaaaatgtggaaaggaaaatagtaactatcacagtgttgtttgtcattttccaaaatgcaggggtccagagacggagaaagccccagctggggagtggatttgtgaggtatgcaacagagattttacaaccaaaattggcctgggacaacacaagagattggcacacccagcagtgagaaatcaggaaaggatcgttgcttcccaaccgaaagaaacatcaaatagaggtgctcacaaaaggtgctggacaaaggaggaggaagaattactaataagactggaggctcagttcgagggaaacaaaaatattaataagcttattgcagaacacataaccaccaaaacagctaagcagatcagtgacaaaaggcgattgctgtccagaaagccagcagaggagccacgtgaggagcctggaacgtgtcatcacaccaggagagcagctgcgagcctgagaacggagcctgagatgagtcatcacgcccaggcagaggacagagataatggacctgggagacgccctctgccaggcagggcagctgccggagggagaacaatggacgagataagacgccaccctgataagggcaacggacagcagagacccaccaagcaaaaatcagaagaacagctgcaggcttactataaaaagacactagaggaacgactttcagctggggcacttaacaccttcccccgagcattcaagcaggtaatggaaggccgggatataaagctagtaatcaatcagacagcgcaggactgcttcggatgcctggaatccataagccaaataagaacggcaacccgagataaaaaggacacggtgacccgggagaaacacccaaagaaaccttttcagaagtggatgaaggacagagcaatcaaaaaaggtaattatcttcggttccagcgtttattttatcttgatagagggaaactggctaaaatcattttagatgatattgaatgcttgtcttgtgacataccactcagtgaaatttattcggtttttaaaacaagatgggaaacaactggtagctttaaaagccttggggactttaaaacttacgggaaggctgacaacactgccttcagagaattaattacggctaaagaaattgagaaaaatgtgcaggaaatgagcaaaggctcggctcccggtccagacgggattactcttggggacgtcgtaaagatggatcccgagttttcccggaccatggagattttcaatttatggttaacaactggtaaaatcccggacatggtgagggggtgcagaaccgttttgattccaaaatcatcaaagccggatcgtttgaaagacattaataactggagacctatcacgatcggttccatcttgctgagactgttctccaggattgtaacagctaggctgagcaaagcgtgccccctgaacccaaggcaaagaggctttatcagagcggcgggatgctctgaaaacttaaaactcctgcaaactataatttggtcggccaaaagagaacacagaccactgggtgttgtattcgtggacatcgccaaggcttttgacaccgtaagccaccagcacatcattcatgctttgcagcaaagagaggtggatccccacatcgtcggtctggtgagcaatatgtacgagaacatcagtacgtatatcaccacaaagaggaacacacacacagacaaaatccagatccgggttggagtaaagcagggtgacccgatgtcgccccttttatttaacctggcaatggaccctctattatgcaagctggaagagagtggcaaaggataccaccgaggacagagcagcatcacagcgatggcatttgcagacgatctggttttgctgagcgactcctgggaaaatatgaatacaaatattagcatactggagaccttctgcaatctgaccggactcaaaacacaggggcaaaagtgccacggcttttacatcaagccgacaaaggactcttacaccatcaatgactgcgctgcctggactatcaacggcacacccctgaacatgatcgaccccggcgaatctgagaaatacctcggcctgcagtttgacccgtggattggaatagcaaggtccggtctctccacaaaactagatttttggcttcagcggatcgatcaagcaccacttaaacctctgcagaaaactgatattctcaaaacatacaccatccctcggctgatctacatagctgaccactcagaagtgaaaactgcactactcgaaacccttgaccagaagatccggacagcggtcaaggaatggcttcacctacctccgtgcacctgcgatgccatcctgtactcgagcacgagagacggcggtttgggcatcaccaaattggcaggactgatccccagcgtgcaggcccgtagactgcatcggatcgcacagtcatctgacgatacgatgaaatgcttcatggaaaaagagaaaatggaacagctgcataagaaattgtggattcaagctggaggggacagagagaacataccctcgatttgggaagcaccaccgtcgagtgaaccaccaaacaacgtgagcacaaattcggaatgggaagcaccgacccagaaagataaatttccaaagccttgcaattggaggaaaaacgaattcaaaaaatggaccaaattggcatcccaaggccgcggaattgtaaattttgaaagagacaaaattagtaaccattggatccaatactacagacgcatacctcacaggaaactcctcactgcactacaactcagggccaacgtttaccccacgagagaatttctagccaggggtagacaagaccaatacatcaaggcgtgtaggcactgcgatgcggacattgaatcctgcgcccacatcatcggcaactgcccagtgacacaggacgcccgaatcaagaggcacaattacatctgcgaactgcttctcgaggaggcgaagaagaaggactgggtagtgttcaaggaaccgcacataagggattccaacaaggaactgtacaaacctgacctgatatttgtgaaggatgcccgtgcacttgtcgtggatgtgacagtacggtatgaagcagccaaatcatcgctggaggaagccgctgcagagaaagtgagaaagtacaaacacctggaaacggaagtaagacatctcacgaatgcaaaggacgttacttttgtgggctttcccctaggagcgcgggggaaatggcaccaagataactttaaacttttgactgagcttggcctctccaaatcgaggcaagtgaaaatggcagagactttttccacagtagcgctcttttcatctgtggacattgtacatatgtttgccagtagggccagaaaatctatggttggcggcagcggctctgagacacctggaacaagcgagagcgccaccccggaatccggcggctccggcatgctgaggcccgagatcagcagcaccagccccagcgcccccgccgtgagccccagcagcggcgagaccaggagcccccagggccccaggtacaacttcggcctgcaggagaccccccagagcaggcccagcgtgcaggtggtgagcgccagcacctgccccggcaccagcggcgccgccggcgacaggagcagcagcagcagcagcctgccctgccccgcccccaacagcaggcccgcccagggcagcatgtaaaccggtagacatgataagatacattgatgagtttggacaaaccacaactagaatgcagtgaaaaaaatgctttatttgtgaaatttgtgatgctattgctttatttgtaaccattataagctgcaataaacaagttaacaacaacaaaaaaaaaaaaaaaaaaaaaaaaaaaaaaacgttgactaaaaaaaaaaaaaaaaaaaaaaaaaaaaaaaaaaaaaaaaaaaaaaaaaaaaaaaaaaaaaaaaaaaaaa

SEQ ID NO: 10143 - DNA, 5419 bp, synthetic construct
  source 1..5419: mol_type = other DNA
ggtctagttacaactgggcatcgctgcagagatcgcacctcctcgtggtcccgctggtagcccttcgaagggtgactaagtcgatctctgccccaggtacggagccgttgggactcaccagtccaacgtaactcctgcctaaattcggtgaaacaaattcctcggtaaaaagccccatggcttcttgcccgaaacctggccccccggtttcagcaggggcaatgagtttggaaagtggactgaccacccactccgttctcgccatcgaacgtggtcccaattcgttggcaaattccggatcagactttgggggggggggtctggggctaccgttacgcctattgagggtatcggtcggcactcagacctcccgctccgactgggtagacctggtgtcctggagccacccaggacccacgtctaagtcccagcaggttgacctggtgtctttatttcctaaacaccgggttgacctgttatccaaaaacgaccaggtagacctggtggctcaatttttaccatctaaatttccccccaatttggcagaaaatgatttggctttgctggtgaacttagagttctacagatcggatttgcatgtgtatgagtgtgttcattttgctgcacattgggagggattaagtggtttgcctgaggtgtatgaacaacttgcaccacaaccgtgtgtgggagaaactttacattctagcctcccacgagacagtgaactgtttgtgcctgaagaggggagcagcgagaaggagagcgaggacgcgccaaaaacatctcctccgacgcctgggaaacatggtttggaacagactggggaggaaaaagtgatggtgactgttcctgacaaaaatccaccttgtccttgctgtggtacccgggtaaactctgtgttgaatctgattgaacatctgaaagtgtcacacgggaaaaggggggtttgttttcggtgtgcaaaatgtggaaaggaaaatagtaactatcacagtgttgtttgtcattttccaaaatgcaggggtccagagacggagaaagccccagctggggagtggatttgtgaggtatgcaacagagattttacaaccaaaattggcctgggacaacacaagagattggcacacccagcagtgagaaatcaggaaaggatcgttgcttcccaaccgaaagaaacatcaaatagaggtgctcacaaaaggtgctggacaaaggaggaggaagaattactaataagactggaggctcagttcgagggaaacaaaaatattaataagcttattgcagaacacataaccaccaaaacagctaagcagatcagtgacaaaaggcgattgctgtccagaaagccagcagaggagccacgtgaggagcctggaacgtgtcatcacaccaggagagcagctgcgagcctgagaacggagcctgagatgagtcatcacgcccaggcagaggacagagataatggacctgggagacgccctctgccaggcagggcagctgccggagggagaacaatggacgagataagacgccaccctgataagggcaacggacagcagagacccaccaagcaaaaatcagaagaacagctgcaggcttactataaaaagacactagaggaacgactttcagctggggcacttaacaccttcccccgagcattcaagcaggtaatggaaggccgggatataaagctagtaatcaatcagacagcgcaggactgcttcggatgcctggaatccataagccaaataagaacggcaacccgagataaaaaggacacggtgacccgggagaaacacccaaagaaaccttttcagaagtggatgaaggacagagcaatcaaaaaaggtaattatcttcggttccagcgtttattttatcttgatagagggaaactggctaaaatcattttagatgatattgaatgcttgtcttgtgacataccactcagtgaaatttattcggtttttaaaacaagatgggaaacaactggtagctttaaaagccttggggactttaaaacttacgggaaggctgacaacactgccttcagagaattaattacggctaaagaaattgagaaaaatgtgcaggaaatgagcaaaggctcggctcccggtccagacgggattactcttggggacgtcgtaaagatggatcccgagttttcccggaccatggagattttcaatttatggttaacaactggtaaaatcccggacatggtgagggggtgcagaaccgttttgattccaaaatcatcaaagccggatcgtttgaaagacattaataactggagacctatcacgatcggttccatcttgctgagactgttctccaggattgtaacagctaggctgagcaaagcgtgccccctgaacccaaggcaaagaggctttatcagagcggcgggatgctctgaaaacttaaaactcctgcaaactataatttggtcggccaaaagagaacacagaccactgggtgttgtattcgtggacatcgccaaggcttttgacaccgtaagccaccagcacatcattcatgctttgcagcaaagagaggtggatccccacatcgtcggtctggtgagcaatatgtacgagaacatcagtacgtatatcaccacaaagaggaacacacacacagacaaaatccagatccgggttggagtaaagcagggtgacccgatgtcgccccttttatttaacctggcaatggaccctctattatgcaagctggaagagagtggcaaaggataccaccgaggacagagcagcatcacagcgatggcatttgcagacgatctggttttgctgagcgactcctgggaaaatatgaatacaaatattagcatactggagaccttctgcaatctgaccggactcaaaacacaggggcaaaagtgccacggcttttacatcaagccgacaaaggactcttacaccatcaatgactgcgctgcctggactatcaacggcacacccctgaacatgatcgaccccggcgaatctgagaaatacctcggcctgcagtttgacccgtggattggaatagcaaggtccggtctctccacaaaactagatttttggcttcagcggatcgatcaagcaccacttaaacctctgcagaaaactgatattctcaaaacatacaccatccctcggctgatctacatagctgaccactcagaagtgaaaactgcactactcgaaacccttgaccagaagatccggacagcggtcaaggaatggcttcacctacctccgtgcacctgcgatgccatcctgtactcgagcacgagagacggcggtttgggcatcaccaaattggcaggactgatccccagcgtgcaggcccgtagactgcatcggatcgcacagtcatctgacgatacgatgaaatgcttcatggaaaaagagaaaatggaacagctgcataagaaattgtggattcaagctggaggggacagagagaacataccctcgatttgggaagcaccaccgtcgagtgaaccaccaaacaacgtgagcacaaattcggaatgggaagcaccgacccagaaagataaatttccaaagccttgcaattggaggaaaaacgaattcaaaaaatggaccaaattggcatcccaaggccgcggaattgtaaattttgaaagagacaaaattagtaaccattggatccaatactacagacgcatacctcacaggaaactcctcactgcactacaactcagggccaacgtttaccccacgagagaatttctagccaggggtagacaagaccaatacatcaaggcgtgtaggcactgcgatgcggacattgaatcctgcgcccacatcatcggcaactgcccagtgacacaggacgcccgaatcaagaggcacaattacatctgcgaactgcttctcgaggaggcgaagaagaaggactgggtagtgttcaaggaaccgcacataagggattccaacaaggaactgtacaaacctgacctgatatttgtgaaggatgcccgtgcacttgtcgtggatgtgacagtacggtatgaagcagccaaatcatcgctggaggaagccgctgcagagaaagtgagaaagtacaaacacctggaaacggaagtaagacatctcacgaatgcaaaggacgttacttttgtgggctttcccctaggagcgcgggggaaatggcaccaagataactttaaacttttgactgagcttggcctctccaaatcgaggcaagtgaaaatggcagagactttttccacagtagcgctcttttcatctgtggacattgtacatatgtttgccagtagggccagaaaatctatggttggcggcagcggctctgagacacctggaacaagcgagagcgccaccccggaatccggcggctccggcctggtggagcccgaggaggtggtggagatgagccacatgcccggcgacctgttcaacctgtacctgcaccagaactacatcgacttcttcatggagatcgacgacatcgtgagggccagcgagttcctgagcttcgccgacatcctgagcggcgactggaacaccaggagcctgctgagggagtacagcaccagcatcgccaccaggggcgtgatgcacagcaacaaggccaggggctacgcccactgccagggcggcggcagcagcttcaggcccctgcacaagccccagtggttcctgatcaacaagaagtacagggagaactgcctggccgccaaggccctgttccccgacttctgcctgcccgccctgtgcctgcagacccagctgctgccctacctggccctgctgaccatccccatgaggaaccaggcccagatcagcttcatccaggacatcggcaggctgcccctgaagaggcacttcggcaggctgaagatggaggccctgaccgacagggagcacggcatgatcgaccccgacagcggcgacgaggcccagctgaacggcggccacagcgccgaggagagcctgggcgagcccacccaggccaccgtgcccgagacctggagcctgcccctgagccagaacagcgccagcgagctgcccgccagccagccccagcccttcagcgcccagggcgacatggaggagaacatcatcatcgaggactacgagagcgacggcaccatgtaaaccggtagacatgataagatacattgatgagtttggacaaaccacaactagaatgcagtgaaaaaaatgctttatttgtgaaatttgtgatgctattgctttatttgtaaccattataagctgcaataaacaagttaacaacaacaaaaaaaaaaaaaaaaaaaaaaaaaaaaaaacgttgactaaaaaaaaaaaaaaaaaaaaaaaaaaaaaaaaaaaaaaaaaaaaaaaaaaaaaaaaaaaaaaaaaaaaaa

SEQ ID NO: 10144 - DNA, 4873 bp, synthetic construct
  source 1..4873: mol_type = other DNA
ggtctagttacaactgggcatcgctgcagagatcgcacctcctcgtggtcccgctggtagcccttcgaagggtgactaagtcgatctctgccccaggtacggagccgttgggactcaccagtccaacgtaactcctgcctaaattcggtgaaacaaattcctcggtaaaaagccccatggcttcttgcccgaaacctggccccccggtttcagcaggggcaatgagtttggaaagtggactgaccacccactccgttctcgccatcgaacgtggtcccaattcgttggcaaattccggatcagactttgggggggggggtctggggctaccgttacgcctattgagggtatcggtcggcactcagacctcccgctccgactgggtagacctggtgtcctggagccacccaggacccacgtctaagtcccagcaggttgacctggtgtctttatttcctaaacaccgggttgacctgttatccaaaaacgaccaggtagacctggtggctcaatttttaccatctaaatttccccccaatttggcagaaaatgatttggctttgctggtgaacttagagttctacagatcggatttgcatgtgtatgagtgtgttcattttgctgcacattgggagggattaagtggtttgcctgaggtgtatgaacaacttgcaccacaaccgtgtgtgggagaaactttacattctagcctcccacgagacagtgaactgtttgtgcctgaagaggggagcagcgagaaggagagcgaggacgcgccaaaaacatctcctccgacgcctgggaaacatggtttggaacagactggggaggaaaaagtgatggtgactgttcctgacaaaaatccaccttgtccttgctgtggtacccgggtaaactctgtgttgaatctgattgaacatctgaaagtgtcacacgggaaaaggggggtttgttttcggtgtgcaaaatgtggaaaggaaaatagtaactatcacagtgttgtttgtcattttccaaaatgcaggggtccagagacggagaaagccccagctggggagtggatttgtgaggtatgcaacagagattttacaaccaaaattggcctgggacaacacaagagattggcacacccagcagtgagaaatcaggaaaggatcgttgcttcccaaccgaaagaaacatcaaatagaggtgctcacaaaaggtgctggacaaaggaggaggaagaattactaataagactggaggctcagttcgagggaaacaaaaatattaataagcttattgcagaacacataaccaccaaaacagctaagcagatcagtgacaaaaggcgattgctgtccagaaagccagcagaggagccacgtgaggagcctggaacgtgtcatcacaccaggagagcagctgcgagcctgagaacggagcctgagatgagtcatcacgcccaggcagaggacagagataatggacctgggagacgccctctgccaggcagggcagctgccggagggagaacaatggacgagataagacgccaccctgataagggcaacggacagcagagacccaccaagcaaaaatcagaagaacagctgcaggcttactataaaaagacactagaggaacgactttcagctggggcacttaacaccttcccccgagcattcaagcaggtaatggaaggccgggatataaagctagtaatcaatcagacagcgcaggactgcttcggatgcctggaatccataagccaaataagaacggcaacccgagataaaaaggacacggtgacccgggagaaacacccaaagaaaccttttcagaagtggatgaaggacagagcaatcaaaaaaggtaattatcttcggttccagcgtttattttatcttgatagagggaaactggctaaaatcattttagatgatattgaatgcttgtcttgtgacataccactcagtgaaatttattcggtttttaaaacaagatgggaaacaactggtagctttaaaagccttggggactttaaaacttacgggaaggctgacaacactgccttcagagaattaattacggctaaagaaattgagaaaaatgtgcaggaaatgagcaaaggctcggctcccggtccagacgggattactcttggggacgtcgtaaagatggatcccgagttttcccggaccatggagattttcaatttatggttaacaactggtaaaatcccggacatggtgagggggtgcagaaccgttttgattccaaaatcatcaaagccggatcgtttgaaagacattaataactggagacctatcacgatcggttccatcttgctgagactgttctccaggattgtaacagctaggctgagcaaagcgtgccccctgaacccaaggcaaagaggctttatcagagcggcgggatgctctgaaaacttaaaactcctgcaaactataatttggtcggccaaaagagaacacagaccactgggtgttgtattcgtggacatcgccaaggcttttgacaccgtaagccaccagcacatcattcatgctttgcagcaaagagaggtggatccccacatcgtcggtctggtgagcaatatgtacgagaacatcagtacgtatatcaccacaaagaggaacacacacacagacaaaatccagatccgggttggagtaaagcagggtgacccgatgtcgccccttttatttaacctggcaatggaccctctattatgcaagctggaagagagtggcaaaggataccaccgaggacagagcagcatcacagcgatggcatttgcagacgatctggttttgctgagcgactcctgggaaaatatgaatacaaatattagcatactggagaccttctgcaatctgaccggactcaaaacacaggggcaaaagtgccacggcttttacatcaagccgacaaaggactcttacaccatcaatgactgcgctgcctggactatcaacggcacacccctgaacatgatcgaccccggcgaatctgagaaatacctcggcctgcagtttgacccgtggattggaatagcaaggtccggtctctccacaaaactagatttttggcttcagcggatcgatcaagcaccacttaaacctctgcagaaaactgatattctcaaaacatacaccatccctcggctgatctacatagctgaccactcagaagtgaaaactgcactactcgaaacccttgaccagaagatccggacagcggtcaaggaatggcttcacctacctccgtgcacctgcgatgccatcctgtactcgagcacgagagacggcggtttgggcatcaccaaattggcaggactgatccccagcgtgcaggcccgtagactgcatcggatcgcacagtcatctgacgatacgatgaaatgcttcatggaaaaagagaaaatggaacagctgcataagaaattgtggattcaagctggaggggacagagagaacataccctcgatttgggaagcaccaccgtcgagtgaaccaccaaacaacgtgagcacaaattcggaatgggaagcaccgacccagaaagataaatttccaaagccttgcaattggaggaaaaacgaattcaaaaaatggaccaaattggcatcccaaggccgcggaattgtaaattttgaaagagacaaaattagtaaccattggatccaatactacagacgcatacctcacaggaaactcctcactgcactacaactcagggccaacgtttaccccacgagagaatttctagccaggggtagacaagaccaatacatcaaggcgtgtaggcactgcgatgcggacattgaatcctgcgcccacatcatcggcaactgcccagtgacacaggacgcccgaatcaagaggcacaattacatctgcgaactgcttctcgaggaggcgaagaagaaggactgggtagtgttcaaggaaccgcacataagggattccaacaaggaactgtacaaacctgacctgatatttgtgaaggatgcccgtgcacttgtcgtggatgtgacagtacggtatgaagcagccaaatcatcgctggaggaagccgctgcagagaaagtgagaaagtacaaacacctggaaacggaagtaagacatctcacgaatgcaaaggacgttacttttgtgggctttcccctaggagcgcgggggaaatggcaccaagataactttaaacttttgactgagcttggcctctccaaatcgaggcaagtgaaaatggcagagactttttccacagtagcgctcttttcatctgtggacattgtacatatgtttgccagtagggccagaaaatctatggttggcggcagcggctctgagacacctggaacaagcgagagcgccaccccggaatccggcggctccggctggagcgtggaggccgtggtgctgttcctgaagcagaccgaccccctggccctgtgccccctggtggacctgttcaggagccacgagatcgacggcaaggccctgctgctgctgaccagcgacgtgctgctgaagcacctgggcgtgaagctgggcaccgccgtgaagctgtgctactacatcgacaggctgaagcagggcaagatgtaaaccggtagacatgataagatacattgatgagtttggacaaaccacaactagaatgcagtgaaaaaaatgctttatttgtgaaatttgtgatgctattgctttatttgtaaccattataagctgcaataaacaagttaacaacaacaaaaaaaaaaaaaaaaaaaaaaaaaaaaaaacgttgactaaaaaaaaaaaaaaaaaaaaaaaaaaaaaaaaaaaaaaaaaaaaaaaaaaaaaaaaaaaaaaaaaaaaaa

SEQ ID NO: 10145 - DNA, 4861 bp, synthetic construct
  source 1..4861: mol_type = other DNA
ggtctagttacaactgggcatcgctgcagagatcgcacctcctcgtggtcccgctggtagcccttcgaagggtgactaagtcgatctctgccccaggtacggagccgttgggactcaccagtccaacgtaactcctgcctaaattcggtgaaacaaattcctcggtaaaaagccccatggcttcttgcccgaaacctggccccccggtttcagcaggggcaatgagtttggaaagtggactgaccacccactccgttctcgccatcgaacgtggtcccaattcgttggcaaattccggatcagactttgggggggggggtctggggctaccgttacgcctattgagggtatcggtcggcactcagacctcccgctccgactgggtagacctggtgtcctggagccacccaggacccacgtctaagtcccagcaggttgacctggtgtctttatttcctaaacaccgggttgacctgttatccaaaaacgaccaggtagacctggtggctcaatttttaccatctaaatttccccccaatttggcagaaaatgatttggctttgctggtgaacttagagttctacagatcggatttgcatgtgtatgagtgtgttcattttgctgcacattgggagggattaagtggtttgcctgaggtgtatgaacaacttgcaccacaaccgtgtgtgggagaaactttacattctagcctcccacgagacagtgaactgtttgtgcctgaagaggggagcagcgagaaggagagcgaggacgcgccaaaaacatctcctccgacgcctgggaaacatggtttggaacagactggggaggaaaaagtgatggtgactgttcctgacaaaaatccaccttgtccttgctgtggtacccgggtaaactctgtgttgaatctgattgaacatctgaaagtgtcacacgggaaaaggggggtttgttttcggtgtgcaaaatgtggaaaggaaaatagtaactatcacagtgttgtttgtcattttccaaaatgcaggggtccagagacggagaaagccccagctggggagtggatttgtgaggtatgcaacagagattttacaaccaaaattggcctgggacaacacaagagattggcacacccagcagtgagaaatcaggaaaggatcgttgcttcccaaccgaaagaaacatcaaatagaggtgctcacaaaaggtgctggacaaaggaggaggaagaattactaataagactggaggctcagttcgagggaaacaaaaatattaataagcttattgcagaacacataaccaccaaaacagctaagcagatcagtgacaaaaggcgattgctgtccagaaagccagcagaggagccacgtgaggagcctggaacgtgtcatcacaccaggagagcagctgcgagcctgagaacggagcctgagatgagtcatcacgcccaggcagaggacagagataatggacctgggagacgccctctgccaggcagggcagctgccggagggagaacaatggacgagataagacgccaccctgataagggcaacggacagcagagacccaccaagcaaaaatcagaagaacagctgcaggcttactataaaaagacactagaggaacgactttcagctggggcacttaacaccttcccccgagcattcaagcaggtaatggaaggccgggatataaagctagtaatcaatcagacagcgcaggactgcttcggatgcctggaatccataagccaaataagaacggcaacccgagataaaaaggacacggtgacccgggagaaacacccaaagaaaccttttcagaagtggatgaaggacagagcaatcaaaaaaggtaattatcttcggttccagcgtttattttatcttgatagagggaaactggctaaaatcattttagatgatattgaatgcttgtcttgtgacataccactcagtgaaatttattcggtttttaaaacaagatgggaaacaactggtagctttaaaagccttggggactttaaaacttacgggaaggctgacaacactgccttcagagaattaattacggctaaagaaattgagaaaaatgtgcaggaaatgagcaaaggctcggctcccggtccagacgggattactcttggggacgtcgtaaagatggatcccgagttttcccggaccatggagattttcaatttatggttaacaactggtaaaatcccggacatggtgagggggtgcagaaccgttttgattccaaaatcatcaaagccggatcgtttgaaagacattaataactggagacctatcacgatcggttccatcttgctgagactgttctccaggattgtaacagctaggctgagcaaagcgtgccccctgaacccaaggcaaagaggctttatcagagcggcgggatgctctgaaaacttaaaactcctgcaaactataatttggtcggccaaaagagaacacagaccactgggtgttgtattcgtggacatcgccaaggcttttgacaccgtaagccaccagcacatcattcatgctttgcagcaaagagaggtggatccccacatcgtcggtctggtgagcaatatgtacgagaacatcagtacgtatatcaccacaaagaggaacacacacacagacaaaatccagatccgggttggagtaaagcagggtgacccgatgtcgccccttttatttaacctggcaatggaccctctattatgcaagctggaagagagtggcaaaggataccaccgaggacagagcagcatcacagcgatggcatttgcagacgatctggttttgctgagcgactcctgggaaaatatgaatacaaatattagcatactggagaccttctgcaatctgaccggactcaaaacacaggggcaaaagtgccacggcttttacatcaagccgacaaaggactcttacaccatcaatgactgcgctgcctggactatcaacggcacacccctgaacatgatcgaccccggcgaatctgagaaatacctcggcctgcagtttgacccgtggattggaatagcaaggtccggtctctccacaaaactagatttttggcttcagcggatcgatcaagcaccacttaaacctctgcagaaaactgatattctcaaaacatacaccatccctcggctgatctacatagctgaccactcagaagtgaaaactgcactactcgaaacccttgaccagaagatccggacagcggtcaaggaatggcttcacctacctccgtgcacctgcgatgccatcctgtactcgagcacgagagacggcggtttgggcatcaccaaattggcaggactgatccccagcgtgcaggcccgtagactgcatcggatcgcacagtcatctgacgatacgatgaaatgcttcatggaaaaagagaaaatggaacagctgcataagaaattgtggattcaagctggaggggacagagagaacataccctcgatttgggaagcaccaccgtcgagtgaaccaccaaacaacgtgagcacaaattcggaatgggaagcaccgacccagaaagataaatttccaaagccttgcaattggaggaaaaacgaattcaaaaaatggaccaaattggcatcccaaggccgcggaattgtaaattttgaaagagacaaaattagtaaccattggatccaatactacagacgcatacctcacaggaaactcctcactgcactacaactcagggccaacgtttaccccacgagagaatttctagccaggggtagacaagaccaatacatcaaggcgtgtaggcactgcgatgcggacattgaatcctgcgcccacatcatcggcaactgcccagtgacacaggacgcccgaatcaagaggcacaattacatctgcgaactgcttctcgaggaggcgaagaagaaggactgggtagtgttcaaggaaccgcacataagggattccaacaaggaactgtacaaacctgacctgatatttgtgaaggatgcccgtgcacttgtcgtggatgtgacagtacggtatgaagcagccaaatcatcgctggaggaagccgctgcagagaaagtgagaaagtacaaacacctggaaacggaagtaagacatctcacgaatgcaaaggacgttacttttgtgggctttcccctaggagcgcgggggaaatggcaccaagataactttaaacttttgactgagcttggcctctccaaatcgaggcaagtgaaaatggcagagactttttccacagtagcgctcttttcatctgtggacattgtacatatgtttgccagtagggccagaaaatctatggttggcggcagcggctctgagacacctggaacaagcgagagcgccaccccggaatccggcggctccggcatggtgaggaggttcctggtgaccctgaggatcaggagggcctgcggcccccccagggtgagggtgttcgtggtgcacatccccaggctgaccggcgagtgggccgcccccggcgcccccgccgccgtggccctggtgctgatgctgctgaggagccagaggctgggccagcagcccctgcccaggaggcccatgtaaaccggtagacatgataagatacattgatgagtttggacaaaccacaactagaatgcagtgaaaaaaatgctttatttgtgaaatttgtgatgctattgctttatttgtaaccattataagctgcaataaacaagttaacaacaacaaaaaaaaaaaaaaaaaaaaaaaaaaaaaaacgttgactaaaaaaaaaaaaaaaaaaaaaaaaaaaaaaaaaaaaaaaaaaaaaaaaaaaaaaaaaaaaaaaaaaaaaa

SEQ ID NO: 10146 - DNA, 4816 bp, synthetic construct
  source 1..4816: mol_type = other DNA
ggtctagttacaactgggcatcgctgcagagatcgcacctcctcgtggtcccgctggtagcccttcgaagggtgactaagtcgatctctgccccaggtacggagccgttgggactcaccagtccaacgtaactcctgcctaaattcggtgaaacaaattcctcggtaaaaagccccatggcttcttgcccgaaacctggccccccggtttcagcaggggcaatgagtttggaaagtggactgaccacccactccgttctcgccatcgaacgtggtcccaattcgttggcaaattccggatcagactttgggggggggggtctggggctaccgttacgcctattgagggtatcggtcggcactcagacctcccgctccgactgggtagacctggtgtcctggagccacccaggacccacgtctaagtcccagcaggttgacctggtgtctttatttcctaaacaccgggttgacctgttatccaaaaacgaccaggtagacctggtggctcaatttttaccatctaaatttccccccaatttggcagaaaatgatttggctttgctggtgaacttagagttctacagatcggatttgcatgtgtatgagtgtgttcattttgctgcacattgggagggattaagtggtttgcctgaggtgtatgaacaacttgcaccacaaccgtgtgtgggagaaactttacattctagcctcccacgagacagtgaactgtttgtgcctgaagaggggagcagcgagaaggagagcgaggacgcgccaaaaacatctcctccgacgcctgggaaacatggtttggaacagactggggaggaaaaagtgatggtgactgttcctgacaaaaatccaccttgtccttgctgtggtacccgggtaaactctgtgttgaatctgattgaacatctgaaagtgtcacacgggaaaaggggggtttgttttcggtgtgcaaaatgtggaaaggaaaatagtaactatcacagtgttgtttgtcattttccaaaatgcaggggtccagagacggagaaagccccagctggggagtggatttgtgaggtatgcaacagagattttacaaccaaaattggcctgggacaacacaagagattggcacacccagcagtgagaaatcaggaaaggatcgttgcttcccaaccgaaagaaacatcaaatagaggtgctcacaaaaggtgctggacaaaggaggaggaagaattactaataagactggaggctcagttcgagggaaacaaaaatattaataagcttattgcagaacacataaccaccaaaacagctaagcagatcagtgacaaaaggcgattgctgtccagaaagccagcagaggagccacgtgaggagcctggaacgtgtcatcacaccaggagagcagctgcgagcctgagaacggagcctgagatgagtcatcacgcccaggcagaggacagagataatggacctgggagacgccctctgccaggcagggcagctgccggagggagaacaatggacgagataagacgccaccctgataagggcaacggacagcagagacccaccaagcaaaaatcagaagaacagctgcaggcttactataaaaagacactagaggaacgactttcagctggggcacttaacaccttcccccgagcattcaagcaggtaatggaaggccgggatataaagctagtaatcaatcagacagcgcaggactgcttcggatgcctggaatccataagccaaataagaacggcaacccgagataaaaaggacacggtgacccgggagaaacacccaaagaaaccttttcagaagtggatgaaggacagagcaatcaaaaaaggtaattatcttcggttccagcgtttattttatcttgatagagggaaactggctaaaatcattttagatgatattgaatgcttgtcttgtgacataccactcagtgaaatttattcggtttttaaaacaagatgggaaacaactggtagctttaaaagccttggggactttaaaacttacgggaaggctgacaacactgccttcagagaattaattacggctaaagaaattgagaaaaatgtgcaggaaatgagcaaaggctcggctcccggtccagacgggattactcttggggacgtcgtaaagatggatcccgagttttcccggaccatggagattttcaatttatggttaacaactggtaaaatcccggacatggtgagggggtgcagaaccgttttgattccaaaatcatcaaagccggatcgtttgaaagacattaataactggagacctatcacgatcggttccatcttgctgagactgttctccaggattgtaacagctaggctgagcaaagcgtgccccctgaacccaaggcaaagaggctttatcagagcggcgggatgctctgaaaacttaaaactcctgcaaactataatttggtcggccaaaagagaacacagaccactgggtgttgtattcgtggacatcgccaaggcttttgacaccgtaagccaccagcacatcattcatgctttgcagcaaagagaggtggatccccacatcgtcggtctggtgagcaatatgtacgagaacatcagtacgtatatcaccacaaagaggaacacacacacagacaaaatccagatccgggttggagtaaagcagggtgacccgatgtcgccccttttatttaacctggcaatggaccctctattatgcaagctggaagagagtggcaaaggataccaccgaggacagagcagcatcacagcgatggcatttgcagacgatctggttttgctgagcgactcctgggaaaatatgaatacaaatattagcatactggagaccttctgcaatctgaccggactcaaaacacaggggcaaaagtgccacggcttttacatcaagccgacaaaggactcttacaccatcaatgactgcgctgcctggactatcaacggcacacccctgaacatgatcgaccccggcgaatctgagaaatacctcggcctgcagtttgacccgtggattggaatagcaaggtccggtctctccacaaaactagatttttggcttcagcggatcgatcaagcaccacttaaacctctgcagaaaactgatattctcaaaacatacaccatccctcggctgatctacatagctgaccactcagaagtgaaaactgcactactcgaaacccttgaccagaagatccggacagcggtcaaggaatggcttcacctacctccgtgcacctgcgatgccatcctgtactcgagcacgagagacggcggtttgggcatcaccaaattggcaggactgatccccagcgtgcaggcccgtagactgcatcggatcgcacagtcatctgacgatacgatgaaatgcttcatggaaaaagagaaaatggaacagctgcataagaaattgtggattcaagctggaggggacagagagaacataccctcgatttgggaagcaccaccgtcgagtgaaccaccaaacaacgtgagcacaaattcggaatgggaagcaccgacccagaaagataaatttccaaagccttgcaattggaggaaaaacgaattcaaaaaatggaccaaattggcatcccaaggccgcggaattgtaaattttgaaagagacaaaattagtaaccattggatccaatactacagacgcatacctcacaggaaactcctcactgcactacaactcagggccaacgtttaccccacgagagaatttctagccaggggtagacaagaccaatacatcaaggcgtgtaggcactgcgatgcggacattgaatcctgcgcccacatcatcggcaactgcccagtgacacaggacgcccgaatcaagaggcacaattacatctgcgaactgcttctcgaggaggcgaagaagaaggactgggtagtgttcaaggaaccgcacataagggattccaacaaggaactgtacaaacctgacctgatatttgtgaaggatgcccgtgcacttgtcgtggatgtgacagtacggtatgaagcagccaaatcatcgctggaggaagccgctgcagagaaagtgagaaagtacaaacacctggaaacggaagtaagacatctcacgaatgcaaaggacgttacttttgtgggctttcccctaggagcgcgggggaaatggcaccaagataactttaaacttttgactgagcttggcctctccaaatcgaggcaagtgaaaatggcagagactttttccacagtagcgctcttttcatctgtggacattgtacatatgtttgccagtagggccagaaaatctatggttggcggcagcggctctgagacacctggaacaagcgagagcgccaccccggaatccggcggctccggcatgctggaggagctggagtgcggcgcccccggcgccaggggcgccgccaccgccatggactgcaaggacaggcccgccttccccgtgaagaagctgatccaggccaggctgcccttcaagaggctgaacctggtgcccaagggcaagatgtaaaccggtagacatgataagatacattgatgagtttggacaaaccacaactagaatgcagtgaaaaaaatgctttatttgtgaaatttgtgatgctattgctttatttgtaaccattataagctgcaataaacaagttaacaacaacaaaaaaaaaaaaaaaaaaaaaaaaaaaaaaacgttgactaaaaaaaaaaaaaaaaaaaaaaaaaaaaaaaaaaaaaaaaaaaaaaaaaaaaaaaaaaaaaaaaaaaaaa

SEQ ID NO: 10147 - DNA, 5512 bp, synthetic construct
  source 1..5512: mol_type = other DNA
ggtctagttacaactgggcatcgctgcagagatcgcacctcctcgtggtcccgctggtagcccttcgaagggtgactaagtcgatctctgccccaggtacggagccgttgggactcaccagtccaacgtaaatgaaccagatcgtgaagttcaccgacgattcggggctggccgtgcaagtcacccccgacgacgtgcgccgctacatctgcgagaacgcgaccgagaaggaggtgggcctgttcctgcagctgtgtcagacgcagcgcctaaaccccttcgtcaaggacgcctacctcgtgaagtacggcggcgcgcccgcgagcatgatcaccagctaccaggtgttcaaccgccgcgcgtgcagggacgccaactacgacggcatcaagagcggcgtcgtggtcctgcgagacggcgacgtggtgcacaagcgcggggccgcctgctacaagaaggcgggcgaggagctcatcggcggatgggcggaggtccgcttcaaggacggccgcgagaccgcctacgcggaggtcgcgctggacgactacagcaccggcaagagcaactgggccaagatgcccggcgtgatgatcgagaagtgcgccaaagccgcggcgtggcgcctcgccttccccgacacgttccagggcatgtacgccgccgaggagatggaccaagcgcagcagcccgagcaggtgcgggcgcaggcggagcagccggtggacctgcagcccatacgcgagctgttcaagccgtactgcgagcacttcggaatcacgcctgccgagggcatgaccgccgtgtgcggtgccgtgggggccgagggcatgcactccatgaccgagcagcaggcgcgccgcgcccgcgcctggatggaggaggagatggccgcgcctgcggtcgaggccgaatacgaggtcgttgacgagggcgaggtgttctctggaggatctagcggaggatcctctggcagcgagacaccaggaacaagcgagtcagcaacaccagagagcagtggcggcagcagcggcggcagcagcctcctgcctaaattcggtgaaacaaattcctcggtaaaaagccccatggcttcttgcccgaaacctggccccccggtttcagcaggggcaatgagtttggaaagtggactgaccacccactccgttctcgccatcgaacgtggtcccaattcgttggcaaattccggatcagactttgggggggggggtctggggctaccgttacgcctattgagggtatcggtcggcactcagacctcccgctccgactgggtagacctggtgtcctggagccacccaggacccacgtctaagtcccagcaggttgacctggtgtctttatttcctaaacaccgggttgacctgttatccaaaaacgaccaggtagacctggtggctcaatttttaccatctaaatttccccccaatttggcagaaaatgatttggctttgctggtgaacttagagttctacagatcggatttgcatgtgtatgagtgtgttcattttgctgcacattgggagggattaagtggtttgcctgaggtgtatgaacaacttgcaccacaaccgtgtgtgggagaaactttacattctagcctcccacgagacagtgaactgtttgtgcctgaagaggggagcagcgagaaggagagcgaggacgcgccaaaaacatctcctccgacgcctgggaaacatggtttggaacagactggggaggaaaaagtgatggtgactgttcctgacaaaaatccaccttgtccttgctgtggtacccgggtaaactctgtgttgaatctgattgaacatctgaaagtgtcacacgggaaaaggggggtttgttttcggtgtgcaaaatgtggaaaggaaaatagtaactatcacagtgttgtttgtcattttccaaaatgcaggggtccagagacggagaaagccccagctggggagtggatttgtgaggtatgcaacagagattttacaaccaaaattggcctgggacaacacaagagattggcacacccagcagtgagaaatcaggaaaggatcgttgcttcccaaccgaaagaaacatcaaatagaggtgctcacaaaaggtgctggacaaaggaggaggaagaattactaataagactggaggctcagttcgagggaaacaaaaatattaataagcttattgcagaacacataaccaccaaaacagctaagcagatcagtgacaaaaggcgattgctgtccagaaagccagcagaggagccacgtgaggagcctggaacgtgtcatcacaccaggagagcagctgcgagcctgagaacggagcctgagatgagtcatcacgcccaggcagaggacagagataatggacctgggagacgccctctgccaggcagggcagctgccggagggagaacaatggacgagataagacgccaccctgataagggcaacggacagcagagacccaccaagcaaaaatcagaagaacagctgcaggcttactataaaaagacactagaggaacgactttcagctggggcacttaacaccttcccccgagcattcaagcaggtaatggaaggccgggatataaagctagtaatcaatcagacagcgcaggactgcttcggatgcctggaatccataagccaaataagaacggcaacccgagataaaaaggacacggtgacccgggagaaacacccaaagaaaccttttcagaagtggatgaaggacagagcaatcaaaaaaggtaattatcttcggttccagcgtttattttatcttgatagagggaaactggctaaaatcattttagatgatattgaatgcttgtcttgtgacataccactcagtgaaatttattcggtttttaaaacaagatgggaaacaactggtagctttaaaagccttggggactttaaaacttacgggaaggctgacaacactgccttcagagaattaattacggctaaagaaattgagaaaaatgtgcaggaaatgagcaaaggctcggctcccggtccagacgggattactcttggggacgtcgtaaagatggatcccgagttttcccggaccatggagattttcaatttatggttaacaactggtaaaatcccggacatggtgagggggtgcagaaccgttttgattccaaaatcatcaaagccggatcgtttgaaagacattaataactggagacctatcacgatcggttccatcttgctgagactgttctccaggattgtaacagctaggctgagcaaagcgtgccccctgaacccaaggcaaagaggctttatcagagcggcgggatgctctgaaaacttaaaactcctgcaaactataatttggtcggccaaaagagaacacagaccactgggtgttgtattcgtggacatcgccaaggcttttgacaccgtaagccaccagcacatcattcatgctttgcagcaaagagaggtggatccccacatcgtcggtctggtgagcaatatgtacgagaacatcagtacgtatatcaccacaaagaggaacacacacacagacaaaatccagatccgggttggagtaaagcagggtgacccgatgtcgccccttttatttaacctggcaatggaccctctattatgcaagctggaagagagtggcaaaggataccaccgaggacagagcagcatcacagcgatggcatttgcagacgatctggttttgctgagcgactcctgggaaaatatgaatacaaatattagcatactggagaccttctgcaatctgaccggactcaaaacacaggggcaaaagtgccacggcttttacatcaagccgacaaaggactcttacaccatcaatgactgcgctgcctggactatcaacggcacacccctgaacatgatcgaccccggcgaatctgagaaatacctcggcctgcagtttgacccgtggattggaatagcaaggtccggtctctccacaaaactagatttttggcttcagcggatcgatcaagcaccacttaaacctctgcagaaaactgatattctcaaaacatacaccatccctcggctgatctacatagctgaccactcagaagtgaaaactgcactactcgaaacccttgaccagaagatccggacagcggtcaaggaatggcttcacctacctccgtgcacctgcgatgccatcctgtactcgagcacgagagacggcggtttgggcatcaccaaattggcaggactgatccccagcgtgcaggcccgtagactgcatcggatcgcacagtcatctgacgatacgatgaaatgcttcatggaaaaagagaaaatggaacagctgcataagaaattgtggattcaagctggaggggacagagagaacataccctcgatttgggaagcaccaccgtcgagtgaaccaccaaacaacgtgagcacaaattcggaatgggaagcaccgacccagaaagataaatttccaaagccttgcaattggaggaaaaacgaattcaaaaaatggaccaaattggcatcccaaggccgcggaattgtaaattttgaaagagacaaaattagtaaccattggatccaatactacagacgcatacctcacaggaaactcctcactgcactacaactcagggccaacgtttaccccacgagagaatttctagccaggggtagacaagaccaatacatcaaggcgtgtaggcactgcgatgcggacattgaatcctgcgcccacatcatcggcaactgcccagtgacacaggacgcccgaatcaagaggcacaattacatctgcgaactgcttctcgaggaggcgaagaagaaggactgggtagtgttcaaggaaccgcacataagggattccaacaaggaactgtacaaacctgacctgatatttgtgaaggatgcccgtgcacttgtcgtggatgtgacagtacggtatgaagcagccaaatcatcgctggaggaagccgctgcagagaaagtgagaaagtacaaacacctggaaacggaagtaagacatctcacgaatgcaaaggacgttacttttgtgggctttcccctaggagcgcgggggaaatggcaccaagataactttaaacttttgactgagcttggcctctccaaatcgaggcaagtgaaaatggcagagactttttccacagtagcgctcttttcatctgtggacattgtacatatgtttgccagtagggccagaaaatctatggttatgtaaaccggtagacatgataagatacattgatgagtttggacaaaccacaactagaatgcagtgaaaaaaatgctttatttgtgaaatttgtgatgctattgctttatttgtaaccattataagctgcaataaacaagttaacaacaacaaaaaaaaaaaaaaaaaaaaaaaaaaaaaaacgttgactaaaaaaaaaaaaaaaaaaaaaaaaaaaaaaaaaaaaaaaaaaaaaaaaaaaaaaaaaaaaaaaaaaaaaa

SEQ ID NO: 10148 - DNA, 5446 bp, synthetic construct
  source 1..5446: mol_type = other DNA
ggtctagttacaactgggcatcgctgcagagatcgcacctcctcgtggtcccgctggtagcccttcgaagggtgactaagtcgatctctgccccaggtacggagccgttgggactcaccagtccaacgtaaatgggaactgcactaacaccgctcctgacgaagttcgccacgcgctacgagatgggtaccacgcctgaagaagtggcgaacacgctcaagcagacctgtttcaagggccaggtcaatgattcgcagatggtcgccctgctgatcgtggcagaccagtacaagcttaaccccttcaccaaggagttgtacgcattccccgacaagaacaacggcatcgtgccggttgttggtgtggatggctgggctcggatcatcaacgagaacccacagttcgatggcatggaattctcaatggaccagcagggaaccgaatgcacctgcaagatctatcggaaggaccgcagccatgccatcagcgcgactgagtacatggccgagtgcaagcggaacacccagccttggcagtcccatccgcgccggatgcttcgccacaaggcaatgatccagtgcgcacgcctcgcgttcgggttcgccggcatatacgaccaggacgaggccgagcggatcgttgaacgagacgtcactcccgcagagcagtacgaggacgtcagcgaggcgatctgcctgatcaaggactccccaacaatggaggacttgcaggcagcattcagcaatgcctggaaagcctataagacaaagggcgcgcgcgaccagcttacggcggccaaggaccagcggaagaaagaattgctggacgcccctatagacgttgaattcgaggagaccggcgatgatcgagcagcgtctggaggatctagcggaggatcctctggcagcgagacaccaggaacaagcgagtcagcaacaccagagagcagtggcggcagcagcggcggcagcagcctcctgcctaaattcggtgaaacaaattcctcggtaaaaagccccatggcttcttgcccgaaacctggccccccggtttcagcaggggcaatgagtttggaaagtggactgaccacccactccgttctcgccatcgaacgtggtcccaattcgttggcaaattccggatcagactttgggggggggggtctggggctaccgttacgcctattgagggtatcggtcggcactcagacctcccgctccgactgggtagacctggtgtcctggagccacccaggacccacgtctaagtcccagcaggttgacctggtgtctttatttcctaaacaccgggttgacctgttatccaaaaacgaccaggtagacctggtggctcaatttttaccatctaaatttccccccaatttggcagaaaatgatttggctttgctggtgaacttagagttctacagatcggatttgcatgtgtatgagtgtgttcattttgctgcacattgggagggattaagtggtttgcctgaggtgtatgaacaacttgcaccacaaccgtgtgtgggagaaactttacattctagcctcccacgagacagtgaactgtttgtgcctgaagaggggagcagcgagaaggagagcgaggacgcgccaaaaacatctcctccgacgcctgggaaacatggtttggaacagactggggaggaaaaagtgatggtgactgttcctgacaaaaatccaccttgtccttgctgtggtacccgggtaaactctgtgttgaatctgattgaacatctgaaagtgtcacacgggaaaaggggggtttgttttcggtgtgcaaaatgtggaaaggaaaatagtaactatcacagtgttgtttgtcattttccaaaatgcaggggtccagagacggagaaagccccagctggggagtggatttgtgaggtatgcaacagagattttacaaccaaaattggcctgggacaacacaagagattggcacacccagcagtgagaaatcaggaaaggatcgttgcttcccaaccgaaagaaacatcaaatagaggtgctcacaaaaggtgctggacaaaggaggaggaagaattactaataagactggaggctcagttcgagggaaacaaaaatattaataagcttattgcagaacacataaccaccaaaacagctaagcagatcagtgacaaaaggcgattgctgtccagaaagccagcagaggagccacgtgaggagcctggaacgtgtcatcacaccaggagagcagctgcgagcctgagaacggagcctgagatgagtcatcacgcccaggcagaggacagagataatggacctgggagacgccctctgccaggcagggcagctgccggagggagaacaatggacgagataagacgccaccctgataagggcaacggacagcagagacccaccaagcaaaaatcagaagaacagctgcaggcttactataaaaagacactagaggaacgactttcagctggggcacttaacaccttcccccgagcattcaagcaggtaatggaaggccgggatataaagctagtaatcaatcagacagcgcaggactgcttcggatgcctggaatccataagccaaataagaacggcaacccgagataaaaaggacacggtgacccgggagaaacacccaaagaaaccttttcagaagtggatgaaggacagagcaatcaaaaaaggtaattatcttcggttccagcgtttattttatcttgatagagggaaactggctaaaatcattttagatgatattgaatgcttgtcttgtgacataccactcagtgaaatttattcggtttttaaaacaagatgggaaacaactggtagctttaaaagccttggggactttaaaacttacgggaaggctgacaacactgccttcagagaattaattacggctaaagaaattgagaaaaatgtgcaggaaatgagcaaaggctcggctcccggtccagacgggattactcttggggacgtcgtaaagatggatcccgagttttcccggaccatggagattttcaatttatggttaacaactggtaaaatcccggacatggtgagggggtgcagaaccgttttgattccaaaatcatcaaagccggatcgtttgaaagacattaataactggagacctatcacgatcggttccatcttgctgagactgttctccaggattgtaacagctaggctgagcaaagcgtgccccctgaacccaaggcaaagaggctttatcagagcggcgggatgctctgaaaacttaaaactcctgcaaactataatttggtcggccaaaagagaacacagaccactgggtgttgtattcgtggacatcgccaaggcttttgacaccgtaagccaccagcacatcattcatgctttgcagcaaagagaggtggatccccacatcgtcggtctggtgagcaatatgtacgagaacatcagtacgtatatcaccacaaagaggaacacacacacagacaaaatccagatccgggttggagtaaagcagggtgacccgatgtcgccccttttatttaacctggcaatggaccctctattatgcaagctggaagagagtggcaaaggataccaccgaggacagagcagcatcacagcgatggcatttgcagacgatctggttttgctgagcgactcctgggaaaatatgaatacaaatattagcatactggagaccttctgcaatctgaccggactcaaaacacaggggcaaaagtgccacggcttttacatcaagccgacaaaggactcttacaccatcaatgactgcgctgcctggactatcaacggcacacccctgaacatgatcgaccccggcgaatctgagaaatacctcggcctgcagtttgacccgtggattggaatagcaaggtccggtctctccacaaaactagatttttggcttcagcggatcgatcaagcaccacttaaacctctgcagaaaactgatattctcaaaacatacaccatccctcggctgatctacatagctgaccactcagaagtgaaaactgcactactcgaaacccttgaccagaagatccggacagcggtcaaggaatggcttcacctacctccgtgcacctgcgatgccatcctgtactcgagcacgagagacggcggtttgggcatcaccaaattggcaggactgatccccagcgtgcaggcccgtagactgcatcggatcgcacagtcatctgacgatacgatgaaatgcttcatggaaaaagagaaaatggaacagctgcataagaaattgtggattcaagctggaggggacagagagaacataccctcgatttgggaagcaccaccgtcgagtgaaccaccaaacaacgtgagcacaaattcggaatgggaagcaccgacccagaaagataaatttccaaagccttgcaattggaggaaaaacgaattcaaaaaatggaccaaattggcatcccaaggccgcggaattgtaaattttgaaagagacaaaattagtaaccattggatccaatactacagacgcatacctcacaggaaactcctcactgcactacaactcagggccaacgtttaccccacgagagaatttctagccaggggtagacaagaccaatacatcaaggcgtgtaggcactgcgatgcggacattgaatcctgcgcccacatcatcggcaactgcccagtgacacaggacgcccgaatcaagaggcacaattacatctgcgaactgcttctcgaggaggcgaagaagaaggactgggtagtgttcaaggaaccgcacataagggattccaacaaggaactgtacaaacctgacctgatatttgtgaaggatgcccgtgcacttgtcgtggatgtgacagtacggtatgaagcagccaaatcatcgctggaggaagccgctgcagagaaagtgagaaagtacaaacacctggaaacggaagtaagacatctcacgaatgcaaaggacgttacttttgtgggctttcccctaggagcgcgggggaaatggcaccaagataactttaaacttttgactgagcttggcctctccaaatcgaggcaagtgaaaatggcagagactttttccacagtagcgctcttttcatctgtggacattgtacatatgtttgccagtagggccagaaaatctatggttatgtaaaccggtagacatgataagatacattgatgagtttggacaaaccacaactagaatgcagtgaaaaaaatgctttatttgtgaaatttgtgatgctattgctttatttgtaaccattataagctgcaataaacaagttaacaacaacaaaaaaaaaaaaaaaaaaaaaaaaaaaaaaacgttgactaaaaaaaaaaaaaaaaaaaaaaaaaaaaaaaaaaaaaaaaaaaaaaaaaaaaaaaaaaaaaaaaaaaaaa

SEQ ID NO: 10149 - DNA, 4057 bp, synthetic construct
  source 1..4057: mol_type = other DNA
ggtctagttacaactgggcatcgctgcagagatcgcacctcctcgtggtcccgctggtagcccttcgaagggtgactaagtcgatctctgccccaggtacggagccgttgggactcaccagtccaacgtaactcctgcctaaattcggtgaaacaaattcctcggtaaaaagccccatggcccctaagaaaaagcggaaagtgggcatccacggcgtgcccgccgctatggctgaaagacctttccaatgcagaatctgtatgagaaacttcagctacaactggcacctgcagagacacatcagaacccataccggcgaaaagcccttcgcctgcgacatctgcggaagaaaattcgccagaagcgaccacctgaccacccacactaagatccacaccggctctcagaaaccattccagtgtagaatctgcatgagaaacttcagccacaactacgcccgcgactgccacattcggacccacaccggcgagaagccttttgcctgtgacatctgcggcagaaagtttgcccagaacagcacccggatcggccacaccaagatccatctgagaggatcctccggctccgagacacctggaacatctgagagcgccacaccagagggcatccatggcgtccccgctgctatggccgagcggcctttccagtgccggatctgcatgcggaatttcagccaaagcagcaacctggcccggcacatccggacacacaccggagaaaagcccttcgcttgtgatatttgcggcagaaagttcgccagaaccgactacctggtggaccacacaaagatccacacaggatctcagaagcctttccagtgcagaatctgcatgcggaacttttcttataatacccacctgaccagacacatcagaacccacaccggcgaaaagcctttcgcctgcgacatctgcggcaggaagtttgcccagggctacaacctggccggccacacaaagatccacctcagaggcagcagcggcagcgagacacctggcacaagcgaaagcgccacccctgaggaacagctgcaggcttactataaaaagacactagaggaacgactttcagctggggcacttaacaccttcccccgagcattcaagcaggtaatggaaggccgggatataaagctagtaatcaatcagacagcgcaggactgcttcggatgcctggaatccataagccaaataagaacggcaacccgagataaaaaggacacggtgacccgggagaaacacccaaagaaaccttttcagaagtggatgaaggacagagcaatcaaaaaaggtaattatcttcggttccagcgtttattttatcttgatagagggaaactggctaaaatcattttagatgatattgaatgcttgtcttgtgacataccactcagtgaaatttattcggtttttaaaacaagatgggaaacaactggtagctttaaaagccttggggactttaaaacttacgggaaggctgacaacactgccttcagagaattaattacggctaaagaaattgagaaaaatgtgcaggaaatgagcaaaggctcggctcccggtccagacgggattactcttggggacgtcgtaaagatggatcccgagttttcccggaccatggagattttcaatttatggttaacaactggtaaaatcccggacatggtgagggggtgcagaaccgttttgattccaaaatcatcaaagccggatcgtttgaaagacattaataactggagacctatcacgatcggttccatcttgctgagactgttctccaggattgtaacagctaggctgagcaaagcgtgccccctgaacccaaggcaaagaggctttatcagagcggcgggatgctctgaaaacttaaaactcctgcaaactataatttggtcggccaaaagagaacacagaccactgggtgttgtattcgtggacatcgccaaggcttttgacaccgtaagccaccagcacatcattcatgctttgcagcaaagagaggtggatccccacatcgtcggtctggtgagcaatatgtacgagaacatcagtacgtatatcaccacaaagaggaacacacacacagacaaaatccagatccgggttggagtaaagcagggtgacccgatgtcgccccttttatttaacctggcaatggaccctctattatgcaagctggaagagagtggcaaaggataccaccgaggacagagcagcatcacagcgatggcatttgcagacgatctggttttgctgagcgactcctgggaaaatatgaatacaaatattagcatactggagaccttctgcaatctgaccggactcaaaacacaggggcaaaagtgccacggcttttacatcaagccgacaaaggactcttacaccatcaatgactgcgctgcctggactatcaacggcacacccctgaacatgatcgaccccggcgaatctgagaaatacctcggcctgcagtttgacccgtggattggaatagcaaggtccggtctctccacaaaactagatttttggcttcagcggatcgatcaagcaccacttaaacctctgcagaaaactgatattctcaaaacatacaccatccctcggctgatctacatagctgaccactcagaagtgaaaactgcactactcgaaacccttgaccagaagatccggacagcggtcaaggaatggcttcacctacctccgtgcacctgcgatgccatcctgtactcgagcacgagagacggcggtttgggcatcaccaaattggcaggactgatccccagcgtgcaggcccgtagactgcatcggatcgcacagtcatctgacgatacgatgaaatgcttcatggaaaaagagaaaatggaacagctgcataagaaattgtggattcaagctggaggggacagagagaacataccctcgatttgggaagcaccaccgtcgagtgaaccaccaaacaacgtgagcacaaattcggaatgggaagcaccgacccagaaagataaatttccaaagccttgcaattggaggaaaaacgaattcaaaaaatggaccaaattggcatcccaaggccgcggaattgtaaattttgaaagagacaaaattagtaaccattggatccaatactacagacgcatacctcacaggaaactcctcactgcactacaactcagggccaacgtttaccccacgagagaatttctagccaggggtagacaagaccaatacatcaaggcgtgtaggcactgcgatgcggacattgaatcctgcgcccacatcatcggcaactgcccagtgacacaggacgcccgaatcaagaggcacaattacatctgcgaactgcttctcgaggaggcgaagaagaaggactgggtagtgttcaaggaaccgcacataagggattccaacaaggaactgtacaaacctgacctgatatttgtgaaggatgcccgtgcacttgtcgtggatgtgacagtacggtatgaagcagccaaatcatcgctggaggaagccgctgcagagaaagtgagaaagtacaaacacctggaaacggaagtaagacatctcacgaatgcaaaggacgttacttttgtgggctttcccctaggagcgcgggggaaatggcaccaagataactttaaacttttgactgagcttggcctctccaaatcgaggcaagtgaaaatggcagagactttttccacagtagcgctcttttcatctgtggacattgtacatatgtttgccagtagggccagaaaatctatggttatgtaaaccggtagacatgataagatacattgatgagtttggacaaaccacaactagaatgcagtgaaaaaaatgctttatttgtgaaatttgtgatgctattgctttatttgtaaccattataagctgcaataaacaagttaacaacaacaaaaaaaaaaaaaaaaaaaaaaaaaaaaaaacgttgactaaaaaaaaaaaaaaaaaaaaaaaaaaaaaaaaaaaaaaaaaaaaaaaaaaaaaaaaaaaaaaaaaaaaaa

SEQ ID NO: 10150 - DNA, 4114 bp, synthetic construct
  source 1..4114: mol_type = other DNA
ggtctagttacaactgggcatcgctgcagagatcgcacctcctcgtggtcccgctggtagcccttcgaagggtgactaagtcgatctctgccccaggtacggagccgttgggactcaccagtccaacgtaactcctgcctaaattcggtgaaacaaattcctcggtaaaaagccccatggcttcttgcccgaaacctggccccccggtttcagcaggggcaatgagtttggaaagtggactgaccacccactccgttctcgccatcgaacgtggtcccaattcgttggcaaattccggatcagactttgggggggggggtctggggctaccgttacgcctattgagggtatcggtcggcactcagacctcccgctccgactgggtagacctggtgtcctggagccacccaggacccacgtctaagtcccagcaggttgacctggtgtctttatttcctaaacaccgggttgacctgttatccaaaaacgaccaggtagacctggtggctcaatttttaccatctaaatttccccccaatttggcagaaaatgatttggctttgctggtgaacttagagttctacagatcggatttgcatgtgtatgagtgtgttcattttgctgcacattgggagggattaagtggtttgcctgaggtgtatgaacaacttgcaccacaaccgtgtgtgggagaaactttacattctagcctcccacgagacagtgaactgtttgtgcctgaagaggggagcagcgagaaggagagcgaggacgcgccaaaaacatctcctccgacgcctgggaaacatggtttggaacagactggggaggaaaaagtgatggtgactgttcctgacaaaaatccaccttgtccttgctgtggtacccgggtaaactctgtgttgaatctgattgaacatctgaaagtgtcacacgggaaaaggggggtttgttttcggtgtgcaaaatgtggaaaggaaaatagtaactatcacagtgttgtttgtcattttccaaaatgcaggggtccagagacggagaaagccccagctggggagtggatttgtgaggtatgcaacagagattttacaaccaaaattggcctgggacaacacaagagattggcacacccagcagtgagaaatcaggaaaggatcgttgcttcccaaccgaaagaaacatcaaatagaggtgctcacaaaaggtgctggacaaaggaggaggaagaattactaataagactggaggctcagttcgagggaaacaaaaatattaataagcttattgcagaacacataaccaccaaaacagctaagcagatcagtgacaaaaggcgattgctgtccagaaagccagcagaggagccacgtgaggagcctggaacgtgtcatcacaccaggagagcagctgcgagcctgagaacggagcctgagatgagtcatcacgcccaggcagaggacagagataatggacctgggagacgccctctgccaggcagggcagctgccggagggagaacaatggacgagataagacgccaccctgataagggcaacggacagcagagacccaccaagcaaaaatcagaagaacagctgcaggcttactataaaaagacactagaggaacgactttcagctggggcacttaacaccttcccccgagcattcaagcaggtaatggaaggccgggatataaagctagtaatcaatcagacagcgcaggactgcttcggatgcctggaatccataagccaaataagaacggcaacccgagataaaaaggacacggtgacccgggagaaacacccaaagaaaccttttcagaagtggatgaaggacagagcaatcaaaaaaggtaattatcttcggttccagcgtttattttatcttgatagagggaaactggctaaaatcattttagatgatattgaatgcttgtcttgtgacataccactcagtgaaatttattcggtttttaaaacaagatgggaaacaactggtagctttaaaagccttggggactttaaaacttacgggaaggctgacaacactgccttcagagaattaattacggctaaagaaattgagaaaaatgtgcaggaaatgagcaaaggctcggctcccggtccagacgggattactcttggggacgtcgtaaagatggatcccgagttttcccggaccatggagattttcaatttatggttaacaactggtaaaatcccggacatggtgagggggtgcagaaccgttttgattccaaaatcatcaaagccggatcgtttgaaagacattaataactggagacctatcacgatcggttccatcttgctgagactgttctccaggattgtaacagctaggctgagcaaagcgtgccccctgaacccaaggcaaagaggctttatcagagcggcgggatgctctgaaaacttaaaactcctgcaaactataatttggtcggccaaaagagaacacagaccactgggtgttgtattcgtggacatcgccaaggcttttgacaccgtaagccaccagcacatcattcatgctttgcagcaaagagaggtggatccccacatcgtcggtctggtgagcaatatgtacgagaacatcagtacgtatatcaccacaaagaggaacacacacacagacaaaatccagatccgggttggagtaaagcagggtgacccgatgtcgccccttttatttaacctggcaatggaccctctattatgcaagctggaagagagtggcaaaggataccaccgaggacagagcagcatcacagcgatggcatttgcagacgatctggttttgctgagcgactcctgggaaaatatgaatacaaatattagcatactggagaccttctgcaatctgaccggactcaaaacacaggggcaaaagtgccacggcttttacatcaagccgacaaaggactcttacaccatcaatgactgcgctgcctggactatcaacggcacacccctgaacatgatcgaccccggcgaatctgagaaatacctcggcctgcagtttgacccgtggattggaatagcaaggtccggtctctccacaaaactagatttttggcttcagcggatcgatcaagcaccacttaaacctctgcagaaaactgatattctcaaaacatacaccatccctcggctgatctacatagctgaccactcagaagtgaaaactgcactactcgaaacccttgaccagaagatccggacagcggtcaaggaatggcttcacctacctccgtgcacctgcgatgccatcctgtactcgagcacgagagacggcggtttgggcatcaccaaattggcaggactgatccccagcgtgcaggcccgtagactgcatcggatcgcacagtcatctgacgatacgatgaaatgcttcatggaaaaagagaaaatggaacagctgcataagaaattgtggattcaagctggaggggacagagagaacataccctcgatttgggaagcaccaccgtcgagtgaaccaccaaacaacgtgagcacaaattcggaatgggaagcaccgacccagaaagataaatttccaaagccttgcaattggaggaaaaacgaattcaaaaaatggaccaaattggcatcccaaggccgcggaattgtaaattttgaaagagacaaaattagtaaccattggatccaatactacagacgcatacctcacaggaaactcctcactgcactacaactcagggccaacgtttaccccacgagagaatttctagccaggggtagacaagaccaatacatcaaggcgtgtaggcactgcgatgcggacattgaatcctgcgcccacatcatcggctaaaccggtagacatgataagatacattgatgagtttggacaaaccacaactagaatgcagtgaaaaaaatgctttatttgtgaaatttgtgatgctattgctttatttgtaaccattataagctgcaataaacaagttaacaacaacaaaaaaaaaaaaaaaaaaaaaaaaaaaaaaacgttgactaaaaaaaaaaaaaaaaaaaaaaaaaaaaaaaaaaaaaaaaaaaaaaaaaaaaaaaaaaaaaaaaaaaaaa

SEQ ID NO: 10151 - DNA, 8857 bp, synthetic construct
  source 1..8857: mol_type = other DNA
ggtctagttacaactgggcatcgctgcagagatcgcacctcctcgtggtcccgctggtagcccttcgaagggtgactaagtcgatctctgccccaggtacggagccgttgggactcaccagtccaacgtaactcctgcctaaattcggtgaaacaaattcctcggtaaaaagccccatgaaacggacagccgacggaagcgagttcgagtcaccaaagaagaagcggaaagtcgacaagaagtacagcatcggcctggacatcggcaccaactctgtgggctgggccgtgatcaccgacgagtacaaggtgcccagcaagaaattcaaggtgctgggcaacaccgaccggcacagcatcaagaagaacctgatcggagccctgctgttcgacagcggcgaaacagccgaggccacccggctgaagagaaccgccagaagaagatacaccagacggaagaaccggatctgctatctgcaagagatcttcagcaacgagatggccaaggtggacgacagcttcttccacagactggaagagtccttcctggtggaagaggataagaagcacgagcggcaccccatcttcggcaacatcgtggacgaggtggcctaccacgagaagtaccccaccatctaccacctgagaaagaaactggtggacagcaccgacaaggccgacctgcggctgatctatctggccctggcccacatgatcaagttccggggccacttcctgatcgagggcgacctgaaccccgacaacagcgacgtggacaagctgttcatccagctggtgcagacctacaaccagctgttcgaggaaaaccccatcaacgccagcggcgtggacgccaaggccatcctgtctgccagactgagcaagagcagacggctggaaaatctgatcgcccagctgcccggcgagaagaagaatggcctgttcggaaacctgattgccctgagcctgggcctgacccccaacttcaagagcaacttcgacctggccgaggatgccaaactgcagctgagcaaggacacctacgacgacgacctggacaacctgctggcccagatcggcgaccagtacgccgacctgtttctggccgccaagaacctgtccgacgccatcctgctgagcgacatcctgagagtgaacaccgagatcaccaaggcccccctgagcgcctctatgatcaagagatacgacgagcaccaccaggacctgaccctgctgaaagctctcgtgcggcagcagctgcctgagaagtacaaagagattttcttcgaccagagcaagaacggctacgccggctacattgacggcggagccagccaggaagagttctacaagttcatcaagcccatcctggaaaagatggacggcaccgaggaactgctcgtgaagctgaacagagaggacctgctgcggaagcagcggaccttcgacaacggcagcatcccccaccagatccacctgggagagctgcacgccattctgcggcggcaggaagatttttacccattcctgaaggacaaccgggaaaagatcgagaagatcctgaccttccgcatcccctactacgtgggccctctggccaggggaaacagcagattcgcctggatgaccagaaagagcgaggaaaccatcaccccctggaacttcgaggaagtggtggacaagggcgcttccgcccagagcttcatcgagcggatgaccaacttcgataagaacctgcccaacgagaaggtgctgcccaagcacagcctgctgtacgagtacttcaccgtgtataacgagctgaccaaagtgaaatacgtgaccgagggaatgagaaagcccgccttcctgagcggcgagcagaaaaaggccatcgtggacctgctgttcaagaccaaccggaaagtgaccgtgaagcagctgaaagaggactacttcaagaaaatcgagtgcttcgactccgtggaaatctccggcgtggaagatcggttcaacgcctccctgggcacataccacgatctgctgaaaattatcaaggacaaggacttcctggacaatgaggaaaacgaggacattctggaagatatcgtgctgaccctgacactgtttgaggacagagagatgatcgaggaacggctgaaaacctatgcccacctgttcgacgacaaagtgatgaagcagctgaagcggcggagatacaccggctggggcaggctgagccggaagctgatcaacggcatccgggacaagcagtccggcaagacaatcctggatttcctgaagtccgacggcttcgccaacagaaacttcatgcagctgatccacgacgacagcctgacctttaaagaggacatccagaaagcccaggtgtccggccagggcgatagcctgcacgagcacattgccaatctggccggcagccccgccattaagaagggcatcctgcagacagtgaaggtggtggacgagctcgtgaaagtgatgggccggcacaagcccgagaacatcgtgatcgaaatggccagagagaaccagaccacccagaagggacagaagaacagccgcgagagaatgaagcggatcgaagagggcatcaaagagctgggcagccagatcctgaaagaacaccccgtggaaaacacccagctgcagaacgagaagctgtacctgtactacctgcagaatgggcgggatatgtacgtggaccaggaactggacatcaaccggctgtccgactacgatgtggacgctatcgtgcctcagagctttctgaaggacgactccatcgacaacaaggtgctgaccagaagcgacaagaaccggggcaagagcgacaacgtgccctccgaagaggtcgtgaagaagatgaagaactactggcggcagctgctgaacgccaagctgattacccagagaaagttcgacaatctgaccaaggccgagagaggcggcctgagcgaactggataaggccggcttcatcaagagacagctggtggaaacccggcagatcacaaagcacgtggcacagatcctggactcccggatgaacactaagtacgacgagaatgacaagctgatccgggaagtgaaagtgatcaccctgaagtccaagctggtgtccgatttccggaaggatttccagttttacaaagtgcgcgagatcaacaactaccaccacgcccacgacgcctacctgaacgccgtcgtgggaaccgccctgatcaaaaagtaccctaagctggaaagcgagttcgtgtacggcgactacaaggtgtacgacgtgcggaagatgatcgccaagagcgagcaggaaatcggcaaggctaccgccaagtacttcttctacagcaacatcatgaactttttcaagaccgagattaccctggccaacggcgagatccggaagcggcctctgatcgagacaaacggcgaaaccggggagatcgtgtgggataagggccgggattttgccaccgtgcggaaagtgctgagcatgccccaagtgaatatcgtgaaaaagaccgaggtgcagacaggcggcttcagcaaagagtctatcctgcccaagaggaacagcgataagctgatcgccagaaagaaggactgggaccctaagaagtacggcggcttcgacagccccaccgtggcctattctgtgctggtggtggccaaagtggaaaagggcaagtccaagaaactgaagagtgtgaaagagctgctggggatcaccatcatggaaagaagcagcttcgagaagaatcccatcgactttctggaagccaagggctacaaagaagtgaaaaaggacctgatcatcaagctgcctaagtactccctgttcgagctggaaaacggccggaagagaatgctggcctctgccggcgaactgcagaagggaaacgaactggccctgccctccaaatatgtgaacttcctgtacctggccagccactatgagaagctgaagggctcccccgaggataatgagcagaaacagctgtttgtggaacagcacaagcactacctggacgagatcatcgagcagatcagcgagttctccaagagagtgatcctggccgacgctaatctggacaaagtgctgtccgcctacaacaagcaccgggataagcccatcagagagcaggccgagaatatcatccacctgtttaccctgaccaatctgggagcccctgccgccttcaagtactttgacaccaccatcgaccggaagaggtacaccagcaccaaagaggtgctggacgccaccctgatccaccagagcatcaccggcctgtacgagacacggatcgacctgtctcagctgggaggtgactctggaggatctagcggaggatcctctggcagcgagacaccaggaacaagcgagtcagcaacaccagagagcagtggcggcagcagcggcggcagcagcgcttcttgcccgaaacctggccccccggtttcagcaggggcaatgagtttggaaagtggactgaccacccactccgttctcgccatcgaacgtggtcccaattcgttggcaaattccggatcagactttgggggggggggtctggggctaccgttacgcctattgagggtatcggtcggcactcagacctcccgctccgactgggtagacctggtgtcctggagccacccaggacccacgtctaagtcccagcaggttgacctggtgtctttatttcctaaacaccgggttgacctgttatccaaaaacgaccaggtagacctggtggctcaatttttaccatctaaatttccccccaatttggcagaaaatgatttggctttgctggtgaacttagagttctacagatcggatttgcatgtgtatgagtgtgttcattttgctgcacattgggagggattaagtggtttgcctgaggtgtatgaacaacttgcaccacaaccgtgtgtgggagaaactttacattctagcctcccacgagacagtgaactgtttgtgcctgaagaggggagcagcgagaaggagagcgaggacgcgccaaaaacatctcctccgacgcctgggaaacatggtttggaacagactggggaggaaaaagtgatggtgactgttcctgacaaaaatccaccttgtccttgctgtggtacccgggtaaactctgtgttgaatctgattgaacatctgaaagtgtcacacgggaaaaggggggtttgttttcggtgtgcaaaatgtggaaaggaaaatagtaactatcacagtgttgtttgtcattttccaaaatgcaggggtccagagacggagaaagccccagctggggagtggatttgtgaggtatgcaacagagattttacaaccaaaattggcctgggacaacacaagagattggcacacccagcagtgagaaatcaggaaaggatcgttgcttcccaaccgaaagaaacatcaaatagaggtgctcacaaaaggtgctggacaaaggaggaggaagaattactaataagactggaggctcagttcgagggaaacaaaaatattaataagcttattgcagaacacataaccaccaaaacagctaagcagatcagtgacaaaaggcgattgctgtccagaaagccagcagaggagccacgtgaggagcctggaacgtgtcatcacaccaggagagcagctgcgagcctgagaacggagcctgagatgagtcatcacgcccaggcagaggacagagataatggacctgggagacgccctctgccaggcagggcagctgccggagggagaacaatggacgagataagacgccaccctgataagggcaacggacagcagagacccaccaagcaaaaatcagaagaacagctgcaggcttactataaaaagacactagaggaacgactttcagctggggcacttaacaccttcccccgagcattcaagcaggtaatggaaggccgggatataaagctagtaatcaatcagacagcgcaggactgcttcggatgcctggaatccataagccaaataagaacggcaacccgagataaaaaggacacggtgacccgggagaaacacccaaagaaaccttttcagaagtggatgaaggacagagcaatcaaaaaaggtaattatcttcggttccagcgtttattttatcttgatagagggaaactggctaaaatcattttagatgatattgaatgcttgtcttgtgacataccactcagtgaaatttattcggtttttaaaacaagatgggaaacaactggtagctttaaaagccttggggactttaaaacttacgggaaggctgacaacactgccttcagagaattaattacggctaaagaaattgagaaaaatgtgcaggaaatgagcaaaggctcggctcccggtccagacgggattactcttggggacgtcgtaaagatggatcccgagttttcccggaccatggagattttcaatttatggttaacaactggtaaaatcccggacatggtgagggggtgcagaaccgttttgattccaaaatcatcaaagccggatcgtttgaaagacattaataactggagacctatcacgatcggttccatcttgctgagactgttctccaggattgtaacagctaggctgagcaaagcgtgccccctgaacccaaggcaaagaggctttatcagagcggcgggatgctctgaaaacttaaaactcctgcaaactataatttggtcggccaaaagagaacacagaccactgggtgttgtattcgtggacatcgccaaggcttttgacaccgtaagccaccagcacatcattcatgctttgcagcaaagagaggtggatccccacatcgtcggtctggtgagcaatatgtacgagaacatcagtacgtatatcaccacaaagaggaacacacacacagacaaaatccagatccgggttggagtaaagcagggtgacccgatgtcgccccttttatttaacctggcaatggaccctctattatgcaagctggaagagagtggcaaaggataccaccgaggacagagcagcatcacagcgatggcatttgcagacgatctggttttgctgagcgactcctgggaaaatatgaatacaaatattagcatactggagaccttctgcaatctgaccggactcaaaacacaggggcaaaagtgccacggcttttacatcaagccgacaaaggactcttacaccatcaatgactgcgctgcctggactatcaacggcacacccctgaacatgatcgaccccggcgaatctgagaaatacctcggcctgcagtttgacccgtggattggaatagcaaggtccggtctctccacaaaactagatttttggcttcagcggatcgatcaagcaccacttaaacctctgcagaaaactgatattctcaaaacatacaccatccctcggctgatctacatagctgaccactcagaagtgaaaactgcactactcgaaacccttgaccagaagatccggacagcggtcaaggaatggcttcacctacctccgtgcacctgcgatgccatcctgtactcgagcacgagagacggcggtttgggcatcaccaaattggcaggactgatccccagcgtgcaggcccgtagactgcatcggatcgcacagtcatctgacgatacgatgaaatgcttcatggaaaaagagaaaatggaacagctgcataagaaattgtggattcaagctggaggggacagagagaacataccctcgatttgggaagcaccaccgtcgagtgaaccaccaaacaacgtgagcacaaattcggaatgggaagcaccgacccagaaagataaatttccaaagccttgcaattggaggaaaaacgaattcaaaaaatggaccaaattggcatcccaaggccgcggaattgtaaattttgaaagagacaaaattagtaaccattggatccaatactacagacgcatacctcacaggaaactcctcactgcactacaactcagggccaacgtttaccccacgagagaatttctagccaggggtagacaagaccaatacatcaaggcgtgtaggcactgcgatgcggacattgaatcctgcgcccacatcatcggcaactgcccagtgacacaggacgcccgaatcaagaggcacaattacatctgcgaactgcttctcgaggaggcgaagaagaaggactgggtagtgttcaaggaaccgcacataagggattccaacaaggaactgtacaaacctgacctgatatttgtgaaggatgcccgtgcacttgtcgtggatgtgacagtacggtatgaagcagccaaatcatcgctggaggaagccgctgcagagaaagtgagaaagtacaaacacctggaaacggaagtaagacatctcacgaatgcaaaggacgttacttttgtgggctttcccctaggagcgcgggggaaatggcaccaagataactttaaacttttgactgagcttggcctctccaaatcgaggcaagtgaaaatggcagagactttttccacagtagcgctcttttcatctgtggacattgtacatatgtttgccagtagggccagaaaatctatggttatgtaaaccggtagacatgataagatacattgatgagtttggacaaaccacaactagaatgcagtgaaaaaaatgctttatttgtgaaatttgtgatgctattgctttatttgtaaccattataagctgcaataaacaagttaacaacaacaaaaaaaaaaaaaaaaaaaaaaaaaaaaaaacgttgactaaaaaaaaaaaaaaaaaaaaaaaaaaaaaaaaaaaaaaaaaaaaaaaaaaaaaaaaaaaaaaaaaaaaaa

SEQ ID NO: 10152 - DNA, 7450 bp, synthetic construct
  source 1..7450: mol_type = other DNA
ggtctagttacaactgggcatcgctgcagagatcgcacctcctcgtggtcccgctggtagcccttcgaagggtgactaagtcgatctctgccccaggtacggagccgttgggactcaccagtccaacgtaactcctgcctaaattcggtgaaacaaattcctcggtaaaaagccccatgaaacggacagccgacggaagcgagttcgagtcaccaaagaagaagcggaaagtcgacaagaagtacagcatcggcctggcaatcggcaccaactctgtgggctgggccgtgatcaccgacgagtacaaggtgcccagcaagaaattcaaggtgctgggcaacaccgaccggcacagcatcaagaagaacctgatcggagccctgctgttcgacagcggcgaaacagccgaggccacccggctgaagagaaccgccagaagaagatacaccagacggaagaaccggatctgctatctgcaagagatcttcagcaacgagatggccaaggtggacgacagcttcttccacagactggaagagtccttcctggtggaagaggataagaagcacgagcggcaccccatcttcggcaacatcgtggacgaggtggcctaccacgagaagtaccccaccatctaccacctgagaaagaaactggtggacagcaccgacaaggccgacctgcggctgatctatctggccctggcccacatgatcaagttccggggccacttcctgatcgagggcgacctgaaccccgacaacagcgacgtggacaagctgttcatccagctggtgcagacctacaaccagctgttcgaggaaaaccccatcaacgccagcggcgtggacgccaaggccatcctgtctgccagactgagcaagagcagacggctggaaaatctgatcgcccagctgcccggcgagaagaagaatggcctgttcggaaacctgattgccctgagcctgggcctgacccccaacttcaagagcaacttcgacctggccgaggatgccaaactgcagctgagcaaggacacctacgacgacgacctggacaacctgctggcccagatcggcgaccagtacgccgacctgtttctggccgccaagaacctgtccgacgccatcctgctgagcgacatcctgagagtgaacaccgagatcaccaaggcccccctgagcgcctctatgatcaagagatacgacgagcaccaccaggacctgaccctgctgaaagctctcgtgcggcagcagctgcctgagaagtacaaagagattttcttcgaccagagcaagaacggctacgccggctacattgacggcggagccagccaggaagagttctacaagttcatcaagcccatcctggaaaagatggacggcaccgaggaactgctcgtgaagctgaacagagaggacctgctgcggaagcagcggaccttcgacaacggcagcatcccccaccagatccacctgggagagctgcacgccattctgcggcggcaggaagatttttacccattcctgaaggacaaccgggaaaagatcgagaagatcctgaccttccgcatcccctactacgtgggccctctggccaggggaaacagcagattcgcctggatgaccagaaagagcgaggaaaccatcaccccctggaacttcgaggaagtggtggacaagggcgcttccgcccagagcttcatcgagcggatgaccaacttcgataagaacctgcccaacgagaaggtgctgcccaagcacagcctgctgtacgagtacttcaccgtgtataacgagctgaccaaagtgaaatacgtgaccgagggaatgagaaagcccgccttcctgagcggcgagcagaaaaaggccatcgtggacctgctgttcaagaccaaccggaaagtgaccgtgaagcagctgaaagaggactacttcaagaaaatcgagtgcttcgactccgtggaaatctccggcgtggaagatcggttcaacgcctccctgggcacataccacgatctgctgaaaattatcaaggacaaggacttcctggacaatgaggaaaacgaggacattctggaagatatcgtgctgaccctgacactgtttgaggacagagagatgatcgaggaacggctgaaaacctatgcccacctgttcgacgacaaagtgatgaagcagctgaagcggcggagatacaccggctggggcaggctgagccggaagctgatcaacggcatccgggacaagcagtccggcaagacaatcctggatttcctgaagtccgacggcttcgccaacagaaacttcatgcagctgatccacgacgacagcctgacctttaaagaggacatccagaaagcccaggtgtccggccagggcgatagcctgcacgagcacattgccaatctggccggcagccccgccattaagaagggcatcctgcagacagtgaaggtggtggacgagctcgtgaaagtgatgggccggcacaagcccgagaacatcgtgatcgaaatggccagagagaaccagaccacccagaagggacagaagaacagccgcgagagaatgaagcggatcgaagagggcatcaaagagctgggcagccagatcctgaaagaacaccccgtggaaaacacccagctgcagaacgagaagctgtacctgtactacctgcagaatgggcgggatatgtacgtggaccaggaactggacatcaaccggctgtccgactacgatgtggacgctatcgtgcctcagagctttctgaaggacgactccatcgacaacaaggtgctgaccagaagcgacaagaaccggggcaagagcgacaacgtgccctccgaagaggtcgtgaagaagatgaagaactactggcggcagctgctgaacgccaagctgattacccagagaaagttcgacaatctgaccaaggccgagagaggcggcctgagcgaactggataaggccggcttcatcaagagacagctggtggaaacccggcagatcacaaagcacgtggcacagatcctggactcccggatgaacactaagtacgacgagaatgacaagctgatccgggaagtgaaagtgatcaccctgaagtccaagctggtgtccgatttccggaaggatttccagttttacaaagtgcgcgagatcaacaactaccaccacgcccacgacgcctacctgaacgccgtcgtgggaaccgccctgatcaaaaagtaccctaagctggaaagcgagttcgtgtacggcgactacaaggtgtacgacgtgcggaagatgatcgccaagagcgagcaggaaatcggcaaggctaccgccaagtacttcttctacagcaacatcatgaactttttcaagaccgagattaccctggccaacggcgagatccggaagcggcctctgatcgagacaaacggcgaaaccggggagatcgtgtgggataagggccgggattttgccaccgtgcggaaagtgctgagcatgccccaagtgaatatcgtgaaaaagaccgaggtgcagacaggcggcttcagcaaagagtctatcctgcccaagaggaacagcgataagctgatcgccagaaagaaggactgggaccctaagaagtacggcggcttcgacagccccaccgtggcctattctgtgctggtggtggccaaagtggaaaagggcaagtccaagaaactgaagagtgtgaaagagctgctggggatcaccatcatggaaagaagcagcttcgagaagaatcccatcgactttctggaagccaagggctacaaagaagtgaaaaaggacctgatcatcaagctgcctaagtactccctgttcgagctggaaaacggccggaagagaatgctggcctctgccggcgaactgcagaagggaaacgaactggccctgccctccaaatatgtgaacttcctgtacctggccagccactatgagaagctgaagggctcccccgaggataatgagcagaaacagctgtttgtggaacagcacaagcactacctggacgagatcatcgagcagatcagcgagttctccaagagagtgatcctggccgacgctaatctggacaaagtgctgtccgcctacaacaagcaccgggataagcccatcagagagcaggccgagaatatcatccacctgtttaccctgaccaatctgggagcccctgccgccttcaagtactttgacaccaccatcgaccggaagaggtacaccagcaccaaagaggtgctggacgccaccctgatccaccagagcatcaccggcctgtacgagacacggatcgacctgtctcagctgggaggtgactctggaggatctagcggaggatcctctggcagcgagacaccaggaacaagcgagtcagcaacaccagagagcagtggcggcagcagcggcggcagcagcgaagaacagctgcaggcttactataaaaagacactagaggaacgactttcagctggggcacttaacaccttcccccgagcattcaagcaggtaatggaaggccgggatataaagctagtaatcaatcagacagcgcaggactgcttcggatgcctggaatccataagccaaataagaacggcaacccgagataaaaaggacacggtgacccgggagaaacacccaaagaaaccttttcagaagtggatgaaggacagagcaatcaaaaaaggtaattatcttcggttccagcgtttattttatcttgatagagggaaactggctaaaatcattttagatgatattgaatgcttgtcttgtgacataccactcagtgaaatttattcggtttttaaaacaagatgggaaacaactggtagctttaaaagccttggggactttaaaacttacgggaaggctgacaacactgccttcagagaattaattacggctaaagaaattgagaaaaatgtgcaggaaatgagcaaaggctcggctcccggtccagacgggattactcttggggacgtcgtaaagatggatcccgagttttcccggaccatggagattttcaatttatggttaacaactggtaaaatcccggacatggtgagggggtgcagaaccgttttgattccaaaatcatcaaagccggatcgtttgaaagacattaataactggagacctatcacgatcggttccatcttgctgagactgttctccaggattgtaacagctaggctgagcaaagcgtgccccctgaacccaaggcaaagaggctttatcagagcggcgggatgctctgaaaacttaaaactcctgcaaactataatttggtcggccaaaagagaacacagaccactgggtgttgtattcgtggacatcgccaaggcttttgacaccgtaagccaccagcacatcattcatgctttgcagcaaagagaggtggatccccacatcgtcggtctggtgagcaatatgtacgagaacatcagtacgtatatcaccacaaagaggaacacacacacagacaaaatccagatccgggttggagtaaagcagggtgacccgatgtcgccccttttatttaacctggcaatggaccctctattatgcaagctggaagagagtggcaaaggataccaccgaggacagagcagcatcacagcgatggcatttgcagacgatctggttttgctgagcgactcctgggaaaatatgaatacaaatattagcatactggagaccttctgcaatctgaccggactcaaaacacaggggcaaaagtgccacggcttttacatcaagccgacaaaggactcttacaccatcaatgactgcgctgcctggactatcaacggcacacccctgaacatgatcgaccccggcgaatctgagaaatacctcggcctgcagtttgacccgtggattggaatagcaaggtccggtctctccacaaaactagatttttggcttcagcggatcgatcaagcaccacttaaacctctgcagaaaactgatattctcaaaacatacaccatccctcggctgatctacatagctgaccactcagaagtgaaaactgcactactcgaaacccttgaccagaagatccggacagcggtcaaggaatggcttcacctacctccgtgcacctgcgatgccatcctgtactcgagcacgagagacggcggtttgggcatcaccaaattggcaggactgatccccagcgtgcaggcccgtagactgcatcggatcgcacagtcatctgacgatacgatgaaatgcttcatggaaaaagagaaaatggaacagctgcataagaaattgtggattcaagctggaggggacagagagaacataccctcgatttgggaagcaccaccgtcgagtgaaccaccaaacaacgtgagcacaaattcggaatgggaagcaccgacccagaaagataaatttccaaagccttgcaattggaggaaaaacgaattcaaaaaatggaccaaattggcatcccaaggccgcggaattgtaaattttgaaagagacaaaattagtaaccattggatccaatactacagacgcatacctcacaggaaactcctcactgcactacaactcagggccaacgtttaccccacgagagaatttctagccaggggtagacaagaccaatacatcaaggcgtgtaggcactgcgatgcggacattgaatcctgcgcccacatcatcggcaactgcccagtgacacaggacgcccgaatcaagaggcacaattacatctgcgaactgcttctcgaggaggcgaagaagaaggactgggtagtgttcaaggaaccgcacataagggattccaacaaggaactgtacaaacctgacctgatatttgtgaaggatgcccgtgcacttgtcgtggatgtgacagtacggtatgaagcagccaaatcatcgctggaggaagccgctgcagagaaagtgagaaagtacaaacacctggaaacggaagtaagacatctcacgaatgcaaaggacgttacttttgtgggctttcccctaggagcgcgggggaaatggcaccaagataactttaaacttttgactgagcttggcctctccaaatcgaggcaagtgaaaatggcagagactttttccacagtagcgctcttttcatctgtggacattgtacatatgtttgccagtagggccagaaaatctatggttatgtaaaccggtagacatgataagatacattgatgagtttggacaaaccacaactagaatgcagtgaaaaaaatgctttatttgtgaaatttgtgatgctattgctttatttgtaaccattataagctgcaataaacaagttaacaacaacaaaaaaaaaaaaaaaaaaaaaaaaaaaaaaacgttgactaaaaaaaaaaaaaaaaaaaaaaaaaaaaaaaaaaaaaaaaaaaaaaaaaaaaaaaaaaaaaaaaaaaaaa

SEQ ID NO: 10153 - DNA, 7450 bp, synthetic construct
  source 1..7450: mol_type = other DNA
ggtctagttacaactgggcatcgctgcagagatcgcacctcctcgtggtcccgctggtagcccttcgaagggtgactaagtcgatctctgccccaggtacggagccgttgggactcaccagtccaacgtaactcctgcctaaattcggtgaaacaaattcctcggtaaaaagccccatgaaacggacagccgacggaagcgagttcgagtcaccaaagaagaagcggaaagtcgacaagaagtacagcatcggcctggacatcggcaccaactctgtgggctgggccgtgatcaccgacgagtacaaggtgcccagcaagaaattcaaggtgctgggcaacaccgaccggcacagcatcaagaagaacctgatcggagccctgctgttcgacagcggcgaaacagccgaggccacccggctgaagagaaccgccagaagaagatacaccagacggaagaaccggatctgctatctgcaagagatcttcagcaacgagatggccaaggtggacgacagcttcttccacagactggaagagtccttcctggtggaagaggataagaagcacgagcggcaccccatcttcggcaacatcgtggacgaggtggcctaccacgagaagtaccccaccatctaccacctgagaaagaaactggtggacagcaccgacaaggccgacctgcggctgatctatctggccctggcccacatgatcaagttccggggccacttcctgatcgagggcgacctgaaccccgacaacagcgacgtggacaagctgttcatccagctggtgcagacctacaaccagctgttcgaggaaaaccccatcaacgccagcggcgtggacgccaaggccatcctgtctgccagactgagcaagagcagacggctggaaaatctgatcgcccagctgcccggcgagaagaagaatggcctgttcggaaacctgattgccctgagcctgggcctgacccccaacttcaagagcaacttcgacctggccgaggatgccaaactgcagctgagcaaggacacctacgacgacgacctggacaacctgctggcccagatcggcgaccagtacgccgacctgtttctggccgccaagaacctgtccgacgccatcctgctgagcgacatcctgagagtgaacaccgagatcaccaaggcccccctgagcgcctctatgatcaagagatacgacgagcaccaccaggacctgaccctgctgaaagctctcgtgcggcagcagctgcctgagaagtacaaagagattttcttcgaccagagcaagaacggctacgccggctacattgacggcggagccagccaggaagagttctacaagttcatcaagcccatcctggaaaagatggacggcaccgaggaactgctcgtgaagctgaacagagaggacctgctgcggaagcagcggaccttcgacaacggcagcatcccccaccagatccacctgggagagctgcacgccattctgcggcggcaggaagatttttacccattcctgaaggacaaccgggaaaagatcgagaagatcctgaccttccgcatcccctactacgtgggccctctggccaggggaaacagcagattcgcctggatgaccagaaagagcgaggaaaccatcaccccctggaacttcgaggaagtggtggacaagggcgcttccgcccagagcttcatcgagcggatgaccaacttcgataagaacctgcccaacgagaaggtgctgcccaagcacagcctgctgtacgagtacttcaccgtgtataacgagctgaccaaagtgaaatacgtgaccgagggaatgagaaagcccgccttcctgagcggcgagcagaaaaaggccatcgtggacctgctgttcaagaccaaccggaaagtgaccgtgaagcagctgaaagaggactacttcaagaaaatcgagtgcttcgactccgtggaaatctccggcgtggaagatcggttcaacgcctccctgggcacataccacgatctgctgaaaattatcaaggacaaggacttcctggacaatgaggaaaacgaggacattctggaagatatcgtgctgaccctgacactgtttgaggacagagagatgatcgaggaacggctgaaaacctatgcccacctgttcgacgacaaagtgatgaagcagctgaagcggcggagatacaccggctggggcaggctgagccggaagctgatcaacggcatccgggacaagcagtccggcaagacaatcctggatttcctgaagtccgacggcttcgccaacagaaacttcatgcagctgatccacgacgacagcctgacctttaaagaggacatccagaaagcccaggtgtccggccagggcgatagcctgcacgagcacattgccaatctggccggcagccccgccattaagaagggcatcctgcagacagtgaaggtggtggacgagctcgtgaaagtgatgggccggcacaagcccgagaacatcgtgatcgaaatggccagagagaaccagaccacccagaagggacagaagaacagccgcgagagaatgaagcggatcgaagagggcatcaaagagctgggcagccagatcctgaaagaacaccccgtggaaaacacccagctgcagaacgagaagctgtacctgtactacctgcagaatgggcgggatatgtacgtggaccaggaactggacatcaaccggctgtccgactacgatgtggacgctatcgtgcctcagagctttctgaaggacgactccatcgacaacaaggtgctgaccagaagcgacaagaaccggggcaagagcgacaacgtgccctccgaagaggtcgtgaagaagatgaagaactactggcggcagctgctgaacgccaagctgattacccagagaaagttcgacaatctgaccaaggccgagagaggcggcctgagcgaactggataaggccggcttcatcaagagacagctggtggaaacccggcagatcacaaagcacgtggcacagatcctggactcccggatgaacactaagtacgacgagaatgacaagctgatccgggaagtgaaagtgatcaccctgaagtccaagctggtgtccgatttccggaaggatttccagttttacaaagtgcgcgagatcaacaactaccaccacgcccacgacgcctacctgaacgccgtcgtgggaaccgccctgatcaaaaagtaccctaagctggaaagcgagttcgtgtacggcgactacaaggtgtacgacgtgcggaagatgatcgccaagagcgagcaggaaatcggcaaggctaccgccaagtacttcttctacagcaacatcatgaactttttcaagaccgagattaccctggccaacggcgagatccggaagcggcctctgatcgagacaaacggcgaaaccggggagatcgtgtgggataagggccgggattttgccaccgtgcggaaagtgctgagcatgccccaagtgaatatcgtgaaaaagaccgaggtgcagacaggcggcttcagcaaagagtctatcctgcccaagaggaacagcgataagctgatcgccagaaagaaggactgggaccctaagaagtacggcggcttcgacagccccaccgtggcctattctgtgctggtggtggccaaagtggaaaagggcaagtccaagaaactgaagagtgtgaaagagctgctggggatcaccatcatggaaagaagcagcttcgagaagaatcccatcgactttctggaagccaagggctacaaagaagtgaaaaaggacctgatcatcaagctgcctaagtactccctgttcgagctggaaaacggccggaagagaatgctggcctctgccggcgaactgcagaagggaaacgaactggccctgccctccaaatatgtgaacttcctgtacctggccagccactatgagaagctgaagggctcccccgaggataatgagcagaaacagctgtttgtggaacagcacaagcactacctggacgagatcatcgagcagatcagcgagttctccaagagagtgatcctggccgacgctaatctggacaaagtgctgtccgcctacaacaagcaccgggataagcccatcagagagcaggccgagaatatcatccacctgtttaccctgaccaatctgggagcccctgccgccttcaagtactttgacaccaccatcgaccggaagaggtacaccagcaccaaagaggtgctggacgccaccctgatccaccagagcatcaccggcctgtacgagacacggatcgacctgtctcagctgggaggtgactctggaggatctagcggaggatcctctggcagcgagacaccaggaacaagcgagtcagcaacaccagagagcagtggcggcagcagcggcggcagcagcgaagaacagctgcaggcttactataaaaagacactagaggaacgactttcagctggggcacttaacaccttcccccgagcattcaagcaggtaatggaaggccgggatataaagctagtaatcaatcagacagcgcaggactgcttcggatgcctggaatccataagccaaataagaacggcaacccgagataaaaaggacacggtgacccgggagaaacacccaaagaaaccttttcagaagtggatgaaggacagagcaatcaaaaaaggtaattatcttcggttccagcgtttattttatcttgatagagggaaactggctaaaatcattttagatgatattgaatgcttgtcttgtgacataccactcagtgaaatttattcggtttttaaaacaagatgggaaacaactggtagctttaaaagccttggggactttaaaacttacgggaaggctgacaacactgccttcagagaattaattacggctaaagaaattgagaaaaatgtgcaggaaatgagcaaaggctcggctcccggtccagacgggattactcttggggacgtcgtaaagatggatcccgagttttcccggaccatggagattttcaatttatggttaacaactggtaaaatcccggacatggtgagggggtgcagaaccgttttgattccaaaatcatcaaagccggatcgtttgaaagacattaataactggagacctatcacgatcggttccatcttgctgagactgttctccaggattgtaacagctaggctgagcaaagcgtgccccctgaacccaaggcaaagaggctttatcagagcggcgggatgctctgaaaacttaaaactcctgcaaactataatttggtcggccaaaagagaacacagaccactgggtgttgtattcgtggacatcgccaaggcttttgacaccgtaagccaccagcacatcattcatgctttgcagcaaagagaggtggatccccacatcgtcggtctggtgagcaatatgtacgagaacatcagtacgtatatcaccacaaagaggaacacacacacagacaaaatccagatccgggttggagtaaagcagggtgacccgatgtcgccccttttatttaacctggcaatggaccctctattatgcaagctggaagagagtggcaaaggataccaccgaggacagagcagcatcacagcgatggcatttgcagacgatctggttttgctgagcgactcctgggaaaatatgaatacaaatattagcatactggagaccttctgcaatctgaccggactcaaaacacaggggcaaaagtgccacggcttttacatcaagccgacaaaggactcttacaccatcaatgactgcgctgcctggactatcaacggcacacccctgaacatgatcgaccccggcgaatctgagaaatacctcggcctgcagtttgacccgtggattggaatagcaaggtccggtctctccacaaaactagatttttggcttcagcggatcgatcaagcaccacttaaacctctgcagaaaactgatattctcaaaacatacaccatccctcggctgatctacatagctgaccactcagaagtgaaaactgcactactcgaaacccttgaccagaagatccggacagcggtcaaggaatggcttcacctacctccgtgcacctgcgatgccatcctgtactcgagcacgagagacggcggtttgggcatcaccaaattggcaggactgatccccagcgtgcaggcccgtagactgcatcggatcgcacagtcatctgacgatacgatgaaatgcttcatggaaaaagagaaaatggaacagctgcataagaaattgtggattcaagctggaggggacagagagaacataccctcgatttgggaagcaccaccgtcgagtgaaccaccaaacaacgtgagcacaaattcggaatgggaagcaccgacccagaaagataaatttccaaagccttgcaattggaggaaaaacgaattcaaaaaatggaccaaattggcatcccaaggccgcggaattgtaaattttgaaagagacaaaattagtaaccattggatccaatactacagacgcatacctcacaggaaactcctcactgcactacaactcagggccaacgtttaccccacgagagaatttctagccaggggtagacaagaccaatacatcaaggcgtgtaggcactgcgatgcggacattgaatcctgcgcccacatcatcggcaactgcccagtgacacaggacgcccgaatcaagaggcacaattacatctgcgaactgcttctcgaggaggcgaagaagaaggactgggtagtgttcaaggaaccgcacataagggattccaacaaggaactgtacaaacctgacctgatatttgtgaaggatgcccgtgcacttgtcgtggatgtgacagtacggtatgaagcagccaaatcatcgctggaggaagccgctgcagagaaagtgagaaagtacaaacacctggaaacggaagtaagacatctcacgaatgcaaaggacgttacttttgtgggctttcccctaggagcgcgggggaaatggcaccaagataactttaaacttttgactgagcttggcctctccaaatcgaggcaagtgaaaatggcagagactttttccacagtagcgctcttttcatctgtggacattgtacatatgtttgccagtagggccagaaaatctatggttatgtaaaccggtagacatgataagatacattgatgagtttggacaaaccacaactagaatgcagtgaaaaaaatgctttatttgtgaaatttgtgatgctattgctttatttgtaaccattataagctgcaataaacaagttaacaacaacaaaaaaaaaaaaaaaaaaaaaaaaaaaaaaacgttgactaaaaaaaaaaaaaaaaaaaaaaaaaaaaaaaaaaaaaaaaaaaaaaaaaaaaaaaaaaaaaaaaaaaaaa

SEQ ID NO: 10154 - DNA, 8236 bp, synthetic construct
  source 1..8236: mol_type = other DNA
ggtctagttacaactgggcatcgctgcagagatcgcacctcctcgtggtcccgctggtagcccttcgaagggtgactaagtcgatctctgccccaggtacggagccgttgggactcaccagtccaacgtaactcctgcctaaattcggtgaaacaaattcctcggtaaaaagccccatgaaacggacagccgacggaagcgagttcgagtcaccaaagaagaagcggaaagtcgacaagaagtacagcatcggcctggacatcggcaccaactctgtgggctgggccgtgatcaccgacgagtacaaggtgcccagcaagaaattcaaggtgctgggcaacaccgaccggcacagcatcaagaagaacctgatcggagccctgctgttcgacagcggcgaaacagccgaggccacccggctgaagagaaccgccagaagaagatacaccagacggaagaaccggatctgctatctgcaagagatcttcagcaacgagatggccaaggtggacgacagcttcttccacagactggaagagtccttcctggtggaagaggataagaagcacgagcggcaccccatcttcggcaacatcgtggacgaggtggcctaccacgagaagtaccccaccatctaccacctgagaaagaaactggtggacagcaccgacaaggccgacctgcggctgatctatctggccctggcccacatgatcaagttccggggccacttcctgatcgagggcgacctgaaccccgacaacagcgacgtggacaagctgttcatccagctggtgcagacctacaaccagctgttcgaggaaaaccccatcaacgccagcggcgtggacgccaaggccatcctgtctgccagactgagcaagagcagacggctggaaaatctgatcgcccagctgcccggcgagaagaagaatggcctgttcggaaacctgattgccctgagcctgggcctgacccccaacttcaagagcaacttcgacctggccgaggatgccaaactgcagctgagcaaggacacctacgacgacgacctggacaacctgctggcccagatcggcgaccagtacgccgacctgtttctggccgccaagaacctgtccgacgccatcctgctgagcgacatcctgagagtgaacaccgagatcaccaaggcccccctgagcgcctctatgatcaagagatacgacgagcaccaccaggacctgaccctgctgaaagctctcgtgcggcagcagctgcctgagaagtacaaagagattttcttcgaccagagcaagaacggctacgccggctacattgacggcggagccagccaggaagagttctacaagttcatcaagcccatcctggaaaagatggacggcaccgaggaactgctcgtgaagctgaacagagaggacctgctgcggaagcagcggaccttcgacaacggcagcatcccccaccagatccacctgggagagctgcacgccattctgcggcggcaggaagatttttacccattcctgaaggacaaccgggaaaagatcgagaagatcctgaccttccgcatcccctactacgtgggccctctggccaggggaaacagcagattcgcctggatgaccagaaagagcgaggaaaccatcaccccctggaacttcgaggaagtggtggacaagggcgcttccgcccagagcttcatcgagcggatgaccaacttcgataagaacctgcccaacgagaaggtgctgcccaagcacagcctgctgtacgagtacttcaccgtgtataacgagctgaccaaagtgaaatacgtgaccgagggaatgagaaagcccgccttcctgagcggcgagcagaaaaaggccatcgtggacctgctgttcaagaccaaccggaaagtgaccgtgaagcagctgaaagaggactacttcaagaaaatcgagtgcttcgactccgtggaaatctccggcgtggaagatcggttcaacgcctccctgggcacataccacgatctgctgaaaattatcaaggacaaggacttcctggacaatgaggaaaacgaggacattctggaagatatcgtgctgaccctgacactgtttgaggacagagagatgatcgaggaacggctgaaaacctatgcccacctgttcgacgacaaagtgatgaagcagctgaagcggcggagatacaccggctggggcaggctgagccggaagctgatcaacggcatccgggacaagcagtccggcaagacaatcctggatttcctgaagtccgacggcttcgccaacagaaacttcatgcagctgatccacgacgacagcctgacctttaaagaggacatccagaaagcccaggtgtccggccagggcgatagcctgcacgagcacattgccaatctggccggcagccccgccattaagaagggcatcctgcagacagtgaaggtggtggacgagctcgtgaaagtgatgggccggcacaagcccgagaacatcgtgatcgaaatggccagagagaaccagaccacccagaagggacagaagaacagccgcgagagaatgaagcggatcgaagagggcatcaaagagctgggcagccagatcctgaaagaacaccccgtggaaaacacccagctgcagaacgagaagctgtacctgtactacctgcagaatgggcgggatatgtacgtggaccaggaactggacatcaaccggctgtccgactacgatgtggacgctatcgtgcctcagagctttctgaaggacgactccatcgacaacaaggtgctgaccagaagcgacaagaaccggggcaagagcgacaacgtgccctccgaagaggtcgtgaagaagatgaagaactactggcggcagctgctgaacgccaagctgattacccagagaaagttcgacaatctgaccaaggccgagagaggcggcctgagcgaactggataaggccggcttcatcaagagacagctggtggaaacccggcagatcacaaagcacgtggcacagatcctggactcccggatgaacactaagtacgacgagaatgacaagctgatccgggaagtgaaagtgatcaccctgaagtccaagctggtgtccgatttccggaaggatttccagttttacaaagtgcgcgagatcaacaactaccaccacgcccacgacgcctacctgaacgccgtcgtgggaaccgccctgatcaaaaagtaccctaagctggaaagcgagttcgtgtacggcgactacaaggtgtacgacgtgcggaagatgatcgccaagagcgagcaggaaatcggcaaggctaccgccaagtacttcttctacagcaacatcatgaactttttcaagaccgagattaccctggccaacggcgagatccggaagcggcctctgatcgagacaaacggcgaaaccggggagatcgtgtgggataagggccgggattttgccaccgtgcggaaagtgctgagcatgccccaagtgaatatcgtgaaaaagaccgaggtgcagacaggcggcttcagcaaagagtctatcctgcccaagaggaacagcgataagctgatcgccagaaagaaggactgggaccctaagaagtacggcggcttcgacagccccaccgtggcctattctgtgctggtggtggccaaagtggaaaagggcaagtccaagaaactgaagagtgtgaaagagctgctggggatcaccatcatggaaagaagcagcttcgagaagaatcccatcgactttctggaagccaagggctacaaagaagtgaaaaaggacctgatcatcaagctgcctaagtactccctgttcgagctggaaaacggccggaagagaatgctggcctctgccggcgaactgcagaagggaaacgaactggccctgccctccaaatatgtgaacttcctgtacctggccagccactatgagaagctgaagggctcccccgaggataatgagcagaaacagctgtttgtggaacagcacaagcactacctggacgagatcatcgagcagatcagcgagttctccaagagagtgatcctggccgacgctaatctggacaaagtgctgtccgcctacaacaagcaccgggataagcccatcagagagcaggccgagaatatcatccacctgtttaccctgaccaatctgggagcccctgccgccttcaagtactttgacaccaccatcgaccggaagaggtacaccagcaccaaagaggtgctggacgccaccctgatccaccagagcatcaccggcctgtacgagacacggatcgacctgtctcagctgggaggtgactctggaggatctagcggaggatcctctggcagcgagacaccaggaacaagcgagtcagcaacaccagagagcagtggcggcagcagcggcggcagcagcgggaaacatggtttggaacagactggggaggaaaaagtgatggtgactgttcctgacaaaaatccaccttgtccttgctgtggtacccgggtaaactctgtgttgaatctgattgaacatctgaaagtgtcacacgggaaaaggggggtttgttttcggtgtgcaaaatgtggaaaggaaaatagtaactatcacagtgttgtttgtcattttccaaaatgcaggggtccagagacggagaaagccccagctggggagtggatttgtgaggtatgcaacagagattttacaaccaaaattggcctgggacaacacaagagattggcacacccagcagtgagaaatcaggaaaggatcgttgcttcccaaccgaaagaaacatcaaatagaggtgctcacaaaaggtgctggacaaaggaggaggaagaattactaataagactggaggctcagttcgagggaaacaaaaatattaataagcttattgcagaacacataaccaccaaaacagctaagcagatcagtgacaaaaggcgattgctgtccagaaagccagcagaggagccacgtgaggagcctggaacgtgtcatcacaccaggagagcagctgcgagcctgagaacggagcctgagatgagtcatcacgcccaggcagaggacagagataatggacctgggagacgccctctgccaggcagggcagctgccggagggagaacaatggacgagataagacgccaccctgataagggcaacggacagcagagacccaccaagcaaaaatcagaagaacagctgcaggcttactataaaaagacactagaggaacgactttcagctggggcacttaacaccttcccccgagcattcaagcaggtaatggaaggccgggatataaagctagtaatcaatcagacagcgcaggactgcttcggatgcctggaatccataagccaaataagaacggcaacccgagataaaaaggacacggtgacccgggagaaacacccaaagaaaccttttcagaagtggatgaaggacagagcaatcaaaaaaggtaattatcttcggttccagcgtttattttatcttgatagagggaaactggctaaaatcattttagatgatattgaatgcttgtcttgtgacataccactcagtgaaatttattcggtttttaaaacaagatgggaaacaactggtagctttaaaagccttggggactttaaaacttacgggaaggctgacaacactgccttcagagaattaattacggctaaagaaattgagaaaaatgtgcaggaaatgagcaaaggctcggctcccggtccagacgggattactcttggggacgtcgtaaagatggatcccgagttttcccggaccatggagattttcaatttatggttaacaactggtaaaatcccggacatggtgagggggtgcagaaccgttttgattccaaaatcatcaaagccggatcgtttgaaagacattaataactggagacctatcacgatcggttccatcttgctgagactgttctccaggattgtaacagctaggctgagcaaagcgtgccccctgaacccaaggcaaagaggctttatcagagcggcgggatgctctgaaaacttaaaactcctgcaaactataatttggtcggccaaaagagaacacagaccactgggtgttgtattcgtggacatcgccaaggcttttgacaccgtaagccaccagcacatcattcatgctttgcagcaaagagaggtggatccccacatcgtcggtctggtgagcaatatgtacgagaacatcagtacgtatatcaccacaaagaggaacacacacacagacaaaatccagatccgggttggagtaaagcagggtgacccgatgtcgccccttttatttaacctggcaatggaccctctattatgcaagctggaagagagtggcaaaggataccaccgaggacagagcagcatcacagcgatggcatttgcagacgatctggttttgctgagcgactcctgggaaaatatgaatacaaatattagcatactggagaccttctgcaatctgaccggactcaaaacacaggggcaaaagtgccacggcttttacatcaagccgacaaaggactcttacaccatcaatgactgcgctgcctggactatcaacggcacacccctgaacatgatcgaccccggcgaatctgagaaatacctcggcctgcagtttgacccgtggattggaatagcaaggtccggtctctccacaaaactagatttttggcttcagcggatcgatcaagcaccacttaaacctctgcagaaaactgatattctcaaaacatacaccatccctcggctgatctacatagctgaccactcagaagtgaaaactgcactactcgaaacccttgaccagaagatccggacagcggtcaaggaatggcttcacctacctccgtgcacctgcgatgccatcctgtactcgagcacgagagacggcggtttgggcatcaccaaattggcaggactgatccccagcgtgcaggcccgtagactgcatcggatcgcacagtcatctgacgatacgatgaaatgcttcatggaaaaagagaaaatggaacagctgcataagaaattgtggattcaagctggaggggacagagagaacataccctcgatttgggaagcaccaccgtcgagtgaaccaccaaacaacgtgagcacaaattcggaatgggaagcaccgacccagaaagataaatttccaaagccttgcaattggaggaaaaacgaattcaaaaaatggaccaaattggcatcccaaggccgcggaattgtaaattttgaaagagacaaaattagtaaccattggatccaatactacagacgcatacctcacaggaaactcctcactgcactacaactcagggccaacgtttaccccacgagagaatttctagccaggggtagacaagaccaatacatcaaggcgtgtaggcactgcgatgcggacattgaatcctgcgcccacatcatcggcaactgcccagtgacacaggacgcccgaatcaagaggcacaattacatctgcgaactgcttctcgaggaggcgaagaagaaggactgggtagtgttcaaggaaccgcacataagggattccaacaaggaactgtacaaacctgacctgatatttgtgaaggatgcccgtgcacttgtcgtggatgtgacagtacggtatgaagcagccaaatcatcgctggaggaagccgctgcagagaaagtgagaaagtacaaacacctggaaacggaagtaagacatctcacgaatgcaaaggacgttacttttgtgggctttcccctaggagcgcgggggaaatggcaccaagataactttaaacttttgactgagcttggcctctccaaatcgaggcaagtgaaaatggcagagactttttccacagtagcgctcttttcatctgtggacattgtacatatgtttgccagtagggccagaaaatctatggttatgtaaaccggtagacatgataagatacattgatgagtttggacaaaccacaactagaatgcagtgaaaaaaatgctttatttgtgaaatttgtgatgctattgctttatttgtaaccattataagctgcaataaacaagttaacaacaacaaaaaaaaaaaaaaaaaaaaaaaaaaaaaaacgttgactaaaaaaaaaaaaaaaaaaaaaaaaaaaaaaaaaaaaaaaaaaaaaaaaaaaaaaaaaaaaaaaaaaaaaa

SEQ ID NO: 10155 - DNA, 8857 bp, synthetic construct
  source 1..8857: mol_type = other DNA
ggtctagttacaactgggcatcgctgcagagatcgcacctcctcgtggtcccgctggtagcccttcgaagggtgactaagtcgatctctgccccaggtacggagccgttgggactcaccagtccaacgtaactcctgcctaaattcggtgaaacaaattcctcggtaaaaagccccatgaaacggacagccgacggaagcgagttcgagtcaccaaagaagaagcggaaagtcgacaagaagtacagcatcggcctggcaatcggcaccaactctgtgggctgggccgtgatcaccgacgagtacaaggtgcccagcaagaaattcaaggtgctgggcaacaccgaccggcacagcatcaagaagaacctgatcggagccctgctgttcgacagcggcgaaacagccgaggccacccggctgaagagaaccgccagaagaagatacaccagacggaagaaccggatctgctatctgcaagagatcttcagcaacgagatggccaaggtggacgacagcttcttccacagactggaagagtccttcctggtggaagaggataagaagcacgagcggcaccccatcttcggcaacatcgtggacgaggtggcctaccacgagaagtaccccaccatctaccacctgagaaagaaactggtggacagcaccgacaaggccgacctgcggctgatctatctggccctggcccacatgatcaagttccggggccacttcctgatcgagggcgacctgaaccccgacaacagcgacgtggacaagctgttcatccagctggtgcagacctacaaccagctgttcgaggaaaaccccatcaacgccagcggcgtggacgccaaggccatcctgtctgccagactgagcaagagcagacggctggaaaatctgatcgcccagctgcccggcgagaagaagaatggcctgttcggaaacctgattgccctgagcctgggcctgacccccaacttcaagagcaacttcgacctggccgaggatgccaaactgcagctgagcaaggacacctacgacgacgacctggacaacctgctggcccagatcggcgaccagtacgccgacctgtttctggccgccaagaacctgtccgacgccatcctgctgagcgacatcctgagagtgaacaccgagatcaccaaggcccccctgagcgcctctatgatcaagagatacgacgagcaccaccaggacctgaccctgctgaaagctctcgtgcggcagcagctgcctgagaagtacaaagagattttcttcgaccagagcaagaacggctacgccggctacattgacggcggagccagccaggaagagttctacaagttcatcaagcccatcctggaaaagatggacggcaccgaggaactgctcgtgaagctgaacagagaggacctgctgcggaagcagcggaccttcgacaacggcagcatcccccaccagatccacctgggagagctgcacgccattctgcggcggcaggaagatttttacccattcctgaaggacaaccgggaaaagatcgagaagatcctgaccttccgcatcccctactacgtgggccctctggccaggggaaacagcagattcgcctggatgaccagaaagagcgaggaaaccatcaccccctggaacttcgaggaagtggtggacaagggcgcttccgcccagagcttcatcgagcggatgaccaacttcgataagaacctgcccaacgagaaggtgctgcccaagcacagcctgctgtacgagtacttcaccgtgtataacgagctgaccaaagtgaaatacgtgaccgagggaatgagaaagcccgccttcctgagcggcgagcagaaaaaggccatcgtggacctgctgttcaagaccaaccggaaagtgaccgtgaagcagctgaaagaggactacttcaagaaaatcgagtgcttcgactccgtggaaatctccggcgtggaagatcggttcaacgcctccctgggcacataccacgatctgctgaaaattatcaaggacaaggacttcctggacaatgaggaaaacgaggacattctggaagatatcgtgctgaccctgacactgtttgaggacagagagatgatcgaggaacggctgaaaacctatgcccacctgttcgacgacaaagtgatgaagcagctgaagcggcggagatacaccggctggggcaggctgagccggaagctgatcaacggcatccgggacaagcagtccggcaagacaatcctggatttcctgaagtccgacggcttcgccaacagaaacttcatgcagctgatccacgacgacagcctgacctttaaagaggacatccagaaagcccaggtgtccggccagggcgatagcctgcacgagcacattgccaatctggccggcagccccgccattaagaagggcatcctgcagacagtgaaggtggtggacgagctcgtgaaagtgatgggccggcacaagcccgagaacatcgtgatcgaaatggccagagagaaccagaccacccagaagggacagaagaacagccgcgagagaatgaagcggatcgaagagggcatcaaagagctgggcagccagatcctgaaagaacaccccgtggaaaacacccagctgcagaacgagaagctgtacctgtactacctgcagaatgggcgggatatgtacgtggaccaggaactggacatcaaccggctgtccgactacgatgtggacgctatcgtgcctcagagctttctgaaggacgactccatcgacaacaaggtgctgaccagaagcgacaagaaccggggcaagagcgacaacgtgccctccgaagaggtcgtgaagaagatgaagaactactggcggcagctgctgaacgccaagctgattacccagagaaagttcgacaatctgaccaaggccgagagaggcggcctgagcgaactggataaggccggcttcatcaagagacagctggtggaaacccggcagatcacaaagcacgtggcacagatcctggactcccggatgaacactaagtacgacgagaatgacaagctgatccgggaagtgaaagtgatcaccctgaagtccaagctggtgtccgatttccggaaggatttccagttttacaaagtgcgcgagatcaacaactaccaccacgcccacgacgcctacctgaacgccgtcgtgggaaccgccctgatcaaaaagtaccctaagctggaaagcgagttcgtgtacggcgactacaaggtgtacgacgtgcggaagatgatcgccaagagcgagcaggaaatcggcaaggctaccgccaagtacttcttctacagcaacatcatgaactttttcaagaccgagattaccctggccaacggcgagatccggaagcggcctctgatcgagacaaacggcgaaaccggggagatcgtgtgggataagggccgggattttgccaccgtgcggaaagtgctgagcatgccccaagtgaatatcgtgaaaaagaccgaggtgcagacaggcggcttcagcaaagagtctatcctgcccaagaggaacagcgataagctgatcgccagaaagaaggactgggaccctaagaagtacggcggcttcgacagccccaccgtggcctattctgtgctggtggtggccaaagtggaaaagggcaagtccaagaaactgaagagtgtgaaagagctgctggggatcaccatcatggaaagaagcagcttcgagaagaatcccatcgactttctggaagccaagggctacaaagaagtgaaaaaggacctgatcatcaagctgcctaagtactccctgttcgagctggaaaacggccggaagagaatgctggcctctgccggcgaactgcagaagggaaacgaactggccctgccctccaaatatgtgaacttcctgtacctggccagccactatgagaagctgaagggctcccccgaggataatgagcagaaacagctgtttgtggaacagcacaagcactacctggacgagatcatcgagcagatcagcgagttctccaagagagtgatcctggccgacgctaatctggacaaagtgctgtccgcctacaacaagcaccgggataagcccatcagagagcaggccgagaatatcatccacctgtttaccctgaccaatctgggagcccctgccgccttcaagtactttgacaccaccatcgaccggaagaggtacaccagcaccaaagaggtgctggacgccaccctgatccaccagagcatcaccggcctgtacgagacacggatcgacctgtctcagctgggaggtgactctggaggatctagcggaggatcctctggcagcgagacaccaggaacaagcgagtcagcaacaccagagagcagtggcggcagcagcggcggcagcagcgcttcttgcccgaaacctggccccccggtttcagcaggggcaatgagtttggaaagtggactgaccacccactccgttctcgccatcgaacgtggtcccaattcgttggcaaattccggatcagactttgggggggggggtctggggctaccgttacgcctattgagggtatcggtcggcactcagacctcccgctccgactgggtagacctggtgtcctggagccacccaggacccacgtctaagtcccagcaggttgacctggtgtctttatttcctaaacaccgggttgacctgttatccaaaaacgaccaggtagacctggtggctcaatttttaccatctaaatttccccccaatttggcagaaaatgatttggctttgctggtgaacttagagttctacagatcggatttgcatgtgtatgagtgtgttcattttgctgcacattgggagggattaagtggtttgcctgaggtgtatgaacaacttgcaccacaaccgtgtgtgggagaaactttacattctagcctcccacgagacagtgaactgtttgtgcctgaagaggggagcagcgagaaggagagcgaggacgcgccaaaaacatctcctccgacgcctgggaaacatggtttggaacagactggggaggaaaaagtgatggtgactgttcctgacaaaaatccaccttgtccttgctgtggtacccgggtaaactctgtgttgaatctgattgaacatctgaaagtgtcacacgggaaaaggggggtttgttttcggtgtgcaaaatgtggaaaggaaaatagtaactatcacagtgttgtttgtcattttccaaaatgcaggggtccagagacggagaaagccccagctggggagtggatttgtgaggtatgcaacagagattttacaaccaaaattggcctgggacaacacaagagattggcacacccagcagtgagaaatcaggaaaggatcgttgcttcccaaccgaaagaaacatcaaatagaggtgctcacaaaaggtgctggacaaaggaggaggaagaattactaataagactggaggctcagttcgagggaaacaaaaatattaataagcttattgcagaacacataaccaccaaaacagctaagcagatcagtgacaaaaggcgattgctgtccagaaagccagcagaggagccacgtgaggagcctggaacgtgtcatcacaccaggagagcagctgcgagcctgagaacggagcctgagatgagtcatcacgcccaggcagaggacagagataatggacctgggagacgccctctgccaggcagggcagctgccggagggagaacaatggacgagataagacgccaccctgataagggcaacggacagcagagacccaccaagcaaaaatcagaagaacagctgcaggcttactataaaaagacactagaggaacgactttcagctggggcacttaacaccttcccccgagcattcaagcaggtaatggaaggccgggatataaagctagtaatcaatcagacagcgcaggactgcttcggatgcctggaatccataagccaaataagaacggcaacccgagataaaaaggacacggtgacccgggagaaacacccaaagaaaccttttcagaagtggatgaaggacagagcaatcaaaaaaggtaattatcttcggttccagcgtttattttatcttgatagagggaaactggctaaaatcattttagatgatattgaatgcttgtcttgtgacataccactcagtgaaatttattcggtttttaaaacaagatgggaaacaactggtagctttaaaagccttggggactttaaaacttacgggaaggctgacaacactgccttcagagaattaattacggctaaagaaattgagaaaaatgtgcaggaaatgagcaaaggctcggctcccggtccagacgggattactcttggggacgtcgtaaagatggatcccgagttttcccggaccatggagattttcaatttatggttaacaactggtaaaatcccggacatggtgagggggtgcagaaccgttttgattccaaaatcatcaaagccggatcgtttgaaagacattaataactggagacctatcacgatcggttccatcttgctgagactgttctccaggattgtaacagctaggctgagcaaagcgtgccccctgaacccaaggcaaagaggctttatcagagcggcgggatgctctgaaaacttaaaactcctgcaaactataatttggtcggccaaaagagaacacagaccactgggtgttgtattcgtggacatcgccaaggcttttgacaccgtaagccaccagcacatcattcatgctttgcagcaaagagaggtggatccccacatcgtcggtctggtgagcaatatgtacgagaacatcagtacgtatatcaccacaaagaggaacacacacacagacaaaatccagatccgggttggagtaaagcagggtgacccgatgtcgccccttttatttaacctggcaatggaccctctattatgcaagctggaagagagtggcaaaggataccaccgaggacagagcagcatcacagcgatggcatttgcagacgatctggttttgctgagcgactcctgggaaaatatgaatacaaatattagcatactggagaccttctgcaatctgaccggactcaaaacacaggggcaaaagtgccacggcttttacatcaagccgacaaaggactcttacaccatcaatgactgcgctgcctggactatcaacggcacacccctgaacatgatcgaccccggcgaatctgagaaatacctcggcctgcagtttgacccgtggattggaatagcaaggtccggtctctccacaaaactagatttttggcttcagcggatcgatcaagcaccacttaaacctctgcagaaaactgatattctcaaaacatacaccatccctcggctgatctacatagctgaccactcagaagtgaaaactgcactactcgaaacccttgaccagaagatccggacagcggtcaaggaatggcttcacctacctccgtgcacctgcgatgccatcctgtactcgagcacgagagacggcggtttgggcatcaccaaattggcaggactgatccccagcgtgcaggcccgtagactgcatcggatcgcacagtcatctgacgatacgatgaaatgcttcatggaaaaagagaaaatggaacagctgcataagaaattgtggattcaagctggaggggacagagagaacataccctcgatttgggaagcaccaccgtcgagtgaaccaccaaacaacgtgagcacaaattcggaatgggaagcaccgacccagaaagataaatttccaaagccttgcaattggaggaaaaacgaattcaaaaaatggaccaaattggcatcccaaggccgcggaattgtaaattttgaaagagacaaaattagtaaccattggatccaatactacagacgcatacctcacaggaaactcctcactgcactacaactcagggccaacgtttaccccacgagagaatttctagccaggggtagacaagaccaatacatcaaggcgtgtaggcactgcgatgcggacattgaatcctgcgcccacatcatcggcaactgcccagtgacacaggacgcccgaatcaagaggcacaattacatctgcgaactgcttctcgaggaggcgaagaagaaggactgggtagtgttcaaggaaccgcacataagggattccaacaaggaactgtacaaacctgacctgatatttgtgaaggatgcccgtgcacttgtcgtggatgtgacagtacggtatgaagcagccaaatcatcgctggaggaagccgctgcagagaaagtgagaaagtacaaacacctggaaacggaagtaagacatctcacgaatgcaaaggacgttacttttgtgggctttcccctaggagcgcgggggaaatggcaccaagataactttaaacttttgactgagcttggcctctccaaatcgaggcaagtgaaaatggcagagactttttccacagtagcgctcttttcatctgtggacattgtacatatgtttgccagtagggccagaaaatctatggttatgtaaaccggtagacatgataagatacattgatgagtttggacaaaccacaactagaatgcagtgaaaaaaatgctttatttgtgaaatttgtgatgctattgctttatttgtaaccattataagctgcaataaacaagttaacaacaacaaaaaaaaaaaaaaaaaaaaaaaaaaaaaaacgttgactaaaaaaaaaaaaaaaaaaaaaaaaaaaaaaaaaaaaaaaaaaaaaaaaaaaaaaaaaaaaaaaaaaaaaa

SEQ ID NO: 10156 - DNA, 8368 bp, synthetic construct
  source 1..8368: mol_type = other DNA
ggtctagttacaactgggcatcgctgcagagatcgcacctcctcgtggtcccgctggtagcccttcgaagggtgactaagtcgatctctgccccaggtacggagccgttgggactcaccagtccaacgtaactcctgcctaaattcggtgaaacaaattcctcggtaaaaagccccatgaaacggacagccgacggaagcgagttcgagtcaccaaagaagaagcggaaagtcgacaagaagtacagcatcggcctggacatcggcaccaactctgtgggctgggccgtgatcaccgacgagtacaaggtgcccagcaagaaattcaaggtgctgggcaacaccgaccggcacagcatcaagaagaacctgatcggagccctgctgttcgacagcggcgaaacagccgaggccacccggctgaagagaaccgccagaagaagatacaccagacggaagaaccggatctgctatctgcaagagatcttcagcaacgagatggccaaggtggacgacagcttcttccacagactggaagagtccttcctggtggaagaggataagaagcacgagcggcaccccatcttcggcaacatcgtggacgaggtggcctaccacgagaagtaccccaccatctaccacctgagaaagaaactggtggacagcaccgacaaggccgacctgcggctgatctatctggccctggcccacatgatcaagttccggggccacttcctgatcgagggcgacctgaaccccgacaacagcgacgtggacaagctgttcatccagctggtgcagacctacaaccagctgttcgaggaaaaccccatcaacgccagcggcgtggacgccaaggccatcctgtctgccagactgagcaagagcagacggctggaaaatctgatcgcccagctgcccggcgagaagaagaatggcctgttcggaaacctgattgccctgagcctgggcctgacccccaacttcaagagcaacttcgacctggccgaggatgccaaactgcagctgagcaaggacacctacgacgacgacctggacaacctgctggcccagatcggcgaccagtacgccgacctgtttctggccgccaagaacctgtccgacgccatcctgctgagcgacatcctgagagtgaacaccgagatcaccaaggcccccctgagcgcctctatgatcaagagatacgacgagcaccaccaggacctgaccctgctgaaagctctcgtgcggcagcagctgcctgagaagtacaaagagattttcttcgaccagagcaagaacggctacgccggctacattgacggcggagccagccaggaagagttctacaagttcatcaagcccatcctggaaaagatggacggcaccgaggaactgctcgtgaagctgaacagagaggacctgctgcggaagcagcggaccttcgacaacggcagcatcccccaccagatccacctgggagagctgcacgccattctgcggcggcaggaagatttttacccattcctgaaggacaaccgggaaaagatcgagaagatcctgaccttccgcatcccctactacgtgggccctctggccaggggaaacagcagattcgcctggatgaccagaaagagcgaggaaaccatcaccccctggaacttcgaggaagtggtggacaagggcgcttccgcccagagcttcatcgagcggatgaccaacttcgataagaacctgcccaacgagaaggtgctgcccaagcacagcctgctgtacgagtacttcaccgtgtataacgagctgaccaaagtgaaatacgtgaccgagggaatgagaaagcccgccttcctgagcggcgagcagaaaaaggccatcgtggacctgctgttcaagaccaaccggaaagtgaccgtgaagcagctgaaagaggactacttcaagaaaatcgagtgcttcgactccgtggaaatctccggcgtggaagatcggttcaacgcctccctgggcacataccacgatctgctgaaaattatcaaggacaaggacttcctggacaatgaggaaaacgaggacattctggaagatatcgtgctgaccctgacactgtttgaggacagagagatgatcgaggaacggctgaaaacctatgcccacctgttcgacgacaaagtgatgaagcagctgaagcggcggagatacaccggctggggcaggctgagccggaagctgatcaacggcatccgggacaagcagtccggcaagacaatcctggatttcctgaagtccgacggcttcgccaacagaaacttcatgcagctgatccacgacgacagcctgacctttaaagaggacatccagaaagcccaggtgtccggccagggcgatagcctgcacgagcacattgccaatctggccggcagccccgccattaagaagggcatcctgcagacagtgaaggtggtggacgagctcgtgaaagtgatgggccggcacaagcccgagaacatcgtgatcgaaatggccagagagaaccagaccacccagaagggacagaagaacagccgcgagagaatgaagcggatcgaagagggcatcaaagagctgggcagccagatcctgaaagaacaccccgtggaaaacacccagctgcagaacgagaagctgtacctgtactacctgcagaatgggcgggatatgtacgtggaccaggaactggacatcaaccggctgtccgactacgatgtggacgctatcgtgcctcagagctttctgaaggacgactccatcgacaacaaggtgctgaccagaagcgacaagaaccggggcaagagcgacaacgtgccctccgaagaggtcgtgaagaagatgaagaactactggcggcagctgctgaacgccaagctgattacccagagaaagttcgacaatctgaccaaggccgagagaggcggcctgagcgaactggataaggccggcttcatcaagagacagctggtggaaacccggcagatcacaaagcacgtggcacagatcctggactcccggatgaacactaagtacgacgagaatgacaagctgatccgggaagtgaaagtgatcaccctgaagtccaagctggtgtccgatttccggaaggatttccagttttacaaagtgcgcgagatcaacaactaccaccacgcccacgacgcctacctgaacgccgtcgtgggaaccgccctgatcaaaaagtaccctaagctggaaagcgagttcgtgtacggcgactacaaggtgtacgacgtgcggaagatgatcgccaagagcgagcaggaaatcggcaaggctaccgccaagtacttcttctacagcaacatcatgaactttttcaagaccgagattaccctggccaacggcgagatccggaagcggcctctgatcgagacaaacggcgaaaccggggagatcgtgtgggataagggccgggattttgccaccgtgcggaaagtgctgagcatgccccaagtgaatatcgtgaaaaagaccgaggtgcagacaggcggcttcagcaaagagtctatcctgcccaagaggaacagcgataagctgatcgccagaaagaaggactgggaccctaagaagtacggcggcttcgacagccccaccgtggcctattctgtgctggtggtggccaaagtggaaaagggcaagtccaagaaactgaagagtgtgaaagagctgctggggatcaccatcatggaaagaagcagcttcgagaagaatcccatcgactttctggaagccaagggctacaaagaagtgaaaaaggacctgatcatcaagctgcctaagtactccctgttcgagctggaaaacggccggaagagaatgctggcctctgccggcgaactgcagaagggaaacgaactggccctgccctccaaatatgtgaacttcctgtacctggccagccactatgagaagctgaagggctcccccgaggataatgagcagaaacagctgtttgtggaacagcacaagcactacctggacgagatcatcgagcagatcagcgagttctccaagagagtgatcctggccgacgctaatctggacaaagtgctgtccgcctacaacaagcaccgggataagcccatcagagagcaggccgagaatatcatccacctgtttaccctgaccaatctgggagcccctgccgccttcaagtactttgacaccaccatcgaccggaagaggtacaccagcaccaaagaggtgctggacgccaccctgatccaccagagcatcaccggcctgtacgagacacggatcgacctgtctcagctgggaggtgactctggaggatctagcggaggatcctctggcagcgagacaccaggaacaagcgagtcagcaacaccagagagcagtggcggcagcagcggcggcagcagcgcttcttgcccgaaacctggccccccggtttcagcaggggcaatgagtttggaaagtggactgaccacccactccgttctcgccatcgaacgtggtcccaattcgttggcaaattccggatcagactttgggggggggggtctggggctaccgttacgcctattgagggtatcggtcggcactcagacctcccgctccgactgggtagacctggtgtcctggagccacccaggacccacgtctaagtcccagcaggttgacctggtgtctttatttcctaaacaccgggttgacctgttatccaaaaacgaccaggtagacctggtggctcaatttttaccatctaaatttccccccaatttggcagaaaatgatttggctttgctggtgaacttagagttctacagatcggatttgcatgtgtatgagtgtgttcattttgctgcacattgggagggattaagtggtttgcctgaggtgtatgaacaacttgcaccacaaccgtgtgtgggagaaactttacattctagcctcccacgagacagtgaactgtttgtgcctgaagaggggagcagcgagaaggagagcgaggacgcgccaaaaacatctcctccgacgcctgggaaacatggtttggaacagactggggaggaaaaagtgatggtgactgttcctgacaaaaatccaccttgtccttgctgtggtacccgggtaaactctgtgttgaatctgattgaacatctgaaagtgtcacacgggaaaaggggggtttgttttcggtgtgcaaaatgtggaaaggaaaatagtaactatcacagtgttgtttgtcattttccaaaatgcaggggtccagagacggagaaagccccagctggggagtggatttgtgaggtatgcaacagagattttacaaccaaaattggcctgggacaacacaagagattggcacacccagcagtgagaaatcaggaaaggatcgttgcttcccaaccgaaagaaacatcaaatagaggtgctcacaaaaggtgctggacaaaggaggaggaagaattactaataagactggaggctcagttcgagggaaacaaaaatattaataagcttattgcagaacacataaccaccaaaacagctaagcagatcagtgacaaaaggcgattgctgtccagaaagccagcagaggagccacgtgaggagcctggaacgtgtcatcacaccaggagagcagctgcgagcctgagaacggagcctgagatgagtcatcacgcccaggcagaggacagagataatggacctgggagacgccctctgccaggcagggcagctgccggagggagaacaatggacgagataagacgccaccctgataagggcaacggacagcagagacccaccaagcaaaaatcagaagaacagctgcaggcttactataaaaagacactagaggaacgactttcagctggggcacttaacaccttcccccgagcattcaagcaggtaatggaaggccgggatataaagctagtaatcaatcagacagcgcaggactgcttcggatgcctggaatccataagccaaataagaacggcaacccgagataaaaaggacacggtgacccgggagaaacacccaaagaaaccttttcagaagtggatgaaggacagagcaatcaaaaaaggtaattatcttcggttccagcgtttattttatcttgatagagggaaactggctaaaatcattttagatgatattgaatgcttgtcttgtgacataccactcagtgaaatttattcggtttttaaaacaagatgggaaacaactggtagctttaaaagccttggggactttaaaacttacgggaaggctgacaacactgccttcagagaattaattacggctaaagaaattgagaaaaatgtgcaggaaatgagcaaaggctcggctcccggtccagacgggattactcttggggacgtcgtaaagatggatcccgagttttcccggaccatggagattttcaatttatggttaacaactggtaaaatcccggacatggtgagggggtgcagaaccgttttgattccaaaatcatcaaagccggatcgtttgaaagacattaataactggagacctatcacgatcggttccatcttgctgagactgttctccaggattgtaacagctaggctgagcaaagcgtgccccctgaacccaaggcaaagaggctttatcagagcggcgggatgctctgaaaacttaaaactcctgcaaactataatttggtcggccaaaagagaacacagaccactgggtgttgtattcgtggacatcgccaaggcttttgacaccgtaagccaccagcacatcattcatgctttgcagcaaagagaggtggatccccacatcgtcggtctggtgagcaatatgtacgagaacatcagtacgtatatcaccacaaagaggaacacacacacagacaaaatccagatccgggttggagtaaagcagggtgacccgatgtcgccccttttatttaacctggcaatggaccctctattatgcaagctggaagagagtggcaaaggataccaccgaggacagagcagcatcacagcgatggcatttgcagacgatctggttttgctgagcgactcctgggaaaatatgaatacaaatattagcatactggagaccttctgcaatctgaccggactcaaaacacaggggcaaaagtgccacggcttttacatcaagccgacaaaggactcttacaccatcaatgactgcgctgcctggactatcaacggcacacccctgaacatgatcgaccccggcgaatctgagaaatacctcggcctgcagtttgacccgtggattggaatagcaaggtccggtctctccacaaaactagatttttggcttcagcggatcgatcaagcaccacttaaacctctgcagaaaactgatattctcaaaacatacaccatccctcggctgatctacatagctgaccactcagaagtgaaaactgcactactcgaaacccttgaccagaagatccggacagcggtcaaggaatggcttcacctacctccgtgcacctgcgatgccatcctgtactcgagcacgagagacggcggtttgggcatcaccaaattggcaggactgatccccagcgtgcaggcccgtagactgcatcggatcgcacagtcatctgacgatacgatgaaatgcttcatggaaaaagagaaaatggaacagctgcataagaaattgtggattcaagctggaggggacagagagaacataccctcgatttgggaagcaccaccgtcgagtgaaccaccaaacaacgtgagcacaaattcggaatgggaagcaccgacccagaaagataaatttccaaagccttgcaattggaggaaaaacgaattcaaaaaatggaccaaattggcatcccaaggccgcggaattgtaaattttgaaagagacaaaattagtaaccattggatccaatactacagacgcatacctcacaggaaactcctcactgcactacaactcagggccaacgtttaccccacgagagaatttctagccaggggtagacaagaccaatacatcaaggcgtgtaggcactgcgatgcggacattgaatcctgcgcccacatcatcggctaaaccggtagacatgataagatacattgatgagtttggacaaaccacaactagaatgcagtgaaaaaaatgctttatttgtgaaatttgtgatgctattgctttatttgtaaccattataagctgcaataaacaagttaacaacaacaaaaaaaaaaaaaaaaaaaaaaaaaaaaaaacgttgactaaaaaaaaaaaaaaaaaaaaaaaaaaaaaaaaaaaaaaaaaaaaaaaaaaaaaaaaaaaaaaaaaaaaaa

SEQ ID NO: 10157 - DNA, 5509 bp, synthetic construct
  source 1..5509: mol_type = other DNA
gtaataataataataataataataataataataataataatcccccccgcaggtgccaccttgacgtggtgggggcttagctgctccaatgatgactgagggctgtgctggcggtagtgtaactaccggcaggtccaaccaagccagagaggcctcagctgaggagcacaaccaagagcacctaacccattagcattatggagaatcaaacccaaacgaagtctatactggctcggtcgtcgcccaggataaaaaggaccgcggtggatgctgctgattctggacatccatcgacaagtgggctacggaatcatcaaaacccaaatgaacagtcacagaagcggcaaaaatatacaatgccagaaaaccgcacaattatgaaatgctactacaaatctgaacctcaaaggcgtggctaccaaaaaaggatgcatcagctatggaaacaagagtaccctgactcacagataacagaaccccgactggctgaccaacgaagattcataatcagaaacaaagtgttcagtgaagttgaactcgaagaaatccagaaaatttgcaaagtagattaccatcagaccacagcacagacagcagcagagactccagcaacacttggaatggtggaacagattgaaccagaagaaagtgtggcgcttttgcaagaatttgaggaaccagcacttgaaacatctgttgaaccaccaggaaccttgacagcaagacaacaagagctcaaggataagatcatggctcatgctgcagcaaatgcaataagacagcggctcccaactctaaaaacagtgcccaagagacacctggcgcctctcatgaaagatgtgaatgcagcactctccactgtccaaataacatcaattgaacaaacaaaccagtttgcctacagtgcagcagtgatagtaacagaagaacttgggctcctacaaccaaggcagccccaaagaaaatcgactggaaaaccaaagtggaaggtcaggctagagttgaaaatcaagaaacttagatcagatgcaagtaacctgaaaaatatgaaagagaggaaactgaagaatgacaaaatcaagcaatacctgatccgaaagtactggctgaacaccagaaaaattgaagaagctttggaaatcgtgaaagaacaaattacagcaacagccagaaaaattgaaaggtatgaagccagaatcatccagtacagacaacggaaaagacggcagacaagcatgaccgacttctaccactctaagcggagactgatcttcagcaagagaaagcctccagagaaaactgcaacaacaaagttctggaaagaactttgggaaaataataaaaactacaacaaaaacgctgggtggataaaggagtttgaaggaaaattctcacagaacaaaatggaactgatggaaataacaactgaaatgatcagcaaacgagtgcaaaaagtcaagaactggacatcgcctggtagtgatcaacttcatggattttggctcaaacatctgattagtttacatggaaaaatggcccaacaattcaatgagatgctgcagaaaggaagtatcagtgaatggctaacaactggaagaacatacctgatacaaaaggatccagcaaaaggagcagcaccaggaaactacaggccaataacgtgtctgcccactatgtttaaactactgactggcatcatagctgacagaattcaagactatcttgaagaaaaaaacatcttgccagatgaacagaaaggcaacaaacggaaaagcaggggcacaaaagaccagttattgattgacaaaatgattctggagaactgtaagagccgaaaagctaatcttcacatgacgtggattgactacaaaaaggcctttgactcactcccacacagctggatcatcaagtgcctggacgccatcgggatttgtaaaacagttggcaccttcattgaaaacatgatggagcactggaaaactgaactgtttgttggaaatgaaagctatggacttgtcaacatcaggagaggaattttccagggagattcattgtcccctctgcttttcattattgccatgatccctctgtcaacaatcttacaaaaaacaaatctcggctatcaaatatctaagaattctcacaaaatttcacatttgatgtacatggatgacctgaagctatatgggaaaacggaaactgaaatccagtctctgaccaacactgtccgaatttttagcactgatatcaacatggagtttggtttggacaaatgttcgacagtggcattgaagaagggaaaaatcattgaaagtgagggcataaatatgcccaatggccaaacaataaagtgtcaccagccagaggcctataaatatctgggcatactacagctggacaacatcaagcatgaacatgtgaaaactgtggtcagcaaagaatacacacaaagggtcagaaaaattctcaaaagcaagctcaatggaggcaacaccatcaaggccataaacacctgggccatacctgtcataagatatactgctggcattataaattggacacaggtggaactggacaatttggacagaaaaacaagaaaactcatgaccattcatcattcactgcaccctcgcagtgatgttgaccggctatatctgcctagaagatcagggggcagaggactcttacaagtaaagcaagcagtcaaagaagaagaacatgccctggcagaatatgtcaagcaaagtgaagaacctgctttgattgaagtcaaaaatcagaaactcctcaaaacacagcagacaaaaaaccagtacaagaaaaccgcactacaaactagagctgacagctggcacaacaaaacactgcatggaaagttccttgacaaaattgaaggaaaagctgataaggagaagacctggctctggctcacgaatgggaccctgaagaaggagacagaaggcctgatccttgcagcccaggagcaagccatcagaacaaatgcaattaaggccaagattgaaaaatcagctgatgacccaaaatgcagactgtgcaaggaaaccgacgaaaccattgatcatatcctcagctgctgtaagaaaatcgcacagacagactacaaacagaggcacaactatgtggcccaaatgattcattggaacttatgcctcaagtaccacctcccagcagcaaagaactggtgggatcacaaacctgcaaaagtattggaaaatgaacatgcaaagatactgtgggacttccgaatccagactgacaaagttctggaacacaacacaccagacatcacagttgtggaaaagaacaaggtttggatcattgatgttgccatcccaggtgacagtcgcatagatgaaaaacaacaggaaaaactcagccgctatcaggacctcaagattgaacttcaaagactctggcagaaaccagtacaggtggtcccggtggtgatgggcacactgggtgctgtgccaaaagatctcagccggcatttggaaacaatagacattgacaaaatcaccatctgccaactgcaaaaggccaccctactgggatctgcacacatcatcagaaaatacatcacacagtcctaggcggcctactcgacggatcgatccgaacaaacgacccaacacccgtgcgttttattctgtctttttattgccgatcccctcagaagaactcgtcaagaaggcgatagaaggcgatgcgctgcgaatcgggagcggcgataccgtaaagcacgaggaagcggtcagcccattcgccgccaagctcttcagcaatatcacgggtagccaacgctatgtcctgatagcggtcggccgctttacttgtacagctcgtccatgccgagagtgatcccggcggcggtcacgaactccagcaggaccatgtgatcgcgcttctcgttggggtctttgctcagggcggactgggtgctcaggtagtggttgtcgggcagcagcacggggccgtcgccgatgggggtgttctgctggtagtggtcggccagctgcacgctgccgtcctcgatgttgtggcggatcttgaagttcaccttgatgccgttcttctgcttgtcggccatgatatagacgttgtggctgttgtagttgtactccagcttgtgccccaggatgttgccgtcctccttgaagtcgatgcccttcagctcgatgcggttcaccagggtgtcgccctcgaacttcacctcggcgcgggtcttgtagttgccgtcgtccttgaagaagatggtgcgctcctggacgtagccttcgggcatggcggacttgaagaagtcgtgctgcttcatgtggtcggggtagcggctgaagcactgcacgccgtaggtcagggtggtcacgagggtgggccagggcacgggcagcttgccggtggtgcagatgaacttcagggtcagcttgccgtaggtggcatcgccctcgccctcgccggacacgctgaacttgtggccgtttacgtcgccgtccagctcgaccaggatgggcaccaccccggtgaacagctcctcgcccttgctcaccatggtggcgaattcgaagcttgagctcgagatctgagtccggtagcgctagcggatctgacggttcactaaaccagctctgcttatatagacctcccaccgtacacgcctaccgcccatttgcgtcaatggggcggagttgttacgacattttggaaagtcccgttgattttggtgccaaaacaaactcccattgacgtcaatggggtggagacttggaaatccccgtgagtcaaaccgctatccacgcccattgatgtactgccaaaaccgcatcaccatggtaatagcgatgactaatacgtagatgtactgccaagtaggaaagtcccataaggtcatgtactgggcataatgccaggcgggccatttaccgtcattgacgtcaatagggggcgtacttggcatatgatacacttgatgtactgccaagtgggcagtttaccgtaaatactccacccattgacgtcaatggaaagtccctattggcgttactatgggaacatacgtcattattgacgtcaatgggcgggggtcgttgggcggtcagccaggcgggccatttaccgtaagttatgtaacgcggaactccatatatgggctatgaactaatgaccccgtaattgattactattaaattcctgcaggtttgggacacttgggaagtgttcgacttgtggttttgcgaaacgaaatccagcatatctatcttgtttgctgtgccatacaacgtcgttgtgttgataataataataagcggccgcggatccgcgatgatgatcagacatgataagatacattgatgagtttggacaaaccacaactagaatgcagtgaaaaaaatgctttatttgtgaaatttgtgatgctattgctttatttgtaaccattataagctgcaataaacaagttaacaacaacaaaaaaaaaaaaaaaaaaaaattt

SEQ ID NO: 10158 - DNA, 5509 bp, synthetic construct
  source 1..5509: mol_type = other DNA
gtaataataataataataataataataataataataataatcccccccgcaggtgccaccttgacgtggtgggggcttagctgctccaatgatgactgagggctgtgctggcggtagtgtaactaccggcaggtccaaccaagccagagaggcctcagctgaggagcacaaccaagagcacctaacccattagcattatggagaatcaaacccaaacgaagtctatactggctcggtcgtcgcccaggataaaaaggaccgcggtggatgctgctgattctggacatccatcgacaagtgggctacggaatcatcaaaacccaaatgaacagtcacagaagcggcaaaaatatacaatgccagaaaaccgcacaattatgaaatgctactacaaatctgaacctcaaaggcgtggctaccaaaaaaggatgcatcagctatggaaacaagagtaccctgactcacagataacagaaccccgactggctgaccaacgaagattcataatcagaaacaaagtgttcagtgaagttgaactcgaagaaatccagaaaatttgcaaagtagattaccatcagaccacagcacagacagcagcagagactccagcaacacttggaatggtggaacagattgaaccagaagaaagtgtggcgcttttgcaagaatttgaggaaccagcacttgaaacatctgttgaaccaccaggaaccttgacagcaagacaacaagagctcaaggataagatcatggctcatgctgcagcaaatgcaataagacagcggctcccaactctaaaaacagtgcccaagagacacctggcgcctctcatgaaagatgtgaatgcagcactctccactgtccaaataacatcaattgaacaaacaaaccagtttgcctacagtgcagcagtgatagtaacagaagaacttgggctcctacaaccaaggcagccccaaagaaaatcgactggaaaaccaaagtggaaggtcaggctagagttgaaaatcaagaaacttagatcagatgcaagtaacctgaaaaatatgaaagagaggaaactgaagaatgacaaaatcaagcaatacctgatccgaaagtactggctgaacaccagaaaaattgaagaagctttggaaatcgtgaaagaacaaattacagcaacagccagaaaaattgaaaggtatgaagccagaatcatccagtacagacaacggaaaagacggcagaccagcctgacagacttctttcactctaagcggagactgatcttcagcaagagaaagcctccagagaaaactgcaacaacaaagttctggaaagaactttgggaaaataataaaaactacaacaaaaacgctgggtggataaaggagtttgaaggaaaattctcacagaacaaaatggaactgatggaaataacaactgaaatgatcagcaaacgagtgcaaaaagtcaagaactggacatcgcctggtagtgatcaacttcatggattttggctcaaacatctgattagtttacatggaaaaatggcccaacaattcaatgagatgctgcagaaaggaagtatcagtgaatggctaacaactggaagaacatacctgatacaaaaggatccagcaaaaggagcagcaccaggaaactacaggccaataacgtgtctgcccactatgtttaaactactgactggcatcatagctgacagaattcaagactatcttgaagaaaaaaacatcttgccagatgaacagaaaggcaacaaacggaaaagcaggggcacaaaagaccagttattgattgacaaaatgattctggagaactgtaagagccgaaaagctaatcttcacatgacgtggattgactacaaaaaggcctttgactcactcccacacagctggatcatcaagtgcctggacgccatcgggatttgtaaaacagttggcaccttcattgaaaacatgatggagcactggaaaactgaactgtttgttggaaatgaaagctatggacttgtcaacatcaggagaggaattttccagggagattcattgtcccctctgcttttcattattgccatgatccctctgtcaacaatcttacaaaaaacaaatctcggctatcaaatatctaagaattctcacaaaatttcacatttgatgtacatggatgacctgaagctatatgggaaaacggaaactgaaatccagtctctgaccaacactgtccgaatttttagcactgatatcaacatggagtttggtttggacaaatgttcgacagtggcattgaagaagggaaaaatcattgaaagtgagggcataaatatgcccaatggccaaacaataaagtgtcaccagccagaggcctataaatatctgggcatactacagctggacaacatcaagcatgaacatgtgaaaactgtggtcagcaaagaatacacacaaagggtcagaaaaattctcaaaagcaagctcaatggaggcaacaccatcaaggccataaacacctgggccatacctgtcataagatatactgctggcattataaattggacacaggtggaactggacaatttggacagaaaaacaagaaaactcatgaccattcatcattcactgcaccctcgcagtgatgttgaccggctatatctgcctagaagatcagggggcagaggactcttacaagtaaagcaagcagtcaaagaagaagaacatgccctggcagaatatgtcaagcaaagtgaagaacctgctttgattgaagtcaaaaatcagaaactcctcaaaacacagcagacaaaaaaccagtacaagaaaaccgcactacaaactagagctgacagctggcacaacaaaacactgcatggaaagttccttgacaaaattgaaggaaaagctgataaggagaagacctggctctggctcacgaatgggaccctgaagaaggagacagaaggcctgatccttgcagcccaggagcaagccatcagaacaaatgcaattaaggccaagattgaaaaatcagctgatgacccaaaatgcagactgtgcaaggaaaccgacgaaaccattgatcatatcctcagctgctgtaagaaaatcgcacagacagactacaaacagaggcacaactatgtggcccaaatgattcattggaacttatgcctcaagtaccacctcccagcagcaaagaactggtgggatcacaaacctgcaaaagtattggaaaatgaacatgcaaagatactgtgggacttccgaatccagactgacaaagttctggaacacaacacaccagacatcacagttgtggaaaagaacaaggtttggatcattgatgttgccatcccaggtgacagtcgcatagatgaaaaacaacaggaaaaactcagccgctatcaggacctcaagattgaacttcaaagactctggcagaaaccagtacaggtggtcccggtggtgatgggcacactgggtgctgtgccaaaagatctcagccggcatttggaaacaatagacattgacaaaatcaccatctgccaactgcaaaaggccaccctactgggatctgcacacatcatcagaaaatacatcacacagtcctaggcggcctactcgacggatcgatccgaacaaacgacccaacacccgtgcgttttattctgtctttttattgccgatcccctcagaagaactcgtcaagaaggcgatagaaggcgatgcgctgcgaatcgggagcggcgataccgtaaagcacgaggaagcggtcagcccattcgccgccaagctcttcagcaatatcacgggtagccaacgctatgtcctgatagcggtcggccgctttacttgtacagctcgtccatgccgagagtgatcccggcggcggtcacgaactccagcaggaccatgtgatcgcgcttctcgttggggtctttgctcagggcggactgggtgctcaggtagtggttgtcgggcagcagcacggggccgtcgccgatgggggtgttctgctggtagtggtcggccagctgcacgctgccgtcctcgatgttgtggcggatcttgaagttcaccttgatgccgttcttctgcttgtcggccatgatatagacgttgtggctgttgtagttgtactccagcttgtgccccaggatgttgccgtcctccttgaagtcgatgcccttcagctcgatgcggttcaccagggtgtcgccctcgaacttcacctcggcgcgggtcttgtagttgccgtcgtccttgaagaagatggtgcgctcctggacgtagccttcgggcatggcggacttgaagaagtcgtgctgcttcatgtggtcggggtagcggctgaagcactgcacgccgtaggtcagggtggtcacgagggtgggccagggcacgggcagcttgccggtggtgcagatgaacttcagggtcagcttgccgtaggtggcatcgccctcgccctcgccggacacgctgaacttgtggccgtttacgtcgccgtccagctcgaccaggatgggcaccaccccggtgaacagctcctcgcccttgctcaccatggtggcgaattcgaagcttgagctcgagatctgagtccggtagcgctagcggatctgacggttcactaaaccagctctgcttatatagacctcccaccgtacacgcctaccgcccatttgcgtcaatggggcggagttgttacgacattttggaaagtcccgttgattttggtgccaaaacaaactcccattgacgtcaatggggtggagacttggaaatccccgtgagtcaaaccgctatccacgcccattgatgtactgccaaaaccgcatcaccatggtaatagcgatgactaatacgtagatgtactgccaagtaggaaagtcccataaggtcatgtactgggcataatgccaggcgggccatttaccgtcattgacgtcaatagggggcgtacttggcatatgatacacttgatgtactgccaagtgggcagtttaccgtaaatactccacccattgacgtcaatggaaagtccctattggcgttactatgggaacatacgtcattattgacgtcaatgggcgggggtcgttgggcggtcagccaggcgggccatttaccgtaagttatgtaacgcggaactccatatatgggctatgaactaatgaccccgtaattgattactattaaattcctgcaggtttgggacacttgggaagtgttcgacttgtggttttgcgaaacgaaatccagcatatctatcttgtttgctgtgccatacaacgtcgttgtgttgataataataataagcggccgcggatccgcgatgatgatcagacatgataagatacattgatgagtttggacaaaccacaactagaatgcagtgaaaaaaatgctttatttgtgaaatttgtgatgctattgctttatttgtaaccattataagctgcaataaacaagttaacaacaacaaaaaaaaaaaaaaaaaaaaattt

SEQ ID NO: 10159 - skipped

SEQ ID NO: 10160 - DNA, 6640 bp, synthetic construct
  source 1..6640: mol_type = other DNA
ggtctagttacaactgggcatcgctgcagagatcgcacctcctcgtggtcccgctggtagcccttcgaagggtgactaagtcgatctctgccccaggtacggagccgttgggactcaccagtccaacgtaactcctgcctaaattcggtgaaacaaattcctcggtaaaaagccccatgaaacggacagccgacggaagcgagttcgagtcaccaaagaagaagcggaaagtccggctgaagaaactggacaagcccacactgcacacctgtaacaagaccagcttcgccaaggccttcctgcctaacgagacataccggcagcggctgctggactatatcgccatcattcaccagctggccgaccacgcctctcacgccctgaagttttacatcctgagcacctccaccagcagcttccctgtggtgcacgaggataccatcgaggccatcctgtacctgctgaacaagggcgaagcctggcatcccagaaaagaggccaagaaggcctggcgggattgcctgctgccttacgtgcagagatactgccagatcgtgggcttcattcaccccaacctgagaggcgagcagcagagcatcaactacctgaccgtgtccatgatgaccaacctgaaagtgaacgtgcaagagcacttcatgcagatgctgctgcggtacatcaatctgcgcttcgacgtgaagggccagaagcagagactgcctcctaagagcgacgcccgcaaggcctttttcacccggctgagatacctgaagtccgtgttcctgttcgacgtggtgcccgagctggaattcctggacgatctgacccctctggaaagcgaggtgctggaagagatctggtccctggacctgccttttctgcccaacgatcctctggcctacgccatcgtggccgatcctatgagcttcttcccagcctactgcaagctgagcggcctgtacgagcagtacggcttccagcggtttagcgccattcctctgcggagaagcctgatccagtctcacgtgcggatcgacaccatcatcctgtatcagcacatcctgtgcatcaccagacgggacgccgagacagtggaaaaggacgacctgtggatgagagtgtgcaacctgtgcaccaaagccttccggtccagatgcggcatgcacttcgagggcagcatcacaacagatggcgccagcgtgtccgtgtacctgaaacaccctgaggccgataagtacggcaagagaggcgccagaaagtccgccaatactgtggccgccgaagtgaaggccctgtacgtggaaaacaacctgcctgcctgtagagccgccgagaacgtggtggtcatcgaccccaacaagcgggatatcctgtactgccaggacagcaacggcaccaccttcagatacaccgccaaccagagagccgtggaaaccggcagcagaagattcgccaagcggcgggaagccatgaaggaagaagccggcgttgacctgatcgagagcagaatccctagccacaagaccatgaacctgatggacttcaccagatacctgctcgtgcggagagccgactgggacagacggaaagagttctactctcaccccgctcacacccggtggaagtggcacagcttcatcaaccggcagaagtccgagagcgacctgatcagcaacatgcggaacaaatacggcgagaacttcaccgtggtcatgggcgattggagcgacgctggaagaaccgccagattccagaccagcagcaagaccaaaggctggcggaccctgttcaagcggaaccggatcgattgcttcctgctggacgagtacaagacctccagcgtgtgccctagatgcagcagcagcgagttcgtggaaaagaagttcaagacccggcctcacagcagaccctggcgaagaagagagggcaagatcgagaaggtgcacggcctgctgggctgcaccaatcctaattgtctgcagcaggcctggaccagcggcatgagatactggaaccgggacatgctgagcacatgcaacatgctgctgatcgtgcggtccatgctggatggccatggcagacctgaggtgttctctagatctgtgcctgccgtggcctctggaggatctagcggaggatcctctggcagcgagacaccaggaacaagcgagtcagcaacaccagagagcagtggcggcagcagcggcggcagcagcgcttcttgcccgaaacctggccccccggtttcagcaggggcaatgagtttggaaagtggactgaccacccactccgttctcgccatcgaacgtggtcccaattcgttggcaaattccggatcagactttgggggggggggtctggggctaccgttacgcctattgagggtatcggtcggcactcagacctcccgctccgactgggtagacctggtgtcctggagccacccaggacccacgtctaagtcccagcaggttgacctggtgtctttatttcctaaacaccgggttgacctgttatccaaaaacgaccaggtagacctggtggctcaatttttaccatctaaatttccccccaatttggcagaaaatgatttggctttgctggtgaacttagagttctacagatcggatttgcatgtgtatgagtgtgttcattttgctgcacattgggagggattaagtggtttgcctgaggtgtatgaacaacttgcaccacaaccgtgtgtgggagaaactttacattctagcctcccacgagacagtgaactgtttgtgcctgaagaggggagcagcgagaaggagagcgaggacgcgccaaaaacatctcctccgacgcctgggaaacatggtttggaacagactggggaggaaaaagtgatggtgactgttcctgacaaaaatccaccttgtccttgctgtggtacccgggtaaactctgtgttgaatctgattgaacatctgaaagtgtcacacgggaaaaggggggtttgttttcggtgtgcaaaatgtggaaaggaaaatagtaactatcacagtgttgtttgtcattttccaaaatgcaggggtccagagacggagaaagccccagctggggagtggatttgtgaggtatgcaacagagattttacaaccaaaattggcctgggacaacacaagagattggcacacccagcagtgagaaatcaggaaaggatcgttgcttcccaaccgaaagaaacatcaaatagaggtgctcacaaaaggtgctggacaaaggaggaggaagaattactaataagactggaggctcagttcgagggaaacaaaaatattaataagcttattgcagaacacataaccaccaaaacagctaagcagatcagtgacaaaaggcgattgctgtccagaaagccagcagaggagccacgtgaggagcctggaacgtgtcatcacaccaggagagcagctgcgagcctgagaacggagcctgagatgagtcatcacgcccaggcagaggacagagataatggacctgggagacgccctctgccaggcagggcagctgccggagggagaacaatggacgagataagacgccaccctgataagggcaacggacagcagagacccaccaagcaaaaatcagaagaacagctgcaggcttactataaaaagacactagaggaacgactttcagctggggcacttaacaccttcccccgagcattcaagcaggtaatggaaggccgggatataaagctagtaatcaatcagacagcgcaggactgcttcggatgcctggaatccataagccaaataagaacggcaacccgagataaaaaggacacggtgacccgggagaaacacccaaagaaaccttttcagaagtggatgaaggacagagcaatcaaaaaaggtaattatcttcggttccagcgtttattttatcttgatagagggaaactggctaaaatcattttagatgatattgaatgcttgtcttgtgacataccactcagtgaaatttattcggtttttaaaacaagatgggaaacaactggtagctttaaaagccttggggactttaaaacttacgggaaggctgacaacactgccttcagagaattaattacggctaaagaaattgagaaaaatgtgcaggaaatgagcaaaggctcggctcccggtccagacgggattactcttggggacgtcgtaaagatggatcccgagttttcccggaccatggagattttcaatttatggttaacaactggtaaaatcccggacatggtgagggggtgcagaaccgttttgattccaaaatcatcaaagccggatcgtttgaaagacattaataactggagacctatcacgatcggttccatcttgctgagactgttctccaggattgtaacagctaggctgagcaaagcgtgccccctgaacccaaggcaaagaggctttatcagagcggcgggatgctctgaaaacttaaaactcctgcaaactataatttggtcggccaaaagagaacacagaccactgggtgttgtattcgtggacatcgccaaggcttttgacaccgtaagccaccagcacatcattcatgctttgcagcaaagagaggtggatccccacatcgtcggtctggtgagcaatatgtacgagaacatcagtacgtatatcaccacaaagaggaacacacacacagacaaaatccagatccgggttggagtaaagcagggtgacccgatgtcgccccttttatttaacctggcaatggaccctctattatgcaagctggaagagagtggcaaaggataccaccgaggacagagcagcatcacagcgatggcatttgcagacgatctggttttgctgagcgactcctgggaaaatatgaatacaaatattagcatactggagaccttctgcaatctgaccggactcaaaacacaggggcaaaagtgccacggcttttacatcaagccgacaaaggactcttacaccatcaatgactgcgctgcctggactatcaacggcacacccctgaacatgatcgaccccggcgaatctgagaaatacctcggcctgcagtttgacccgtggattggaatagcaaggtccggtctctccacaaaactagatttttggcttcagcggatcgatcaagcaccacttaaacctctgcagaaaactgatattctcaaaacatacaccatccctcggctgatctacatagctgaccactcagaagtgaaaactgcactactcgaaacccttgaccagaagatccggacagcggtcaaggaatggcttcacctacctccgtgcacctgcgatgccatcctgtactcgagcacgagagacggcggtttgggcatcaccaaattggcaggactgatccccagcgtgcaggcccgtagactgcatcggatcgcacagtcatctgacgatacgatgaaatgcttcatggaaaaagagaaaatggaacagctgcataagaaattgtggattcaagctggaggggacagagagaacataccctcgatttgggaagcaccaccgtcgagtgaaccaccaaacaacgtgagcacaaattcggaatgggaagcaccgacccagaaagataaatttccaaagccttgcaattggaggaaaaacgaattcaaaaaatggaccaaattggcatcccaaggccgcggaattgtaaattttgaaagagacaaaattagtaaccattggatccaatactacagacgcatacctcacaggaaactcctcactgcactacaactcagggccaacgtttaccccacgagagaatttctagccaggggtagacaagaccaatacatcaaggcgtgtaggcactgcgatgcggacattgaatcctgcgcccacatcatcggcaactgcccagtgacacaggacgcccgaatcaagaggcacaattacatctgcgaactgcttctcgaggaggcgaagaagaaggactgggtagtgttcaaggaaccgcacataagggattccaacaaggaactgtacaaacctgacctgatatttgtgaaggatgcccgtgcacttgtcgtggatgtgacagtacggtatgaagcagccaaatcatcgctggaggaagccgctgcagagaaagtgagaaagtacaaacacctggaaacggaagtaagacatctcacgaatgcaaaggacgttacttttgtgggctttcccctaggagcgcgggggaaatggcaccaagataactttaaacttttgactgagcttggcctctccaaatcgaggcaagtgaaaatggcagagactttttccacagtagcgctcttttcatctgtggacattgtacatatgtttgccagtagggccagaaaatctatggttatgtaaaccggtagacatgataagatacattgatgagtttggacaaaccacaactagaatgcagtgaaaaaaatgctttatttgtgaaatttgtgatgctattgctttatttgtaaccattataagctgcaataaacaagttaacaacaacaaaaaaaaaaaaaaaaaaaaaaaaaaaaaaacgttgactaaaaaaaaaaaaaaaaaaaaaaaaaaaaaaaaaaaaaaaaaaaaaaaaaaaaaaaaaaaaaaaaaaaaaa

SEQ ID NO: 10161 - DNA, 6019 bp, synthetic construct
  source 1..6019: mol_type = other DNA
ggtctagttacaactgggcatcgctgcagagatcgcacctcctcgtggtcccgctggtagcccttcgaagggtgactaagtcgatctctgccccaggtacggagccgttgggactcaccagtccaacgtaactcctgcctaaattcggtgaaacaaattcctcggtaaaaagccccatgaaacggacagccgacggaagcgagttcgagtcaccaaagaagaagcggaaagtccggctgaagaaactggacaagcccacactgcacacctgtaacaagaccagcttcgccaaggccttcctgcctaacgagacataccggcagcggctgctggactatatcgccatcattcaccagctggccgaccacgcctctcacgccctgaagttttacatcctgagcacctccaccagcagcttccctgtggtgcacgaggataccatcgaggccatcctgtacctgctgaacaagggcgaagcctggcatcccagaaaagaggccaagaaggcctggcgggattgcctgctgccttacgtgcagagatactgccagatcgtgggcttcattcaccccaacctgagaggcgagcagcagagcatcaactacctgaccgtgtccatgatgaccaacctgaaagtgaacgtgcaagagcacttcatgcagatgctgctgcggtacatcaatctgcgcttcgacgtgaagggccagaagcagagactgcctcctaagagcgacgcccgcaaggcctttttcacccggctgagatacctgaagtccgtgttcctgttcgacgtggtgcccgagctggaattcctggacgatctgacccctctggaaagcgaggtgctggaagagatctggtccctggacctgccttttctgcccaacgatcctctggcctacgccatcgtggccgatcctatgagcttcttcccagcctactgcaagctgagcggcctgtacgagcagtacggcttccagcggtttagcgccattcctctgcggagaagcctgatccagtctcacgtgcggatcgacaccatcatcctgtatcagcacatcctgtgcatcaccagacgggacgccgagacagtggaaaaggacgacctgtggatgagagtgtgcaacctgtgcaccaaagccttccggtccagatgcggcatgcacttcgagggcagcatcacaacagatggcgccagcgtgtccgtgtacctgaaacaccctgaggccgataagtacggcaagagaggcgccagaaagtccgccaatactgtggccgccgaagtgaaggccctgtacgtggaaaacaacctgcctgcctgtagagccgccgagaacgtggtggtcatcgaccccaacaagcgggatatcctgtactgccaggacagcaacggcaccaccttcagatacaccgccaaccagagagccgtggaaaccggcagcagaagattcgccaagcggcgggaagccatgaaggaagaagccggcgttgacctgatcgagagcagaatccctagccacaagaccatgaacctgatggacttcaccagatacctgctcgtgcggagagccgactgggacagacggaaagagttctactctcaccccgctcacacccggtggaagtggcacagcttcatcaaccggcagaagtccgagagcgacctgatcagcaacatgcggaacaaatacggcgagaacttcaccgtggtcatgggcgattggagcgacgctggaagaaccgccagattccagaccagcagcaagaccaaaggctggcggaccctgttcaagcggaaccggatcgattgcttcctgctggacgagtacaagacctccagcgtgtgccctagatgcagcagcagcgagttcgtggaaaagaagttcaagacccggcctcacagcagaccctggcgaagaagagagggcaagatcgagaaggtgcacggcctgctgggctgcaccaatcctaattgtctgcagcaggcctggaccagcggcatgagatactggaaccgggacatgctgagcacatgcaacatgctgctgatcgtgcggtccatgctggatggccatggcagacctgaggtgttctctagatctgtgcctgccgtggcctctggaggatctagcggaggatcctctggcagcgagacaccaggaacaagcgagtcagcaacaccagagagcagtggcggcagcagcggcggcagcagcgggaaacatggtttggaacagactggggaggaaaaagtgatggtgactgttcctgacaaaaatccaccttgtccttgctgtggtacccgggtaaactctgtgttgaatctgattgaacatctgaaagtgtcacacgggaaaaggggggtttgttttcggtgtgcaaaatgtggaaaggaaaatagtaactatcacagtgttgtttgtcattttccaaaatgcaggggtccagagacggagaaagccccagctggggagtggatttgtgaggtatgcaacagagattttacaaccaaaattggcctgggacaacacaagagattggcacacccagcagtgagaaatcaggaaaggatcgttgcttcccaaccgaaagaaacatcaaatagaggtgctcacaaaaggtgctggacaaaggaggaggaagaattactaataagactggaggctcagttcgagggaaacaaaaatattaataagcttattgcagaacacataaccaccaaaacagctaagcagatcagtgacaaaaggcgattgctgtccagaaagccagcagaggagccacgtgaggagcctggaacgtgtcatcacaccaggagagcagctgcgagcctgagaacggagcctgagatgagtcatcacgcccaggcagaggacagagataatggacctgggagacgccctctgccaggcagggcagctgccggagggagaacaatggacgagataagacgccaccctgataagggcaacggacagcagagacccaccaagcaaaaatcagaagaacagctgcaggcttactataaaaagacactagaggaacgactttcagctggggcacttaacaccttcccccgagcattcaagcaggtaatggaaggccgggatataaagctagtaatcaatcagacagcgcaggactgcttcggatgcctggaatccataagccaaataagaacggcaacccgagataaaaaggacacggtgacccgggagaaacacccaaagaaaccttttcagaagtggatgaaggacagagcaatcaaaaaaggtaattatcttcggttccagcgtttattttatcttgatagagggaaactggctaaaatcattttagatgatattgaatgcttgtcttgtgacataccactcagtgaaatttattcggtttttaaaacaagatgggaaacaactggtagctttaaaagccttggggactttaaaacttacgggaaggctgacaacactgccttcagagaattaattacggctaaagaaattgagaaaaatgtgcaggaaatgagcaaaggctcggctcccggtccagacgggattactcttggggacgtcgtaaagatggatcccgagttttcccggaccatggagattttcaatttatggttaacaactggtaaaatcccggacatggtgagggggtgcagaaccgttttgattccaaaatcatcaaagccggatcgtttgaaagacattaataactggagacctatcacgatcggttccatcttgctgagactgttctccaggattgtaacagctaggctgagcaaagcgtgccccctgaacccaaggcaaagaggctttatcagagcggcgggatgctctgaaaacttaaaactcctgcaaactataatttggtcggccaaaagagaacacagaccactgggtgttgtattcgtggacatcgccaaggcttttgacaccgtaagccaccagcacatcattcatgctttgcagcaaagagaggtggatccccacatcgtcggtctggtgagcaatatgtacgagaacatcagtacgtatatcaccacaaagaggaacacacacacagacaaaatccagatccgggttggagtaaagcagggtgacccgatgtcgccccttttatttaacctggcaatggaccctctattatgcaagctggaagagagtggcaaaggataccaccgaggacagagcagcatcacagcgatggcatttgcagacgatctggttttgctgagcgactcctgggaaaatatgaatacaaatattagcatactggagaccttctgcaatctgaccggactcaaaacacaggggcaaaagtgccacggcttttacatcaagccgacaaaggactcttacaccatcaatgactgcgctgcctggactatcaacggcacacccctgaacatgatcgaccccggcgaatctgagaaatacctcggcctgcagtttgacccgtggattggaatagcaaggtccggtctctccacaaaactagatttttggcttcagcggatcgatcaagcaccacttaaacctctgcagaaaactgatattctcaaaacatacaccatccctcggctgatctacatagctgaccactcagaagtgaaaactgcactactcgaaacccttgaccagaagatccggacagcggtcaaggaatggcttcacctacctccgtgcacctgcgatgccatcctgtactcgagcacgagagacggcggtttgggcatcaccaaattggcaggactgatccccagcgtgcaggcccgtagactgcatcggatcgcacagtcatctgacgatacgatgaaatgcttcatggaaaaagagaaaatggaacagctgcataagaaattgtggattcaagctggaggggacagagagaacataccctcgatttgggaagcaccaccgtcgagtgaaccaccaaacaacgtgagcacaaattcggaatgggaagcaccgacccagaaagataaatttccaaagccttgcaattggaggaaaaacgaattcaaaaaatggaccaaattggcatcccaaggccgcggaattgtaaattttgaaagagacaaaattagtaaccattggatccaatactacagacgcatacctcacaggaaactcctcactgcactacaactcagggccaacgtttaccccacgagagaatttctagccaggggtagacaagaccaatacatcaaggcgtgtaggcactgcgatgcggacattgaatcctgcgcccacatcatcggcaactgcccagtgacacaggacgcccgaatcaagaggcacaattacatctgcgaactgcttctcgaggaggcgaagaagaaggactgggtagtgttcaaggaaccgcacataagggattccaacaaggaactgtacaaacctgacctgatatttgtgaaggatgcccgtgcacttgtcgtggatgtgacagtacggtatgaagcagccaaatcatcgctggaggaagccgctgcagagaaagtgagaaagtacaaacacctggaaacggaagtaagacatctcacgaatgcaaaggacgttacttttgtgggctttcccctaggagcgcgggggaaatggcaccaagataactttaaacttttgactgagcttggcctctccaaatcgaggcaagtgaaaatggcagagactttttccacagtagcgctcttttcatctgtggacattgtacatatgtttgccagtagggccagaaaatctatggttatgtaaaccggtagacatgataagatacattgatgagtttggacaaaccacaactagaatgcagtgaaaaaaatgctttatttgtgaaatttgtgatgctattgctttatttgtaaccattataagctgcaataaacaagttaacaacaacaaaaaaaaaaaaaaaaaaaaaaaaaaaaaaacgttgactaaaaaaaaaaaaaaaaaaaaaaaaaaaaaaaaaaaaaaaaaaaaaaaaaaaaaaaaaaaaaaaaaaaaaa

SEQ ID NO: 10162 - DNA, 6151 bp, synthetic construct
  source 1..6151: mol_type = other DNA
ggtctagttacaactgggcatcgctgcagagatcgcacctcctcgtggtcccgctggtagcccttcgaagggtgactaagtcgatctctgccccaggtacggagccgttgggactcaccagtccaacgtaactcctgcctaaattcggtgaaacaaattcctcggtaaaaagccccatgaaacggacagccgacggaagcgagttcgagtcaccaaagaagaagcggaaagtccggctgaagaaactggacaagcccacactgcacacctgtaacaagaccagcttcgccaaggccttcctgcctaacgagacataccggcagcggctgctggactatatcgccatcattcaccagctggccgaccacgcctctcacgccctgaagttttacatcctgagcacctccaccagcagcttccctgtggtgcacgaggataccatcgaggccatcctgtacctgctgaacaagggcgaagcctggcatcccagaaaagaggccaagaaggcctggcgggattgcctgctgccttacgtgcagagatactgccagatcgtgggcttcattcaccccaacctgagaggcgagcagcagagcatcaactacctgaccgtgtccatgatgaccaacctgaaagtgaacgtgcaagagcacttcatgcagatgctgctgcggtacatcaatctgcgcttcgacgtgaagggccagaagcagagactgcctcctaagagcgacgcccgcaaggcctttttcacccggctgagatacctgaagtccgtgttcctgttcgacgtggtgcccgagctggaattcctggacgatctgacccctctggaaagcgaggtgctggaagagatctggtccctggacctgccttttctgcccaacgatcctctggcctacgccatcgtggccgatcctatgagcttcttcccagcctactgcaagctgagcggcctgtacgagcagtacggcttccagcggtttagcgccattcctctgcggagaagcctgatccagtctcacgtgcggatcgacaccatcatcctgtatcagcacatcctgtgcatcaccagacgggacgccgagacagtggaaaaggacgacctgtggatgagagtgtgcaacctgtgcaccaaagccttccggtccagatgcggcatgcacttcgagggcagcatcacaacagatggcgccagcgtgtccgtgtacctgaaacaccctgaggccgataagtacggcaagagaggcgccagaaagtccgccaatactgtggccgccgaagtgaaggccctgtacgtggaaaacaacctgcctgcctgtagagccgccgagaacgtggtggtcatcgaccccaacaagcgggatatcctgtactgccaggacagcaacggcaccaccttcagatacaccgccaaccagagagccgtggaaaccggcagcagaagattcgccaagcggcgggaagccatgaaggaagaagccggcgttgacctgatcgagagcagaatccctagccacaagaccatgaacctgatggacttcaccagatacctgctcgtgcggagagccgactgggacagacggaaagagttctactctcaccccgctcacacccggtggaagtggcacagcttcatcaaccggcagaagtccgagagcgacctgatcagcaacatgcggaacaaatacggcgagaacttcaccgtggtcatgggcgattggagcgacgctggaagaaccgccagattccagaccagcagcaagaccaaaggctggcggaccctgttcaagcggaaccggatcgattgcttcctgctggacgagtacaagacctccagcgtgtgccctagatgcagcagcagcgagttcgtggaaaagaagttcaagacccggcctcacagcagaccctggcgaagaagagagggcaagatcgagaaggtgcacggcctgctgggctgcaccaatcctaattgtctgcagcaggcctggaccagcggcatgagatactggaaccgggacatgctgagcacatgcaacatgctgctgatcgtgcggtccatgctggatggccatggcagacctgaggtgttctctagatctgtgcctgccgtggcctctggaggatctagcggaggatcctctggcagcgagacaccaggaacaagcgagtcagcaacaccagagagcagtggcggcagcagcggcggcagcagcgcttcttgcccgaaacctggccccccggtttcagcaggggcaatgagtttggaaagtggactgaccacccactccgttctcgccatcgaacgtggtcccaattcgttggcaaattccggatcagactttgggggggggggtctggggctaccgttacgcctattgagggtatcggtcggcactcagacctcccgctccgactgggtagacctggtgtcctggagccacccaggacccacgtctaagtcccagcaggttgacctggtgtctttatttcctaaacaccgggttgacctgttatccaaaaacgaccaggtagacctggtggctcaatttttaccatctaaatttccccccaatttggcagaaaatgatttggctttgctggtgaacttagagttctacagatcggatttgcatgtgtatgagtgtgttcattttgctgcacattgggagggattaagtggtttgcctgaggtgtatgaacaacttgcaccacaaccgtgtgtgggagaaactttacattctagcctcccacgagacagtgaactgtttgtgcctgaagaggggagcagcgagaaggagagcgaggacgcgccaaaaacatctcctccgacgcctgggaaacatggtttggaacagactggggaggaaaaagtgatggtgactgttcctgacaaaaatccaccttgtccttgctgtggtacccgggtaaactctgtgttgaatctgattgaacatctgaaagtgtcacacgggaaaaggggggtttgttttcggtgtgcaaaatgtggaaaggaaaatagtaactatcacagtgttgtttgtcattttccaaaatgcaggggtccagagacggagaaagccccagctggggagtggatttgtgaggtatgcaacagagattttacaaccaaaattggcctgggacaacacaagagattggcacacccagcagtgagaaatcaggaaaggatcgttgcttcccaaccgaaagaaacatcaaatagaggtgctcacaaaaggtgctggacaaaggaggaggaagaattactaataagactggaggctcagttcgagggaaacaaaaatattaataagcttattgcagaacacataaccaccaaaacagctaagcagatcagtgacaaaaggcgattgctgtccagaaagccagcagaggagccacgtgaggagcctggaacgtgtcatcacaccaggagagcagctgcgagcctgagaacggagcctgagatgagtcatcacgcccaggcagaggacagagataatggacctgggagacgccctctgccaggcagggcagctgccggagggagaacaatggacgagataagacgccaccctgataagggcaacggacagcagagacccaccaagcaaaaatcagaagaacagctgcaggcttactataaaaagacactagaggaacgactttcagctggggcacttaacaccttcccccgagcattcaagcaggtaatggaaggccgggatataaagctagtaatcaatcagacagcgcaggactgcttcggatgcctggaatccataagccaaataagaacggcaacccgagataaaaaggacacggtgacccgggagaaacacccaaagaaaccttttcagaagtggatgaaggacagagcaatcaaaaaaggtaattatcttcggttccagcgtttattttatcttgatagagggaaactggctaaaatcattttagatgatattgaatgcttgtcttgtgacataccactcagtgaaatttattcggtttttaaaacaagatgggaaacaactggtagctttaaaagccttggggactttaaaacttacgggaaggctgacaacactgccttcagagaattaattacggctaaagaaattgagaaaaatgtgcaggaaatgagcaaaggctcggctcccggtccagacgggattactcttggggacgtcgtaaagatggatcccgagttttcccggaccatggagattttcaatttatggttaacaactggtaaaatcccggacatggtgagggggtgcagaaccgttttgattccaaaatcatcaaagccggatcgtttgaaagacattaataactggagacctatcacgatcggttccatcttgctgagactgttctccaggattgtaacagctaggctgagcaaagcgtgccccctgaacccaaggcaaagaggctttatcagagcggcgggatgctctgaaaacttaaaactcctgcaaactataatttggtcggccaaaagagaacacagaccactgggtgttgtattcgtggacatcgccaaggcttttgacaccgtaagccaccagcacatcattcatgctttgcagcaaagagaggtggatccccacatcgtcggtctggtgagcaatatgtacgagaacatcagtacgtatatcaccacaaagaggaacacacacacagacaaaatccagatccgggttggagtaaagcagggtgacccgatgtcgccccttttatttaacctggcaatggaccctctattatgcaagctggaagagagtggcaaaggataccaccgaggacagagcagcatcacagcgatggcatttgcagacgatctggttttgctgagcgactcctgggaaaatatgaatacaaatattagcatactggagaccttctgcaatctgaccggactcaaaacacaggggcaaaagtgccacggcttttacatcaagccgacaaaggactcttacaccatcaatgactgcgctgcctggactatcaacggcacacccctgaacatgatcgaccccggcgaatctgagaaatacctcggcctgcagtttgacccgtggattggaatagcaaggtccggtctctccacaaaactagatttttggcttcagcggatcgatcaagcaccacttaaacctctgcagaaaactgatattctcaaaacatacaccatccctcggctgatctacatagctgaccactcagaagtgaaaactgcactactcgaaacccttgaccagaagatccggacagcggtcaaggaatggcttcacctacctccgtgcacctgcgatgccatcctgtactcgagcacgagagacggcggtttgggcatcaccaaattggcaggactgatccccagcgtgcaggcccgtagactgcatcggatcgcacagtcatctgacgatacgatgaaatgcttcatggaaaaagagaaaatggaacagctgcataagaaattgtggattcaagctggaggggacagagagaacataccctcgatttgggaagcaccaccgtcgagtgaaccaccaaacaacgtgagcacaaattcggaatgggaagcaccgacccagaaagataaatttccaaagccttgcaattggaggaaaaacgaattcaaaaaatggaccaaattggcatcccaaggccgcggaattgtaaattttgaaagagacaaaattagtaaccattggatccaatactacagacgcatacctcacaggaaactcctcactgcactacaactcagggccaacgtttaccccacgagagaatttctagccaggggtagacaagaccaatacatcaaggcgtgtaggcactgcgatgcggacattgaatcctgcgcccacatcatcggctaaaccggtagacatgataagatacattgatgagtttggacaaaccacaactagaatgcagtgaaaaaaatgctttatttgtgaaatttgtgatgctattgctttatttgtaaccattataagctgcaataaacaagttaacaacaacaaaaaaaaaaaaaaaaaaaaaaaaaaaaaaacgttgactaaaaaaaaaaaaaaaaaaaaaaaaaaaaaaaaaaaaaaaaaaaaaaaaaaaaaaaaaaaaaaaaaaaaaa

SEQ ID NO: 10163 - DNA, 6061 bp, synthetic construct
  source 1..6061: mol_type = other DNA
ggtctagttacaactgggcatcgctgcagagatcgcacctcctcgtggtcccgctggtagcccttcgaagggtgactaagtcgatctctgccccaggtacggagccgttgggactcaccagtccaacgtaactcctgcctaaattcggtgaaacaaattcctcggtaaaaagccccatggcttcttgcccgaaacctggccccccggtttcagcaggggcaatgagtttggaaagtggactgaccacccactccgttctcgccatcgaacgtggtcccaattcgttggcaaattccggatcagactttgggggggggggtctggggctaccgttacgcctattgagggtatcggtcggcactcagacctcccgctccgactgggtagacctggtgtcctggagccacccaggacccacgtctaagtcccagcaggttgacctggtgtctttatttcctaaacaccgggttgacctgttatccaaaaacgaccaggtagacctggtggctcaatttttaccatctaaatttccccccaatttggcagaaaatgatttggctttgctggtgaacttagagttctacagatcggatttgcatgtgtatgagtgtgttcattttgctgcacattgggagggattaagtggtttgcctgaggtgtatgaacaacttgcaccacaaccgtgtgtgggagaaactttacattctagcctcccacgagacagtgaactgtttgtgcctgaagaggggagcagcgagaaggagagcgaggacgcgccaaaaacatctcctccgacgcctgggaaacatggtttggaacagactggggaggaaaaagtgatggtgactgttcctgacaaaaatccaccttgtccttgctgtggtacccgggtaaactctgtgttgaatctgattgaacatctgaaagtgtcacacgggaaaaggggggtttgttttcggtgtgcaaaatgtggaaaggaaaatagtaactatcacagtgttgtttgtcattttccaaaatgcaggggtccagagacggagaaagccccagctggggagtggatttgtgaggtatgcaacagagattttacaaccaaaattggcctgggacaacacaagagattggcacacccagcagtgagaaatcaggaaaggatcgttgcttcccaaccgaaagaaacatcaaatagaggtgctcacaaaaggtgctggacaaaggaggaggaagaattactaataagactggaggctcagttcgagggaaacaaaaatattaataagcttattgcagaacacataaccaccaaaacagctaagcagatcagtgacaaaaggcgattgctgtccagaaagccagcagaggagccacgtgaggagcctggaacgtgtcatcacaccaggagagcagctgcgagcctgagaacggagcctgagatgagtcatcacgcccaggcagaggacagagataatggacctgggagacgccctctgccaggcagggcagctgccggagggagaacaatggacgagataagacgccaccctgataagggcaacggacagcagagacccaccaagcaaaaatcagaagaacagctgcaggcttactataaaaagacactagaggaacgactttcagctggggcacttaacaccttcccccgagcattcaagcaggtaatggaaggccgggatataaagctagtaatcaatcagacagcgcaggactgcttcggatgcctggaatccataagccaaataagaacggcaacccgagataaaaaggacacggtgacccgggagaaacacccaaagaaaccttttcagaagtggatgaaggacagagcaatcaaaaaaggtaattatcttcggttccagcgtttattttatcttgatagagggaaactggctaaaatcattttagatgatattgaatgcttgtcttgtgacataccactcagtgaaatttattcggtttttaaaacaagatgggaaacaactggtagctttaaaagccttggggactttaaaacttacgggaaggctgacaacactgccttcagagaattaattacggctaaagaaattgagaaaaatgtgcaggaaatgagcaaaggctcggctcccggtccagacgggattactcttggggacgtcgtaaagatggatcccgagttttcccggaccatggagattttcaatttatggttaacaactggtaaaatcccggacatggtgagggggtgcagaaccgttttgattccaaaatcatcaaagccggatcgtttgaaagacattaataactggagacctatcacgatcggttccatcttgctgagactgttctccaggattgtaacagctaggctgagcaaagcgtgccccctgaacccaaggcaaagaggctttatcagagcggcgggatgctctgaaaacttaaaactcctgcaaactataatttggtcggccaaaagagaacacagaccactgggtgttgtattcgtggacatcgccaaggcttttgacaccgtaagccaccagcacatcattcatgctttgcagcaaagagaggtggatccccacatcgtcggtctggtgagcaatatgtacgagaacatcagtacgtatatcaccacaaagaggaacacacacacagacaaaatccagatccgggttggagtaaagcagggtgacccgatgtcgccccttttatttaacctggcaatggaccctctattatgcaagctggaagagagtggcaaaggataccaccgaggacagagcagcatcacagcgatggcatttgcagacgatctggttttgctgagcgactcctgggaaaatatgaatacaaatattagcatactggagaccttctgcaatctgaccggactcaaaacacaggggcaaaagtgccacggcttttacatcaagccgacaaaggactcttacaccatcaatgactgcgctgcctggactatcaacggcacacccctgaacatgatcgaccccggcgaatctgagaaatacctcggcctgcagtttgacccgtggattggaatagcaaggtccggtctctccacaaaactagatttttggcttcagcggatcgatcaagcaccacttaaacctctgcagaaaactgatattctcaaaacatacaccatccctcggctgatctacatagctgaccactcagaagtgaaaactgcactactcgaaacccttgaccagaagatccggacagcggtcaaggaatggcttcacctacctccgtgcacctgcgatgccatcctgtactcgagcacgagagacggcggtttgggcatcaccaaattggcaggactgatccccagcgtgcaggcccgtagactgcatcggatcgcacagtcatctgacgatacgatgaaatgcttcatggaaaaagagaaaatggaacagctgcataagaaattgtggattcaagctggaggggacagagagaacataccctcgatttgggaagcaccaccgtcgagtgaaccaccaaacaacgtgagcacaaattcggaatgggaagcaccgacccagaaagataaatttccaaagccttgcaattggaggaaaaacgaattcaaaaaatggaccaaattggcatcccaaggccgcggaattgtaaattttgaaagagacaaaattagtaaccattggatccaatactacagacgcatacctcacaggaaactcctcactgcactacaactcagggccaacgtttaccccacgagagaatttctagccaggggtagacaagaccaatacatcaaggcgtgtaggcactgcgatgcggacattgaatcctgcgcccacatcatcggccggctgaagaaactggacaagcccacactgcacacctgtaacaagaccagcttcgccaaggccttcctgcctaacgagacataccggcagcggctgctggactatatcgccatcattcaccagctggccgaccacgcctctcacgccctgaagttttacatcctgagcacctccaccagcagcttccctgtggtgcacgaggataccatcgaggccatcctgtacctgctgaacaagggcgaagcctggcatcccagaaaagaggccaagaaggcctggcgggattgcctgctgccttacgtgcagagatactgccagatcgtgggcttcattcaccccaacctgagaggcgagcagcagagcatcaactacctgaccgtgtccatgatgaccaacctgaaagtgaacgtgcaagagcacttcatgcagatgctgctgcggtacatcaatctgcgcttcgacgtgaagggccagaagcagagactgcctcctaagagcgacgcccgcaaggcctttttcacccggctgagatacctgaagtccgtgttcctgttcgacgtggtgcccgagctggaattcctggacgatctgacccctctggaaagcgaggtgctggaagagatctggtccctggacctgccttttctgcccaacgatcctctggcctacgccatcgtggccgatcctatgagcttcttcccagcctactgcaagctgagcggcctgtacgagcagtacggcttccagcggtttagcgccattcctctgcggagaagcctgatccagtctcacgtgcggatcgacaccatcatcctgtatcagcacatcctgtgcatcaccagacgggacgccgagacagtggaaaaggacgacctgtggatgagagtgtgcaacctgtgcaccaaagccttccggtccagatgcggcatgcacttcgagggcagcatcacaacagatggcgccagcgtgtccgtgtacctgaaacaccctgaggccgataagtacggcaagagaggcgccagaaagtccgccaatactgtggccgccgaagtgaaggccctgtacgtggaaaacaacctgcctgcctgtagagccgccgagaacgtggtggtcatcgaccccaacaagcgggatatcctgtactgccaggacagcaacggcaccaccttcagatacaccgccaaccagagagccgtggaaaccggcagcagaagattcgccaagcggcgggaagccatgaaggaagaagccggcgttgacctgatcgagagcagaatccctagccacaagaccatgaacctgatggacttcaccagatacctgctcgtgcggagagccgactgggacagacggaaagagttctactctcaccccgctcacacccggtggaagtggcacagcttcatcaaccggcagaagtccgagagcgacctgatcagcaacatgcggaacaaatacggcgagaacttcaccgtggtcatgggcgattggagcgacgctggaagaaccgccagattccagaccagcagcaagaccaaaggctggcggaccctgttcaagcggaaccggatcgattgcttcctgctggacgagtacaagacctccagcgtgtgccctagatgcagcagcagcgagttcgtggaaaagaagttcaagacccggcctcacagcagaccctggcgaagaagagagggcaagatcgagaaggtgcacggcctgctgggctgcaccaatcctaattgtctgcagcaggcctggaccagcggcatgagatactggaaccgggacatgctgagcacatgcaacatgctgctgatcgtgcggtccatgctggatggccatggcagacctgaggtgttctctagatctgtgcctgccgtggcctctggcggctcaaaaagaaccgccgacggcagcgaattcgagcccaagaagaagaggaaagtctaaaccggtagacatgataagatacattgatgagtttggacaaaccacaactagaatgcagtgaaaaaaatgctttatttgtgaaatttgtgatgctattgctttatttgtaaccattataagctgcaataaacaagttaacaacaacaaaaaaaaaaaaaaaaaaaaaaaaaaaaaaacgttgactaaaaaaaaaaaaaaaaaaaaaaaaaaaaaaaaaaaaaaaaaaaaaaaaaaaaaaaaaaaaaaaaaaaaaa

SEQ ID NO: 10164 - DNA, 6649 bp, synthetic construct
  source 1..6649: mol_type = other DNA
ggtctagttacaactgggcatcgctgcagagatcgcacctcctcgtggtcccgctggtagcccttcgaagggtgactaagtcgatctctgccccaggtacggagccgttgggactcaccagtccaacgtaactcctgcctaaattcggtgaaacaaattcctcggtaaaaagccccatggcttcttgcccgaaacctggccccccggtttcagcaggggcaatgagtttggaaagtggactgaccacccactccgttctcgccatcgaacgtggtcccaattcgttggcaaattccggatcagactttgggggggggggtctggggctaccgttacgcctattgagggtatcggtcggcactcagacctcccgctccgactgggtagacctggtgtcctggagccacccaggacccacgtctaagtcccagcaggttgacctggtgtctttatttcctaaacaccgggttgacctgttatccaaaaacgaccaggtagacctggtggctcaatttttaccatctaaatttccccccaatttggcagaaaatgatttggctttgctggtgaacttagagttctacagatcggatttgcatgtgtatgagtgtgttcattttgctgcacattgggagggattaagtggtttgcctgaggtgtatgaacaacttgcaccacaaccgtgtgtgggagaaactttacattctagcctcccacgagacagtgaactgtttgtgcctgaagaggggagcagcgagaaggagagcgaggacgcgccaaaaacatctcctccgacgcctgggaaacatggtttggaacagactggggaggaaaaagtgatggtgactgttcctgacaaaaatccaccttgtccttgctgtggtacccgggtaaactctgtgttgaatctgattgaacatctgaaagtgtcacacgggaaaaggggggtttgttttcggtgtgcaaaatgtggaaaggaaaatagtaactatcacagtgttgtttgtcattttccaaaatgcaggggtccagagacggagaaagccccagctggggagtggatttgtgaggtatgcaacagagattttacaaccaaaattggcctgggacaacacaagagattggcacacccagcagtgagaaatcaggaaaggatcgttgcttcccaaccgaaagaaacatcaaatagaggtgctcacaaaaggtgctggacaaaggaggaggaagaattactaataagactggaggctcagttcgagggaaacaaaaatattaataagcttattgcagaacacataaccaccaaaacagctaagcagatcagtgacaaaaggcgattgctgtccagaaagccagcagaggagccacgtgaggagcctggaacgtgtcatcacaccaggagagcagctgcgagcctgagaacggagcctgagatgagtcatcacgcccaggcagaggacagagataatggacctgggagacgccctctgccaggcagggcagctgccggagggagaacaatggacgagataagacgccaccctgataagggcaacggacagcagagacccaccaagcaaaaatcagaagaacagctgcaggcttactataaaaagacactagaggaacgactttcagctggggcacttaacaccttcccccgagcattcaagcaggtaatggaaggccgggatataaagctagtaatcaatcagacagcgcaggactgcttcggatgcctggaatccataagccaaataagaacggcaacccgagataaaaaggacacggtgacccgggagaaacacccaaagaaaccttttcagaagtggatgaaggacagagcaatcaaaaaaggtaattatcttcggttccagcgtttattttatcttgatagagggaaactggctaaaatcattttagatgatattgaatgcttgtcttgtgacataccactcagtgaaatttattcggtttttaaaacaagatgggaaacaactggtagctttaaaagccttggggactttaaaacttacgggaaggctgacaacactgccttcagagaattaattacggctaaagaaattgagaaaaatgtgcaggaaatgagcaaaggctcggctcccggtccagacgggattactcttggggacgtcgtaaagatggatcccgagttttcccggaccatggagattttcaatttatggttaacaactggtaaaatcccggacatggtgagggggtgcagaaccgttttgattccaaaatcatcaaagccggatcgtttgaaagacattaataactggagacctatcacgatcggttccatcttgctgagactgttctccaggattgtaacagctaggctgagcaaagcgtgccccctgaacccaaggcaaagaggctttatcagagcggcgggatgctctgaaaacttaaaactcctgcaaactataatttggtcggccaaaagagaacacagaccactgggtgttgtattcgtggacatcgccaaggcttttgacaccgtaagccaccagcacatcattcatgctttgcagcaaagagaggtggatccccacatcgtcggtctggtgagcaatatgtacgagaacatcagtacgtatatcaccacaaagaggaacacacacacagacaaaatccagatccgggttggagtaaagcagggtgacccgatgtcgccccttttatttaacctggcaatggaccctctattatgcaagctggaagagagtggcaaaggataccaccgaggacagagcagcatcacagcgatggcatttgcagacgatctggttttgctgagcgactcctgggaaaatatgaatacaaatattagcatactggagaccttctgcaatctgaccggactcaaaacacaggggcaaaagtgccacggcttttacatcaagccgacaaaggactcttacaccatcaatgactgcgctgcctggactatcaacggcacacccctgaacatgatcgaccccggcgaatctgagaaatacctcggcctgcagtttgacccgtggattggaatagcaaggtccggtctctccacaaaactagatttttggcttcagcggatcgatcaagcaccacttaaacctctgcagaaaactgatattctcaaaacatacaccatccctcggctgatctacatagctgaccactcagaagtgaaaactgcactactcgaaacccttgaccagaagatccggacagcggtcaaggaatggcttcacctacctccgtgcacctgcgatgccatcctgtactcgagcacgagagacggcggtttgggcatcaccaaattggcaggactgatccccagcgtgcaggcccgtagactgcatcggatcgcacagtcatctgacgatacgatgaaatgcttcatggaaaaagagaaaatggaacagctgcataagaaattgtggattcaagctggaggggacagagagaacataccctcgatttgggaagcaccaccgtcgagtgaaccaccaaacaacgtgagcacaaattcggaatgggaagcaccgacccagaaagataaatttccaaagccttgcaattggaggaaaaacgaattcaaaaaatggaccaaattggcatcccaaggccgcggaattgtaaattttgaaagagacaaaattagtaaccattggatccaatactacagacgcatacctcacaggaaactcctcactgcactacaactcagggccaacgtttaccccacgagagaatttctagccaggggtagacaagaccaatacatcaaggcgtgtaggcactgcgatgcggacattgaatcctgcgcccacatcatcggcaactgcccagtgacacaggacgcccgaatcaagaggcacaattacatctgcgaactgcttctcgaggaggcgaagaagaaggactgggtagtgttcaaggaaccgcacataagggattccaacaaggaactgtacaaacctgacctgatatttgtgaaggatgcccgtgcacttgtcgtggatgtgacagtacggtatgaagcagccaaatcatcgctggaggaagccgctgcagaggcagtgagaaagtacaaacacctggaaacggaagtaagacatctcacgaatgcaaaggacgttacttttgtgggctttcccctaggagcgcgggggaaatggcaccaagataactttaaacttttgactgagcttggcctctccaaatcgaggcaagtgaaaatggcagagactttttccacagtagcgctcttttcatctgtggacattgtacatatgtttgccagtagggccagaaaatctatggttatgtctggaggatctagcggaggatcctctggcagcgagacaccaggaacaagcgagtcagcaacaccagagagcagtggcggcagcagcggcggcagcagccggctgaagaaactggacaagcccacactgcacacctgtaacaagaccagcttcgccaaggccttcctgcctaacgagacataccggcagcggctgctggactatatcgccatcattcaccagctggccgaccacgcctctcacgccctgaagttttacatcctgagcacctccaccagcagcttccctgtggtgcacgaggataccatcgaggccatcctgtacctgctgaacaagggcgaagcctggcatcccagaaaagaggccaagaaggcctggcgggattgcctgctgccttacgtgcagagatactgccagatcgtgggcttcattcaccccaacctgagaggcgagcagcagagcatcaactacctgaccgtgtccatgatgaccaacctgaaagtgaacgtgcaagagcacttcatgcagatgctgctgcggtacatcaatctgcgcttcgacgtgaagggccagaagcagagactgcctcctaagagcgacgcccgcaaggcctttttcacccggctgagatacctgaagtccgtgttcctgttcgacgtggtgcccgagctggaattcctggacgatctgacccctctggaaagcgaggtgctggaagagatctggtccctggacctgccttttctgcccaacgatcctctggcctacgccatcgtggccgatcctatgagcttcttcccagcctactgcaagctgagcggcctgtacgagcagtacggcttccagcggtttagcgccattcctctgcggagaagcctgatccagtctcacgtgcggatcgacaccatcatcctgtatcagcacatcctgtgcatcaccagacgggacgccgagacagtggaaaaggacgacctgtggatgagagtgtgcaacctgtgcaccaaagccttccggtccagatgcggcatgcacttcgagggcagcatcacaacagatggcgccagcgtgtccgtgtacctgaaacaccctgaggccgataagtacggcaagagaggcgccagaaagtccgccaatactgtggccgccgaagtgaaggccctgtacgtggaaaacaacctgcctgcctgtagagccgccgagaacgtggtggtcatcgaccccaacaagcgggatatcctgtactgccaggacagcaacggcaccaccttcagatacaccgccaaccagagagccgtggaaaccggcagcagaagattcgccaagcggcgggaagccatgaaggaagaagccggcgttgacctgatcgagagcagaatccctagccacaagaccatgaacctgatggacttcaccagatacctgctcgtgcggagagccgactgggacagacggaaagagttctactctcaccccgctcacacccggtggaagtggcacagcttcatcaaccggcagaagtccgagagcgacctgatcagcaacatgcggaacaaatacggcgagaacttcaccgtggtcatgggcgattggagcgacgctggaagaaccgccagattccagaccagcagcaagaccaaaggctggcggaccctgttcaagcggaaccggatcgattgcttcctgctggacgagtacaagacctccagcgtgtgccctagatgcagcagcagcgagttcgtggaaaagaagttcaagacccggcctcacagcagaccctggcgaagaagagagggcaagatcgagaaggtgcacggcctgctgggctgcaccaatcctaattgtctgcagcaggcctggaccagcggcatgagatactggaaccgggacatgctgagcacatgcaacatgctgctgatcgtgcggtccatgctggatggccatggcagacctgaggtgttctctagatctgtgcctgccgtggcctctggcggctcaaaaagaaccgccgacggcagcgaattcgagcccaagaagaagaggaaagtctaaaccggtagacatgataagatacattgatgagtttggacaaaccacaactagaatgcagtgaaaaaaatgctttatttgtgaaatttgtgatgctattgctttatttgtaaccattataagctgcaataaacaagttaacaacaacaaaaaaaaaaaaaaaaaaaaaaaaaaaaaaacgttgactaaaaaaaaaaaaaaaaaaaaaaaaaaaaaaaaaaaaaaaaaaaaaaaaaaaaaaaaaaaaaaaaaaaaaa

SEQ ID NO: 10165 - DNA, 6640 bp, synthetic construct
  source 1..6640: mol_type = other DNA
ggtctagttacaactgggcatcgctgcagagatcgcacctcctcgtggtcccgctggtagcccttcgaagggtgactaagtcgatctctgccccaggtacggagccgttgggactcaccagtccaacgtaactcctgcctaaattcggtgaaacaaattcctcggtaaaaagccccatgaaacggacagccgacggaagcgagttcgagtcaccaaagaagaagcggaaagtccggctgaagaaactggacaagcccacactgcacacctgtaacaagaccagcttcgccaaggccttcctgcctaacgagacataccggcagcggctgctggactatatcgccatcattcaccagctggccgaccacgcctctcacgccctgaagttttacatcctgagcacctccaccagcagcttccctgtggtgcacgaggataccatcgaggccatcctgtacctgctgaacaagggcgaagcctggcatcccagaaaagaggccaagaaggcctggcgggattgcctgctgccttacgtgcagagatactgccagatcgtgggcttcattcaccccaacctgagaggcgagcagcagagcatcaactacctgaccgtgtccatgatgaccaacctgaaagtgaacgtgcaagagcacttcatgcagatgctgctgcggtacatcaatctgcgcttcgacgtgaagggccagaagcagagactgcctcctaagagcgacgcccgcaaggcctttttcacccggctgagatacctgaagtccgtgttcctgttcgacgtggtgcccgagctggaattcctggacgatctgacccctctggaaagcgaggtgctggaagagatctggtccctggacctgccttttctgcccaacgatcctctggcctacgccatcgtggccgatcctatgagcttcttcccagcctactgcaagctgagcggcctgtacgagcagtacggcttccagcggtttagcgccattcctctgcggagaagcctgatccagtctcacgtgcggatcgacaccatcatcctgtatcagcacatcctgtgcatcaccagacgggacgccgagacagtggaaaaggacgacctgtggatgagagtgtgcaacctgtgcaccaaagccttccggtccagatgcggcatgcacttcgagggcagcatcacaacagatggcgccagcgtgtccgtgtacctgaaacaccctgaggccgataagtacggcaagagaggcgccagaaagtccgccaatactgtggccgccgaagtgaaggccctgtacgtggaaaacaacctgcctgcctgtagagccgccgagaacgtggtggtcatcgaccccaacaagcgggatatcctgtactgccaggacagcaacggcaccaccttcagatacaccgccaaccagagagccgtggaaaccggcagcagaagattcgccaagcggcgggaagccatgaaggaagaagccggcgttgacctgatcgagagcagaatccctagccacaagaccatgaacctgatggacttcaccagatacctgctcgtgcggagagccgactgggacagacggaaagagttctactctcaccccgctcacacccggtggaagtggcacagcttcatcaaccggcagaagtccgagagcgacctgatcagcaacatgcggaacaaatacggcgagaacttcaccgtggtcatgggcgattggagcgacgctggaagaaccgccagattccagaccagcagcaagaccaaaggctggcggaccctgttcaagcggaaccggatcgattgcttcctgctggacgagtacaagacctccagcgtgtgccctagatgcagcagcagcgagttcgtggaaaagaagttcaagacccggcctcacagcagaccctggcgaagaagagagggcaagatcgagaaggtgcacggcctgctgggctgcaccaatcctaattgtctgcagcaggcctggaccagcggcatgagatactggaaccgggccatgctgagcacatgcaacatgctgctgatcgtgcggtccatgctggatggccatggcagacctgaggtgttctctagatctgtgcctgccgtggcctctggaggatctagcggaggatcctctggcagcgagacaccaggaacaagcgagtcagcaacaccagagagcagtggcggcagcagcggcggcagcagcgcttcttgcccgaaacctggccccccggtttcagcaggggcaatgagtttggaaagtggactgaccacccactccgttctcgccatcgaacgtggtcccaattcgttggcaaattccggatcagactttgggggggggggtctggggctaccgttacgcctattgagggtatcggtcggcactcagacctcccgctccgactgggtagacctggtgtcctggagccacccaggacccacgtctaagtcccagcaggttgacctggtgtctttatttcctaaacaccgggttgacctgttatccaaaaacgaccaggtagacctggtggctcaatttttaccatctaaatttccccccaatttggcagaaaatgatttggctttgctggtgaacttagagttctacagatcggatttgcatgtgtatgagtgtgttcattttgctgcacattgggagggattaagtggtttgcctgaggtgtatgaacaacttgcaccacaaccgtgtgtgggagaaactttacattctagcctcccacgagacagtgaactgtttgtgcctgaagaggggagcagcgagaaggagagcgaggacgcgccaaaaacatctcctccgacgcctgggaaacatggtttggaacagactggggaggaaaaagtgatggtgactgttcctgacaaaaatccaccttgtccttgctgtggtacccgggtaaactctgtgttgaatctgattgaacatctgaaagtgtcacacgggaaaaggggggtttgttttcggtgtgcaaaatgtggaaaggaaaatagtaactatcacagtgttgtttgtcattttccaaaatgcaggggtccagagacggagaaagccccagctggggagtggatttgtgaggtatgcaacagagattttacaaccaaaattggcctgggacaacacaagagattggcacacccagcagtgagaaatcaggaaaggatcgttgcttcccaaccgaaagaaacatcaaatagaggtgctcacaaaaggtgctggacaaaggaggaggaagaattactaataagactggaggctcagttcgagggaaacaaaaatattaataagcttattgcagaacacataaccaccaaaacagctaagcagatcagtgacaaaaggcgattgctgtccagaaagccagcagaggagccacgtgaggagcctggaacgtgtcatcacaccaggagagcagctgcgagcctgagaacggagcctgagatgagtcatcacgcccaggcagaggacagagataatggacctgggagacgccctctgccaggcagggcagctgccggagggagaacaatggacgagataagacgccaccctgataagggcaacggacagcagagacccaccaagcaaaaatcagaagaacagctgcaggcttactataaaaagacactagaggaacgactttcagctggggcacttaacaccttcccccgagcattcaagcaggtaatggaaggccgggatataaagctagtaatcaatcagacagcgcaggactgcttcggatgcctggaatccataagccaaataagaacggcaacccgagataaaaaggacacggtgacccgggagaaacacccaaagaaaccttttcagaagtggatgaaggacagagcaatcaaaaaaggtaattatcttcggttccagcgtttattttatcttgatagagggaaactggctaaaatcattttagatgatattgaatgcttgtcttgtgacataccactcagtgaaatttattcggtttttaaaacaagatgggaaacaactggtagctttaaaagccttggggactttaaaacttacgggaaggctgacaacactgccttcagagaattaattacggctaaagaaattgagaaaaatgtgcaggaaatgagcaaaggctcggctcccggtccagacgggattactcttggggacgtcgtaaagatggatcccgagttttcccggaccatggagattttcaatttatggttaacaactggtaaaatcccggacatggtgagggggtgcagaaccgttttgattccaaaatcatcaaagccggatcgtttgaaagacattaataactggagacctatcacgatcggttccatcttgctgagactgttctccaggattgtaacagctaggctgagcaaagcgtgccccctgaacccaaggcaaagaggctttatcagagcggcgggatgctctgaaaacttaaaactcctgcaaactataatttggtcggccaaaagagaacacagaccactgggtgttgtattcgtggacatcgccaaggcttttgacaccgtaagccaccagcacatcattcatgctttgcagcaaagagaggtggatccccacatcgtcggtctggtgagcaatatgtacgagaacatcagtacgtatatcaccacaaagaggaacacacacacagacaaaatccagatccgggttggagtaaagcagggtgacccgatgtcgccccttttatttaacctggcaatggaccctctattatgcaagctggaagagagtggcaaaggataccaccgaggacagagcagcatcacagcgatggcatttgcagacgatctggttttgctgagcgactcctgggaaaatatgaatacaaatattagcatactggagaccttctgcaatctgaccggactcaaaacacaggggcaaaagtgccacggcttttacatcaagccgacaaaggactcttacaccatcaatgactgcgctgcctggactatcaacggcacacccctgaacatgatcgaccccggcgaatctgagaaatacctcggcctgcagtttgacccgtggattggaatagcaaggtccggtctctccacaaaactagatttttggcttcagcggatcgatcaagcaccacttaaacctctgcagaaaactgatattctcaaaacatacaccatccctcggctgatctacatagctgaccactcagaagtgaaaactgcactactcgaaacccttgaccagaagatccggacagcggtcaaggaatggcttcacctacctccgtgcacctgcgatgccatcctgtactcgagcacgagagacggcggtttgggcatcaccaaattggcaggactgatccccagcgtgcaggcccgtagactgcatcggatcgcacagtcatctgacgatacgatgaaatgcttcatggaaaaagagaaaatggaacagctgcataagaaattgtggattcaagctggaggggacagagagaacataccctcgatttgggaagcaccaccgtcgagtgaaccaccaaacaacgtgagcacaaattcggaatgggaagcaccgacccagaaagataaatttccaaagccttgcaattggaggaaaaacgaattcaaaaaatggaccaaattggcatcccaaggccgcggaattgtaaattttgaaagagacaaaattagtaaccattggatccaatactacagacgcatacctcacaggaaactcctcactgcactacaactcagggccaacgtttaccccacgagagaatttctagccaggggtagacaagaccaatacatcaaggcgtgtaggcactgcgatgcggacattgaatcctgcgcccacatcatcggcaactgcccagtgacacaggacgcccgaatcaagaggcacaattacatctgcgaactgcttctcgaggaggcgaagaagaaggactgggtagtgttcaaggaaccgcacataagggattccaacaaggaactgtacaaacctgacctgatatttgtgaaggatgcccgtgcacttgtcgtggatgtgacagtacggtatgaagcagccaaatcatcgctggaggaagccgctgcagagaaagtgagaaagtacaaacacctggaaacggaagtaagacatctcacgaatgcaaaggacgttacttttgtgggctttcccctaggagcgcgggggaaatggcaccaagataactttaaacttttgactgagcttggcctctccaaatcgaggcaagtgaaaatggcagagactttttccacagtagcgctcttttcatctgtggacattgtacatatgtttgccagtagggccagaaaatctatggttatgtaaaccggtagacatgataagatacattgatgagtttggacaaaccacaactagaatgcagtgaaaaaaatgctttatttgtgaaatttgtgatgctattgctttatttgtaaccattataagctgcaataaacaagttaacaacaacaaaaaaaaaaaaaaaaaaaaaaaaaaaaaaacgttgactaaaaaaaaaaaaaaaaaaaaaaaaaaaaaaaaaaaaaaaaaaaaaaaaaaaaaaaaaaaaaaaaaaaaaa

SEQ ID NO: 10166 - DNA, 5233 bp, synthetic construct
  source 1..5233: mol_type = other DNA
ggtctagttacaactgggcatcgctgcagagatcgcacctcctcgtggtcccgctggtagcccttcgaagggtgactaagtcgatctctgccccaggtacggagccgttgggactcaccagtccaacgtaactcctgcctaaattcggtgaaacaaattcctcggtaaaaagccccatgaaacggacagccgacggaagcgagttcgagtcaccaaagaagaagcggaaagtccggctgaagaaactggacaagcccacactgcacacctgtaacaagaccagcttcgccaaggccttcctgcctaacgagacataccggcagcggctgctggactatatcgccatcattcaccagctggccgaccacgcctctcacgccctgaagttttacatcctgagcacctccaccagcagcttccctgtggtgcacgaggataccatcgaggccatcctgtacctgctgaacaagggcgaagcctggcatcccagaaaagaggccaagaaggcctggcgggattgcctgctgccttacgtgcagagatactgccagatcgtgggcttcattcaccccaacctgagaggcgagcagcagagcatcaactacctgaccgtgtccatgatgaccaacctgaaagtgaacgtgcaagagcacttcatgcagatgctgctgcggtacatcaatctgcgcttcgacgtgaagggccagaagcagagactgcctcctaagagcgacgcccgcaaggcctttttcacccggctgagatacctgaagtccgtgttcctgttcgacgtggtgcccgagctggaattcctggacgatctgacccctctggaaagcgaggtgctggaagagatctggtccctggacctgccttttctgcccaacgatcctctggcctacgccatcgtggccgatcctatgagcttcttcccagcctactgcaagctgagcggcctgtacgagcagtacggcttccagcggtttagcgccattcctctgcggagaagcctgatccagtctcacgtgcggatcgacaccatcatcctgtatcagcacatcctgtgcatcaccagacgggacgccgagacagtggaaaaggacgacctgtggatgagagtgtgcaacctgtgcaccaaagccttccggtccagatgcggcatgcacttcgagggcagcatcacaacagatggcgccagcgtgtccgtgtacctgaaacaccctgaggccgataagtacggcaagagaggcgccagaaagtccgccaatactgtggccgccgaagtgaaggccctgtacgtggaaaacaacctgcctgcctgtagagccgccgagaacgtggtggtcatcgaccccaacaagcgggatatcctgtactgccaggacagcaacggcaccaccttcagatacaccgccaaccagagagccgtggaaaccggcagcagaagattcgccaagcggcgggaagccatgaaggaagaagccggcgttgacctgatcgagagcagaatccctagccacaagaccatgaacctgatggacttcaccagatacctgctcgtgcggagagccgactgggacagacggaaagagttctactctcaccccgctcacacccggtggaagtggcacagcttcatcaaccggcagaagtccgagagcgacctgatcagcaacatgcggaacaaatacggcgagaacttcaccgtggtcatgggcgattggagcgacgctggaagaaccgccagattccagaccagcagcaagaccaaaggctggcggaccctgttcaagcggaaccggatcgattgcttcctgctggacgagtacaagacctccagcgtgtgccctagatgcagcagcagcgagttcgtggaaaagaagttcaagacccggcctcacagcagaccctggcgaagaagagagggcaagatcgagaaggtgcacggcctgctgggctgcaccaatcctaattgtctgcagcaggcctggaccagcggcatgagatactggaaccgggccatgctgagcacatgcaacatgctgctgatcgtgcggtccatgctggatggccatggcagacctgaggtgttctctagatctgtgcctgccgtggcctctggaggatctagcggaggatcctctggcagcgagacaccaggaacaagcgagtcagcaacaccagagagcagtggcggcagcagcggcggcagcagcgaagaacagctgcaggcttactataaaaagacactagaggaacgactttcagctggggcacttaacaccttcccccgagcattcaagcaggtaatggaaggccgggatataaagctagtaatcaatcagacagcgcaggactgcttcggatgcctggaatccataagccaaataagaacggcaacccgagataaaaaggacacggtgacccgggagaaacacccaaagaaaccttttcagaagtggatgaaggacagagcaatcaaaaaaggtaattatcttcggttccagcgtttattttatcttgatagagggaaactggctaaaatcattttagatgatattgaatgcttgtcttgtgacataccactcagtgaaatttattcggtttttaaaacaagatgggaaacaactggtagctttaaaagccttggggactttaaaacttacgggaaggctgacaacactgccttcagagaattaattacggctaaagaaattgagaaaaatgtgcaggaaatgagcaaaggctcggctcccggtccagacgggattactcttggggacgtcgtaaagatggatcccgagttttcccggaccatggagattttcaatttatggttaacaactggtaaaatcccggacatggtgagggggtgcagaaccgttttgattccaaaatcatcaaagccggatcgtttgaaagacattaataactggagacctatcacgatcggttccatcttgctgagactgttctccaggattgtaacagctaggctgagcaaagcgtgccccctgaacccaaggcaaagaggctttatcagagcggcgggatgctctgaaaacttaaaactcctgcaaactataatttggtcggccaaaagagaacacagaccactgggtgttgtattcgtggacatcgccaaggcttttgacaccgtaagccaccagcacatcattcatgctttgcagcaaagagaggtggatccccacatcgtcggtctggtgagcaatatgtacgagaacatcagtacgtatatcaccacaaagaggaacacacacacagacaaaatccagatccgggttggagtaaagcagggtgacccgatgtcgccccttttatttaacctggcaatggaccctctattatgcaagctggaagagagtggcaaaggataccaccgaggacagagcagcatcacagcgatggcatttgcagacgatctggttttgctgagcgactcctgggaaaatatgaatacaaatattagcatactggagaccttctgcaatctgaccggactcaaaacacaggggcaaaagtgccacggcttttacatcaagccgacaaaggactcttacaccatcaatgactgcgctgcctggactatcaacggcacacccctgaacatgatcgaccccggcgaatctgagaaatacctcggcctgcagtttgacccgtggattggaatagcaaggtccggtctctccacaaaactagatttttggcttcagcggatcgatcaagcaccacttaaacctctgcagaaaactgatattctcaaaacatacaccatccctcggctgatctacatagctgaccactcagaagtgaaaactgcactactcgaaacccttgaccagaagatccggacagcggtcaaggaatggcttcacctacctccgtgcacctgcgatgccatcctgtactcgagcacgagagacggcggtttgggcatcaccaaattggcaggactgatccccagcgtgcaggcccgtagactgcatcggatcgcacagtcatctgacgatacgatgaaatgcttcatggaaaaagagaaaatggaacagctgcataagaaattgtggattcaagctggaggggacagagagaacataccctcgatttgggaagcaccaccgtcgagtgaaccaccaaacaacgtgagcacaaattcggaatgggaagcaccgacccagaaagataaatttccaaagccttgcaattggaggaaaaacgaattcaaaaaatggaccaaattggcatcccaaggccgcggaattgtaaattttgaaagagacaaaattagtaaccattggatccaatactacagacgcatacctcacaggaaactcctcactgcactacaactcagggccaacgtttaccccacgagagaatttctagccaggggtagacaagaccaatacatcaaggcgtgtaggcactgcgatgcggacattgaatcctgcgcccacatcatcggcaactgcccagtgacacaggacgcccgaatcaagaggcacaattacatctgcgaactgcttctcgaggaggcgaagaagaaggactgggtagtgttcaaggaaccgcacataagggattccaacaaggaactgtacaaacctgacctgatatttgtgaaggatgcccgtgcacttgtcgtggatgtgacagtacggtatgaagcagccaaatcatcgctggaggaagccgctgcagagaaagtgagaaagtacaaacacctggaaacggaagtaagacatctcacgaatgcaaaggacgttacttttgtgggctttcccctaggagcgcgggggaaatggcaccaagataactttaaacttttgactgagcttggcctctccaaatcgaggcaagtgaaaatggcagagactttttccacagtagcgctcttttcatctgtggacattgtacatatgtttgccagtagggccagaaaatctatggttatgtaaaccggtagacatgataagatacattgatgagtttggacaaaccacaactagaatgcagtgaaaaaaatgctttatttgtgaaatttgtgatgctattgctttatttgtaaccattataagctgcaataaacaagttaacaacaacaaaaaaaaaaaaaaaaaaaaaaaaaaaaaaacgttgactaaaaaaaaaaaaaaaaaaaaaaaaaaaaaaaaaaaaaaaaaaaaaaaaaaaaaaaaaaaaaaaaaaaaaa

SEQ ID NO: 10167 - DNA, 5233 bp, synthetic construct
  source 1..5233: mol_type = other DNA
ggtctagttacaactgggcatcgctgcagagatcgcacctcctcgtggtcccgctggtagcccttcgaagggtgactaagtcgatctctgccccaggtacggagccgttgggactcaccagtccaacgtaactcctgcctaaattcggtgaaacaaattcctcggtaaaaagccccatgaaacggacagccgacggaagcgagttcgagtcaccaaagaagaagcggaaagtccggctgaagaaactggacaagcccacactgcacacctgtaacaagaccagcttcgccaaggccttcctgcctaacgagacataccggcagcggctgctggactatatcgccatcattcaccagctggccgaccacgcctctcacgccctgaagttttacatcctgagcacctccaccagcagcttccctgtggtgcacgaggataccatcgaggccatcctgtacctgctgaacaagggcgaagcctggcatcccagaaaagaggccaagaaggcctggcgggattgcctgctgccttacgtgcagagatactgccagatcgtgggcttcattcaccccaacctgagaggcgagcagcagagcatcaactacctgaccgtgtccatgatgaccaacctgaaagtgaacgtgcaagagcacttcatgcagatgctgctgcggtacatcaatctgcgcttcgacgtgaagggccagaagcagagactgcctcctaagagcgacgcccgcaaggcctttttcacccggctgagatacctgaagtccgtgttcctgttcgacgtggtgcccgagctggaattcctggacgatctgacccctctggaaagcgaggtgctggaagagatctggtccctggacctgccttttctgcccaacgatcctctggcctacgccatcgtggccgatcctatgagcttcttcccagcctactgcaagctgagcggcctgtacgagcagtacggcttccagcggtttagcgccattcctctgcggagaagcctgatccagtctcacgtgcggatcgacaccatcatcctgtatcagcacatcctgtgcatcaccagacgggacgccgagacagtggaaaaggacgacctgtggatgagagtgtgcaacctgtgcaccaaagccttccggtccagatgcggcatgcacttcgagggcagcatcacaacagatggcgccagcgtgtccgtgtacctgaaacaccctgaggccgataagtacggcaagagaggcgccagaaagtccgccaatactgtggccgccgaagtgaaggccctgtacgtggaaaacaacctgcctgcctgtagagccgccgagaacgtggtggtcatcgaccccaacaagcgggatatcctgtactgccaggacagcaacggcaccaccttcagatacaccgccaaccagagagccgtggaaaccggcagcagaagattcgccaagcggcgggaagccatgaaggaagaagccggcgttgacctgatcgagagcagaatccctagccacaagaccatgaacctgatggacttcaccagatacctgctcgtgcggagagccgactgggacagacggaaagagttctactctcaccccgctcacacccggtggaagtggcacagcttcatcaaccggcagaagtccgagagcgacctgatcagcaacatgcggaacaaatacggcgagaacttcaccgtggtcatgggcgattggagcgacgctggaagaaccgccagattccagaccagcagcaagaccaaaggctggcggaccctgttcaagcggaaccggatcgattgcttcctgctggacgagtacaagacctccagcgtgtgccctagatgcagcagcagcgagttcgtggaaaagaagttcaagacccggcctcacagcagaccctggcgaagaagagagggcaagatcgagaaggtgcacggcctgctgggctgcaccaatcctaattgtctgcagcaggcctggaccagcggcatgagatactggaaccgggacatgctgagcacatgcaacatgctgctgatcgtgcggtccatgctggatggccatggcagacctgaggtgttctctagatctgtgcctgccgtggcctctggaggatctagcggaggatcctctggcagcgagacaccaggaacaagcgagtcagcaacaccagagagcagtggcggcagcagcggcggcagcagcgaagaacagctgcaggcttactataaaaagacactagaggaacgactttcagctggggcacttaacaccttcccccgagcattcaagcaggtaatggaaggccgggatataaagctagtaatcaatcagacagcgcaggactgcttcggatgcctggaatccataagccaaataagaacggcaacccgagataaaaaggacacggtgacccgggagaaacacccaaagaaaccttttcagaagtggatgaaggacagagcaatcaaaaaaggtaattatcttcggttccagcgtttattttatcttgatagagggaaactggctaaaatcattttagatgatattgaatgcttgtcttgtgacataccactcagtgaaatttattcggtttttaaaacaagatgggaaacaactggtagctttaaaagccttggggactttaaaacttacgggaaggctgacaacactgccttcagagaattaattacggctaaagaaattgagaaaaatgtgcaggaaatgagcaaaggctcggctcccggtccagacgggattactcttggggacgtcgtaaagatggatcccgagttttcccggaccatggagattttcaatttatggttaacaactggtaaaatcccggacatggtgagggggtgcagaaccgttttgattccaaaatcatcaaagccggatcgtttgaaagacattaataactggagacctatcacgatcggttccatcttgctgagactgttctccaggattgtaacagctaggctgagcaaagcgtgccccctgaacccaaggcaaagaggctttatcagagcggcgggatgctctgaaaacttaaaactcctgcaaactataatttggtcggccaaaagagaacacagaccactgggtgttgtattcgtggacatcgccaaggcttttgacaccgtaagccaccagcacatcattcatgctttgcagcaaagagaggtggatccccacatcgtcggtctggtgagcaatatgtacgagaacatcagtacgtatatcaccacaaagaggaacacacacacagacaaaatccagatccgggttggagtaaagcagggtgacccgatgtcgccccttttatttaacctggcaatggaccctctattatgcaagctggaagagagtggcaaaggataccaccgaggacagagcagcatcacagcgatggcatttgcagacgatctggttttgctgagcgactcctgggaaaatatgaatacaaatattagcatactggagaccttctgcaatctgaccggactcaaaacacaggggcaaaagtgccacggcttttacatcaagccgacaaaggactcttacaccatcaatgactgcgctgcctggactatcaacggcacacccctgaacatgatcgaccccggcgaatctgagaaatacctcggcctgcagtttgacccgtggattggaatagcaaggtccggtctctccacaaaactagatttttggcttcagcggatcgatcaagcaccacttaaacctctgcagaaaactgatattctcaaaacatacaccatccctcggctgatctacatagctgaccactcagaagtgaaaactgcactactcgaaacccttgaccagaagatccggacagcggtcaaggaatggcttcacctacctccgtgcacctgcgatgccatcctgtactcgagcacgagagacggcggtttgggcatcaccaaattggcaggactgatccccagcgtgcaggcccgtagactgcatcggatcgcacagtcatctgacgatacgatgaaatgcttcatggaaaaagagaaaatggaacagctgcataagaaattgtggattcaagctggaggggacagagagaacataccctcgatttgggaagcaccaccgtcgagtgaaccaccaaacaacgtgagcacaaattcggaatgggaagcaccgacccagaaagataaatttccaaagccttgcaattggaggaaaaacgaattcaaaaaatggaccaaattggcatcccaaggccgcggaattgtaaattttgaaagagacaaaattagtaaccattggatccaatactacagacgcatacctcacaggaaactcctcactgcactacaactcagggccaacgtttaccccacgagagaatttctagccaggggtagacaagaccaatacatcaaggcgtgtaggcactgcgatgcggacattgaatcctgcgcccacatcatcggcaactgcccagtgacacaggacgcccgaatcaagaggcacaattacatctgcgaactgcttctcgaggaggcgaagaagaaggactgggtagtgttcaaggaaccgcacataagggattccaacaaggaactgtacaaacctgacctgatatttgtgaaggatgcccgtgcacttgtcgtggatgtgacagtacggtatgaagcagccaaatcatcgctggaggaagccgctgcagagaaagtgagaaagtacaaacacctggaaacggaagtaagacatctcacgaatgcaaaggacgttacttttgtgggctttcccctaggagcgcgggggaaatggcaccaagataactttaaacttttgactgagcttggcctctccaaatcgaggcaagtgaaaatggcagagactttttccacagtagcgctcttttcatctgtggacattgtacatatgtttgccagtagggccagaaaatctatggttatgtaaaccggtagacatgataagatacattgatgagtttggacaaaccacaactagaatgcagtgaaaaaaatgctttatttgtgaaatttgtgatgctattgctttatttgtaaccattataagctgcaataaacaagttaacaacaacaaaaaaaaaaaaaaaaaaaaaaaaaaaaaaacgttgactaaaaaaaaaaaaaaaaaaaaaaaaaaaaaaaaaaaaaaaaaaaaaaaaaaaaaaaaaaaaaaaaaaaaaa

SEQ ID NO: 10168 - DNA, 5233 bp, synthetic construct
  source 1..5233: mol_type = other DNA
ggtctagttacaactgggcatcgctgcagagatcgcacctcctcgtggtcccgctggtagcccttcgaagggtgactaagtcgatctctgccccaggtacggagccgttgggactcaccagtccaacgtaactcctgcctaaattcggtgaaacaaattcctcggtaaaaagccccatgaaacggacagccgacggaagcgagttcgagtcaccaaagaagaagcggaaagtccggctgaagaaactggacaagcccacactgcacacctgtaacaagaccagcttcgccaaggccttcctgcctaacgagacataccggcagcggctgctggactatatcgccatcattcaccagctggccgaccacgcctctcacgccctgaagttttacatcctgagcacctccaccagcagcttccctgtggtgcacgaggataccatcgaggccatcctgtacctgctgaacaagggcgaagcctggcatcccagaaaagaggccaagaaggcctggcgggattgcctgctgccttacgtgcagagatactgccagatcgtgggcttcattcaccccaacctgagaggcgagcagcagagcatcaactacctgaccgtgtccatgatgaccaacctgaaagtgaacgtgcaagagcacttcatgcagatgctgctgcggtacatcaatctgcgcttcgacgtgaagggccagaagcagagactgcctcctaagagcgacgcccgcaaggcctttttcacccggctgagatacctgaagtccgtgttcctgttcgacgtggtgcccgagctggaattcctggacgatctgacccctctggaaagcgaggtgctggaagagatctggtccctggacctgccttttctgcccaacgatcctctggcctacgccatcgtggccgatcctatgagcttcttcccagcctactgcaagctgagcggcctgtacgagcagtacggcttccagcggtttagcgccattcctctgcggagaagcctgatccagtctcacgtgcggatcgacaccatcatcctgtatcagcacatcctgtgcatcaccagacgggacgccgagacagtggaaaaggacgacctgtggatgagagtgtgcaacctgtgcaccaaagccttccggtccagatgcggcatgcacttcgagggcagcatcacaacagatggcgccagcgtgtccgtgtacctgaaacaccctgaggccgataagtacggcaagagaggcgccagaaagtccgccaatactgtggccgccgaagtgaaggccctgtacgtggaaaacaacctgcctgcctgtagagccgccgagaacgtggtggtcatcgaccccaacaagcgggatatcctgtactgccaggacagcaacggcaccaccttcagatacaccgccaaccagagagccgtggaaaccggcagcagaagattcgccaagcggcgggaagccatgaaggaagaagccggcgttgacctgatcgagagcagaatccctagccacaagaccatgaacctgatggacttcaccagatacctgctcgtgcggagagccgactgggacagacggaaagagttctactctcaccccgctcacacccggtggaagtggcacagcttcatcaaccggcagaagtccgagagcgacctgatcagcaacatgcggaacaaatacggcgagaacttcaccgtggtcatgggcgattggagcgacgctggaagaaccgccagattccagaccagcagcaagaccaaaggctggcggaccctgttcaagcggaaccggatcgattgcttcctgctggacgagtacaagacctccagcgtgtgccctagatgcagcagcagcgagttcgtggaaaagaagttcaagacccggcctcacagcagaccctggcgaagaagagagggcaagatcgagaaggtgcacggcctgctgggctgcaccaatcctaattgtctgcagcaggcctggaccagcggcatgagatactggaaccgggacatgctgagcacatgcaacatgctgctgatcgtgcggtccatgctggatggccatggcagacctgaggtgttctctagatctgtgcctgccgtggcctctggaggatctagcggaggatcctctggcagcgagacaccaggaacaagcgagtcagcaacaccagagagcagtggcggcagcagcggcggcagcagcgaagaacagctgcaggcttactataaaaagacactagaggaacgactttcagctggggcacttaacaccttcccccgagcattcaagcaggtaatggaaggccgggatataaagctagtaatcaatcagacagcgcaggactgcttcggatgcctggaatccataagccaaataagaacggcaacccgagataaaaaggacacggtgacccgggagaaacacccaaagaaaccttttcagaagtggatgaaggacagagcaatcaaaaaaggtaattatcttcggttccagcgtttattttatcttgatagagggaaactggctaaaatcattttagatgatattgaatgcttgtcttgtgacataccactcagtgaaatttattcggtttttaaaacaagatgggaaacaactggtagctttaaaagccttggggactttaaaacttacgggaaggctgacaacactgccttcagagaattaattacggctaaagaaattgagaaaaatgtgcaggaaatgagcaaaggctcggctcccggtccagacgggattactcttggggacgtcgtaaagatggatcccgagttttcccggaccatggagattttcaatttatggttaacaactggtaaaatcccggacatggtgagggggtgcagaaccgttttgattccaaaatcatcaaagccggatcgtttgaaagacattaataactggagacctatcacgatcggttccatcttgctgagactgttctccaggattgtaacagctaggctgagcaaagcgtgccccctgaacccaaggcaaagaggctttatcagagcggcgggatgctctgaaaacttaaaactcctgcaaactataatttggtcggccaaaagagaacacagaccactgggtgttgtattcgtggacatcgccaaggcttttgacaccgtaagccaccagcacatcattcatgctttgcagcaaagagaggtggatccccacatcgtcggtctggtgagcaatatgtacgagaacatcagtacgtatatcaccacaaagaggaacacacacacagacaaaatccagatccgggttggagtaaagcagggtgacccgatgtcgccccttttatttaacctggcaatggaccctctattatgcaagctggaagagagtggcaaaggataccaccgaggacagagcagcatcacagcgatggcatttgcagacgatctggttttgctgagcgactcctgggaaaatatgaatacaaatattagcatactggagaccttctgcaatctgaccggactcaaaacacaggggcaaaagtgccacggcttttacatcaagccgacaaaggactcttacaccatcaatgactgcgctgcctggactatcaacggcacacccctgaacatgatcgaccccggcgaatctgagaaatacctcggcctgcagtttgacccgtggattggaatagcaaggtccggtctctccacaaaactagatttttggcttcagcggatcgatcaagcaccacttaaacctctgcagaaaactgatattctcaaaacatacaccatccctcggctgatctacatagctgaccactcagaagtgaaaactgcactactcgaaacccttgaccagaagatccggacagcggtcaaggaatggcttcacctacctccgtgcacctgcgatgccatcctgtactcgagcacgagagacggcggtttgggcatcaccaaattggcaggactgatccccagcgtgcaggcccgtagactgcatcggatcgcacagtcatctgacgatacgatgaaatgcttcatggaaaaagagaaaatggaacagctgcataagaaattgtggattcaagctggaggggacagagagaacataccctcgatttgggaagcaccaccgtcgagtgaaccaccaaacaacgtgagcacaaattcggaatgggaagcaccgacccagaaagataaatttccaaagccttgcaattggaggaaaaacgaattcaaaaaatggaccaaattggcatcccaaggccgcggaattgtaaattttgaaagagacaaaattagtaaccattggatccaatactacagacgcatacctcacaggaaactcctcactgcactacaactcagggccaacgtttaccccacgagagaatttctagccaggggtagacaagaccaatacatcaaggcgtgtaggcactgcgatgcggacattgaatcctgcgcccacatcatcggcaactgcccagtgacacaggacgcccgaatcaagaggcacaattacatctgcgaactgcttctcgaggaggcgaagaagaaggactgggtagtgttcaaggaaccgcacataagggattccaacaaggaactgtacaaacctgacctgatatttgtgaaggatgcccgtgcacttgtcgtggatgtgacagtacggtatgaagcagccaaatcatcgctggaggaagccgctgcagaggcagtgagaaagtacaaacacctggaaacggaagtaagacatctcacgaatgcaaaggacgttacttttgtgggctttcccctaggagcgcgggggaaatggcaccaagataactttaaacttttgactgagcttggcctctccaaatcgaggcaagtgaaaatggcagagactttttccacagtagcgctcttttcatctgtggacattgtacatatgtttgccagtagggccagaaaatctatggttatgtaaaccggtagacatgataagatacattgatgagtttggacaaaccacaactagaatgcagtgaaaaaaatgctttatttgtgaaatttgtgatgctattgctttatttgtaaccattataagctgcaataaacaagttaacaacaacaaaaaaaaaaaaaaaaaaaaaaaaaaaaaaacgttgactaaaaaaaaaaaaaaaaaaaaaaaaaaaaaaaaaaaaaaaaaaaaaaaaaaaaaaaaaaaaaaaaaaaaaa

SEQ ID NO: 10169 - DNA, 6640 bp, synthetic construct
  source 1..6640: mol_type = other DNA
ggtctagttacaactgggcatcgctgcagagatcgcacctcctcgtggtcccgctggtagcccttcgaagggtgactaagtcgatctctgccccaggtacggagccgttgggactcaccagtccaacgtaactcctgcctaaattcggtgaaacaaattcctcggtaaaaagccccatgaaacggacagccgacggaagcgagttcgagtcaccaaagaagaagcggaaagtccggctgaagaaactggacaagcccacactgcacacctgtaacaagaccagcttcgccaaggccttcctgcctaacgagacataccggcagcggctgctggactatatcgccatcattcaccagctggccgaccacgcctctcacgccctgaagttttacatcctgagcacctccaccagcagcttccctgtggtgcacgaggataccatcgaggccatcctgtacctgctgaacaagggcgaagcctggcatcccagaaaagaggccaagaaggcctggcgggattgcctgctgccttacgtgcagagatactgccagatcgtgggcttcattcaccccaacctgagaggcgagcagcagagcatcaactacctgaccgtgtccatgatgaccaacctgaaagtgaacgtgcaagagcacttcatgcagatgctgctgcggtacatcaatctgcgcttcgacgtgaagggccagaagcagagactgcctcctaagagcgacgcccgcaaggcctttttcacccggctgagatacctgaagtccgtgttcctgttcgacgtggtgcccgagctggaattcctggacgatctgacccctctggaaagcgaggtgctggaagagatctggtccctggacctgccttttctgcccaacgatcctctggcctacgccatcgtggccgatcctatgagcttcttcccagcctactgcaagctgagcggcctgtacgagcagtacggcttccagcggtttagcgccattcctctgcggagaagcctgatccagtctcacgtgcggatcgacaccatcatcctgtatcagcacatcctgtgcatcaccagacgggacgccgagacagtggaaaaggacgacctgtggatgagagtgtgcaacctgtgcaccaaagccttccggtccagatgcggcatgcacttcgagggcagcatcacaacagatggcgccagcgtgtccgtgtacctgaaacaccctgaggccgataagtacggcaagagaggcgccagaaagtccgccaatactgtggccgccgaagtgaaggccctgtacgtggaaaacaacctgcctgcctgtagagccgccgagaacgtggtggtcatcgaccccaacaagcgggatatcctgtactgccaggacagcaacggcaccaccttcagatacaccgccaaccagagagccgtggaaaccggcagcagaagattcgccaagcggcgggaagccatgaaggaagaagccggcgttgacctgatcgagagcagaatccctagccacaagaccatgaacctgatggacttcaccagatacctgctcgtgcggagagccgactgggacagacggaaagagttctactctcaccccgctcacacccggtggaagtggcacagcttcatcaaccggcagaagtccgagagcgacctgatcagcaacatgcggaacaaatacggcgagaacttcaccgtggtcatgggcgattggagcgacgctggaagaaccgccagattccagaccagcagcaagaccaaaggctggcggaccctgttcaagcggaaccggatcgattgcttcctgctggacgagtacaagacctccagcgtgtgccctagatgcagcagcagcgagttcgtggaaaagaagttcaagacccggcctcacagcagaccctggcgaagaagagagggcaagatcgagaaggtgcacggcctgctgggctgcaccaatcctaattgtctgcagcaggcctggaccagcggcatgagatactggaaccgggacatgctgagcacatgcaacatgctgctgatcgtgcggtccatgctggatggccatggcagacctgaggtgttctctagatctgtgcctgccgtggcctctggaggatctagcggaggatcctctggcagcgagacaccaggaacaagcgagtcagcaacaccagagagcagtggcggcagcagcggcggcagcagcgcttcttgcccgaaacctggccccccggtttcagcaggggcaatgagtttggaaagtggactgaccacccactccgttctcgccatcgaacgtggtcccaattcgttggcaaattccggatcagactttgggggggggggtctggggctaccgttacgcctattgagggtatcggtcggcactcagacctcccgctccgactgggtagacctggtgtcctggagccacccaggacccacgtctaagtcccagcaggttgacctggtgtctttatttcctaaacaccgggttgacctgttatccaaaaacgaccaggtagacctggtggctcaatttttaccatctaaatttccccccaatttggcagaaaatgatttggctttgctggtgaacttagagttctacagatcggatttgcatgtgtatgagtgtgttcattttgctgcacattgggagggattaagtggtttgcctgaggtgtatgaacaacttgcaccacaaccgtgtgtgggagaaactttacattctagcctcccacgagacagtgaactgtttgtgcctgaagaggggagcagcgagaaggagagcgaggacgcgccaaaaacatctcctccgacgcctgggaaacatggtttggaacagactggggaggaaaaagtgatggtgactgttcctgacaaaaatccaccttgtccttgctgtggtacccgggtaaactctgtgttgaatctgattgaacatctgaaagtgtcacacgggaaaaggggggtttgttttcggtgtgcaaaatgtggaaaggaaaatagtaactatcacagtgttgtttgtcattttccaaaatgcaggggtccagagacggagaaagccccagctggggagtggatttgtgaggtatgcaacagagattttacaaccaaaattggcctgggacaacacaagagattggcacacccagcagtgagaaatcaggaaaggatcgttgcttcccaaccgaaagaaacatcaaatagaggtgctcacaaaaggtgctggacaaaggaggaggaagaattactaataagactggaggctcagttcgagggaaacaaaaatattaataagcttattgcagaacacataaccaccaaaacagctaagcagatcagtgacaaaaggcgattgctgtccagaaagccagcagaggagccacgtgaggagcctggaacgtgtcatcacaccaggagagcagctgcgagcctgagaacggagcctgagatgagtcatcacgcccaggcagaggacagagataatggacctgggagacgccctctgccaggcagggcagctgccggagggagaacaatggacgagataagacgccaccctgataagggcaacggacagcagagacccaccaagcaaaaatcagaagaacagctgcaggcttactataaaaagacactagaggaacgactttcagctggggcacttaacaccttcccccgagcattcaagcaggtaatggaaggccgggatataaagctagtaatcaatcagacagcgcaggactgcttcggatgcctggaatccataagccaaataagaacggcaacccgagataaaaaggacacggtgacccgggagaaacacccaaagaaaccttttcagaagtggatgaaggacagagcaatcaaaaaaggtaattatcttcggttccagcgtttattttatcttgatagagggaaactggctaaaatcattttagatgatattgaatgcttgtcttgtgacataccactcagtgaaatttattcggtttttaaaacaagatgggaaacaactggtagctttaaaagccttggggactttaaaacttacgggaaggctgacaacactgccttcagagaattaattacggctaaagaaattgagaaaaatgtgcaggaaatgagcaaaggctcggctcccggtccagacgggattactcttggggacgtcgtaaagatggatcccgagttttcccggaccatggagattttcaatttatggttaacaactggtaaaatcccggacatggtgagggggtgcagaaccgttttgattccaaaatcatcaaagccggatcgtttgaaagacattaataactggagacctatcacgatcggttccatcttgctgagactgttctccaggattgtaacagctaggctgagcaaagcgtgccccctgaacccaaggcaaagaggctttatcagagcggcgggatgctctgaaaacttaaaactcctgcaaactataatttggtcggccaaaagagaacacagaccactgggtgttgtattcgtggacatcgccaaggcttttgacaccgtaagccaccagcacatcattcatgctttgcagcaaagagaggtggatccccacatcgtcggtctggtgagcaatatgtacgagaacatcagtacgtatatcaccacaaagaggaacacacacacagacaaaatccagatccgggttggagtaaagcagggtgacccgatgtcgccccttttatttaacctggcaatggaccctctattatgcaagctggaagagagtggcaaaggataccaccgaggacagagcagcatcacagcgatggcatttgcagacgatctggttttgctgagcgactcctgggaaaatatgaatacaaatattagcatactggagaccttctgcaatctgaccggactcaaaacacaggggcaaaagtgccacggcttttacatcaagccgacaaaggactcttacaccatcaatgactgcgctgcctggactatcaacggcacacccctgaacatgatcgaccccggcgaatctgagaaatacctcggcctgcagtttgacccgtggattggaatagcaaggtccggtctctccacaaaactagatttttggcttcagcggatcgatcaagcaccacttaaacctctgcagaaaactgatattctcaaaacatacaccatccctcggctgatctacatagctgaccactcagaagtgaaaactgcactactcgaaacccttgaccagaagatccggacagcggtcaaggaatggcttcacctacctccgtgcacctgcgatgccatcctgtactcgagcacgagagacggcggtttgggcatcaccaaattggcaggactgatccccagcgtgcaggcccgtagactgcatcggatcgcacagtcatctgacgatacgatgaaatgcttcatggaaaaagagaaaatggaacagctgcataagaaattgtggattcaagctggaggggacagagagaacataccctcgatttgggaagcaccaccgtcgagtgaaccaccaaacaacgtgagcacaaattcggaatgggaagcaccgacccagaaagataaatttccaaagccttgcaattggaggaaaaacgaattcaaaaaatggaccaaattggcatcccaaggccgcggaattgtaaattttgaaagagacaaaattagtaaccattggatccaatactacagacgcatacctcacaggaaactcctcactgcactacaactcagggccaacgtttaccccacgagagaatttctagccaggggtagacaagaccaatacatcaaggcgtgtaggcactgcgatgcggacattgaatcctgcgcccacatcatcggcaactgcccagtgacacaggacgcccgaatcaagaggcacaattacatctgcgaactgcttctcgaggaggcgaagaagaaggactgggtagtgttcaaggaaccgcacataagggattccaacaaggaactgtacaaacctgacctgatatttgtgaaggatgcccgtgcacttgtcgtggatgtgacagtacggtatgaagcagccaaatcatcgctggaggaagccgctgcagaggcagtgagaaagtacaaacacctggaaacggaagtaagacatctcacgaatgcaaaggacgttacttttgtgggctttcccctaggagcgcgggggaaatggcaccaagataactttaaacttttgactgagcttggcctctccaaatcgaggcaagtgaaaatggcagagactttttccacagtagcgctcttttcatctgtggacattgtacatatgtttgccagtagggccagaaaatctatggttatgtaaaccggtagacatgataagatacattgatgagtttggacaaaccacaactagaatgcagtgaaaaaaatgctttatttgtgaaatttgtgatgctattgctttatttgtaaccattataagctgcaataaacaagttaacaacaacaaaaaaaaaaaaaaaaaaaaaaaaaaaaaaacgttgactaaaaaaaaaaaaaaaaaaaaaaaaaaaaaaaaaaaaaaaaaaaaaaaaaaaaaaaaaaaaaaaaaaaaaa

SEQ ID NO: 10170 - DNA, 6586 bp, synthetic construct
  source 1..6586: mol_type = other DNA
ggtctagttacaactgggcatcgctgcagagatcgcacctcctcgtggtcccgctggtagcccttcgaagggtgactaagtcgatctctgccccaggtacggagccgttgggactcaccagtccaacgtaactcctgcctaaattcggtgaaacaaattcctcggtaaaaagccccatggcttcttgcccgaaacctggccccccggtttcagcaggggcaatgagtttggaaagtggactgaccacccactccgttctcgccatcgaacgtggtcccaattcgttggcaaattccggatcagactttgggggggggggtctggggctaccgttacgcctattgagggtatcggtcggcactcagacctcccgctccgactgggtagacctggtgtcctggagccacccaggacccacgtctaagtcccagcaggttgacctggtgtctttatttcctaaacaccgggttgacctgttatccaaaaacgaccaggtagacctggtggctcaatttttaccatctaaatttccccccaatttggcagaaaatgatttggctttgctggtgaacttagagttctacagatcggatttgcatgtgtatgagtgtgttcattttgctgcacattgggagggattaagtggtttgcctgaggtgtatgaacaacttgcaccacaaccgtgtgtgggagaaactttacattctagcctcccacgagacagtgaactgtttgtgcctgaagaggggagcagcgagaaggagagcgaggacgcgccaaaaacatctcctccgacgcctgggaaacatggtttggaacagactggggaggaaaaagtgatggtgactgttcctgacaaaaatccaccttgtccttgctgtggtacccgggtaaactctgtgttgaatctgattgaacatctgaaagtgtcacacgggaaaaggggggtttgttttcggtgtgcaaaatgtggaaaggaaaatagtaactatcacagtgttgtttgtcattttccaaaatgcaggggtccagagacggagaaagccccagctggggagtggatttgtgaggtatgcaacagagattttacaaccaaaattggcctgggacaacacaagagattggcacacccagcagtgagaaatcaggaaaggatcgttgcttcccaaccgaaagaaacatcaaatagaggtgctcacaaaaggtgctggacaaaggaggaggaagaattactaataagactggaggctcagttcgagggaaacaaaaatattaataagcttattgcagaacacataaccaccaaaacagctaagcagatcagtgacaaaaggcgattgctgtccagaaagccagcagaggagccacgtgaggagcctggaacgtgtcatcacaccaggagagcagctgcgagcctgagaacggagcctgagatgagtcatcacgcccaggcagaggacagagataatggacctgggagacgccctctgccaggcagggcagctgccggagggagaacaatggacgagataagacgccaccctgataagggcaacggacagcagagacccaccaagcaaaaatcagaagaacagctgcaggcttactataaaaagacactagaggaacgactttcagctggggcacttaacaccttcccccgagcattcaagcaggtaatggaaggccgggatataaagctagtaatcaatcagacagcgcaggactgcttcggatgcctggaatccataagccaaataagaacggcaacccgagataaaaaggacacggtgacccgggagaaacacccaaagaaaccttttcagaagtggatgaaggacagagcaatcaaaaaaggtaattatcttcggttccagcgtttattttatcttgatagagggaaactggctaaaatcattttagatgatattgaatgcttgtcttgtgacataccactcagtgaaatttattcggtttttaaaacaagatgggaaacaactggtagctttaaaagccttggggactttaaaacttacgggaaggctgacaacactgccttcagagaattaattacggctaaagaaattgagaaaaatgtgcaggaaatgagcaaaggctcggctcccggtccagacgggattactcttggggacgtcgtaaagatggatcccgagttttcccggaccatggagattttcaatttatggttaacaactggtaaaatcccggacatggtgagggggtgcagaaccgttttgattccaaaatcatcaaagccggatcgtttgaaagacattaataactggagacctatcacgatcggttccatcttgctgagactgttctccaggattgtaacagctaggctgagcaaagcgtgccccctgaacccaaggcaaagaggctttatcagagcggcgggatgctctgaaaacttaaaactcctgcaaactataatttggtcggccaaaagagaacacagaccactgggtgttgtattcgtggacatcgccaaggcttttgacaccgtaagccaccagcacatcattcatgctttgcagcaaagagaggtggatccccacatcgtcggtctggtgagcaatatgtacgagaacatcagtacgtatatcaccacaaagaggaacacacacacagacaaaatccagatccgggttggagtaaagcagggtgacccgatgtcgccccttttatttaacctggcaatggaccctctattatgcaagctggaagagagtggcaaaggataccaccgaggacagagcagcatcacagcgatggcatttgcagacgatctggttttgctgagcgactcctgggaaaatatgaatacaaatattagcatactggagaccttctgcaatctgaccggactcaaaacacaggggcaaaagtgccacggcttttacatcaagccgacaaaggactcttacaccatcaatgactgcgctgcctggactatcaacggcacacccctgaacatgatcgaccccggcgaatctgagaaatacctcggcctgcagtttgacccgtggattggaatagcaaggtccggtctctccacaaaactagatttttggcttcagcggatcgatcaagcaccacttaaacctctgcagaaaactgatattctcaaaacatacaccatccctcggctgatctacatagctgaccactcagaagtgaaaactgcactactcgaaacccttgaccagaagatccggacagcggtcaaggaatggcttcacctacctccgtgcacctgcgatgccatcctgtactcgagcacgagagacggcggtttgggcatcaccaaattggcaggactgatccccagcgtgcaggcccgtagactgcatcggatcgcacagtcatctgacgatacgatgaaatgcttcatggaaaaagagaaaatggaacagctgcataagaaattgtggattcaagctggaggggacagagagaacataccctcgatttgggaagcaccaccgtcgagtgaaccaccaaacaacgtgagcacaaattcggaatgggaagcaccgacccagaaagataaatttccaaagccttgcaattggaggaaaaacgaattcaaaaaatggaccaaattggcatcccaaggccgcggaattgtaaattttgaaagagacaaaattagtaaccattggatccaatactacagacgcatacctcacaggaaactcctcactgcactacaactcagggccaacgtttaccccacgagagaatttctagccaggggtagacaagaccaatacatcaaggcgtgtaggcactgcgatgcggacattgaatcctgcgcccacatcatcggcaactgcccagtgacacaggacgcccgaatcaagaggcacaattacatctgcgaactgcttctcgaggaggcgaagaagaaggactgggtagtgttcaaggaaccgcacataagggattccaacaaggaactgtacaaacctgacctgatatttgtgaaggatgcccgtgcacttgtcgtggatgtgacagtacggtatgaagcagccaaatcatcgctggaggaagccgctgcagagaaagtgagaaagtacaaacacctggaaacggaagtaagacatctcacgaatgcaaaggacgttacttttgtgggctttcccctaggagcgcgggggaaatggcaccaagataactttaaacttttgactgagcttggcctctccaaatcgaggcaagtgaaaatggcagagactttttccacagtagcgctcttttcatctgtggacattgtacatatgtttgccagtagggccagaaaatctatggttatgtctggaggatctagcggaggatcctctggcagcgagacaccaggaacaagcgagtcagcaacaccagagagcagtggcggcagcagcggcggcagcagccggctgaagaaactggacaagcccacactgcacacctgtaacaagaccagcttcgccaaggccttcctgcctaacgagacataccggcagcggctgctggactatatcgccatcattcaccagctggccgaccacgcctctcacgccctgaagttttacatcctgagcacctccaccagcagcttccctgtggtgcacgaggataccatcgaggccatcctgtacctgctgaacaagggcgaagcctggcatcccagaaaagaggccaagaaggcctggcgggattgcctgctgccttacgtgcagagatactgccagatcgtgggcttcattcaccccaacctgagaggcgagcagcagagcatcaactacctgaccgtgtccatgatgaccaacctgaaagtgaacgtgcaagagcacttcatgcagatgctgctgcggtacatcaatctgcgcttcgacgtgaagggccagaagcagagactgcctcctaagagcgacgcccgcaaggcctttttcacccggctgagatacctgaagtccgtgttcctgttcgacgtggtgcccgagctggaattcctggacgatctgacccctctggaaagcgaggtgctggaagagatctggtccctggacctgccttttctgcccaacgatcctctggcctacgccatcgtggccgatcctatgagcttcttcccagcctactgcaagctgagcggcctgtacgagcagtacggcttccagcggtttagcgccattcctctgcggagaagcctgatccagtctcacgtgcggatcgacaccatcatcctgtatcagcacatcctgtgcatcaccagacgggacgccgagacagtggaaaaggacgacctgtggatgagagtgtgcaacctgtgcaccaaagccttccggtccagatgcggcatgcacttcgagggcagcatcacaacagatggcgccagcgtgtccgtgtacctgaaacaccctgaggccgataagtacggcaagagaggcgccagaaagtccgccaatactgtggccgccgaagtgaaggccctgtacgtggaaaacaacctgcctgcctgtagagccgccgagaacgtggtggtcatcgaccccaacaagcgggatatcctgtactgccaggacagcaacggcaccaccttcagatacaccgccaaccagagagccgtggaaaccggcagcagaagattcgccaagcggcgggaagccatgaaggaagaagccggcgttgacctgatcgagagcagaatccctagccacaagaccatgaacctgatggacttcaccagatacctgctcgtgcggagagccgactgggacagacggaaagagttctactctcaccccgctcacacccggtggaagtggcacagcttcatcaaccggcagaagtccgagagcgacctgatcagcaacatgcggaacaaatacggcgagaacttcaccgtggtcatgggcgattggagcgacgctggaagaaccgccagattccagaccagcagcaagaccaaaggctggcggaccctgttcaagcggaaccggatcgattgcttcctgctggacgagtacaagacctccagcgtgtgccctagatgcagcagcagcgagttcgtggaaaagaagttcaagacccggcctcacagcagaccctggcgaagaagagagggcaagatcgagaaggtgcacggcctgctgggctgcaccaatcctaattgtctgcagcaggcctggaccagcggcatgagatactggaaccgggacatgctgagcacatgcaacatgctgctgatcgtgcggtccatgctggatggccatggcagacctgaggtgttctctagatctgtgcctgccgtggcctaaaccggtagacatgataagatacattgatgagtttggacaaaccacaactagaatgcagtgaaaaaaatgctttatttgtgaaatttgtgatgctattgctttatttgtaaccattataagctgcaataaacaagttaacaacaacaaaaaaaaaaaaaaaaaaaaaaaaaaaaaaacgttgactaaaaaaaaaaaaaaaaaaaaaaaaaaaaaaaaaaaaaaaaaaaaaaaaaaaaaaaaaaaaaaaaaaaaaa

SEQ ID NO: 10171 - DNA, 6586 bp, synthetic construct
  source 1..6586: mol_type = other DNA
ggtctagttacaactgggcatcgctgcagagatcgcacctcctcgtggtcccgctggtagcccttcgaagggtgactaagtcgatctctgccccaggtacggagccgttgggactcaccagtccaacgtaactcctgcctaaattcggtgaaacaaattcctcggtaaaaagccccatggcttcttgcccgaaacctggccccccggtttcagcaggggcaatgagtttggaaagtggactgaccacccactccgttctcgccatcgaacgtggtcccaattcgttggcaaattccggatcagactttgggggggggggtctggggctaccgttacgcctattgagggtatcggtcggcactcagacctcccgctccgactgggtagacctggtgtcctggagccacccaggacccacgtctaagtcccagcaggttgacctggtgtctttatttcctaaacaccgggttgacctgttatccaaaaacgaccaggtagacctggtggctcaatttttaccatctaaatttccccccaatttggcagaaaatgatttggctttgctggtgaacttagagttctacagatcggatttgcatgtgtatgagtgtgttcattttgctgcacattgggagggattaagtggtttgcctgaggtgtatgaacaacttgcaccacaaccgtgtgtgggagaaactttacattctagcctcccacgagacagtgaactgtttgtgcctgaagaggggagcagcgagaaggagagcgaggacgcgccaaaaacatctcctccgacgcctgggaaacatggtttggaacagactggggaggaaaaagtgatggtgactgttcctgacaaaaatccaccttgtccttgctgtggtacccgggtaaactctgtgttgaatctgattgaacatctgaaagtgtcacacgggaaaaggggggtttgttttcggtgtgcaaaatgtggaaaggaaaatagtaactatcacagtgttgtttgtcattttccaaaatgcaggggtccagagacggagaaagccccagctggggagtggatttgtgaggtatgcaacagagattttacaaccaaaattggcctgggacaacacaagagattggcacacccagcagtgagaaatcaggaaaggatcgttgcttcccaaccgaaagaaacatcaaatagaggtgctcacaaaaggtgctggacaaaggaggaggaagaattactaataagactggaggctcagttcgagggaaacaaaaatattaataagcttattgcagaacacataaccaccaaaacagctaagcagatcagtgacaaaaggcgattgctgtccagaaagccagcagaggagccacgtgaggagcctggaacgtgtcatcacaccaggagagcagctgcgagcctgagaacggagcctgagatgagtcatcacgcccaggcagaggacagagataatggacctgggagacgccctctgccaggcagggcagctgccggagggagaacaatggacgagataagacgccaccctgataagggcaacggacagcagagacccaccaagcaaaaatcagaagaacagctgcaggcttactataaaaagacactagaggaacgactttcagctggggcacttaacaccttcccccgagcattcaagcaggtaatggaaggccgggatataaagctagtaatcaatcagacagcgcaggactgcttcggatgcctggaatccataagccaaataagaacggcaacccgagataaaaaggacacggtgacccgggagaaacacccaaagaaaccttttcagaagtggatgaaggacagagcaatcaaaaaaggtaattatcttcggttccagcgtttattttatcttgatagagggaaactggctaaaatcattttagatgatattgaatgcttgtcttgtgacataccactcagtgaaatttattcggtttttaaaacaagatgggaaacaactggtagctttaaaagccttggggactttaaaacttacgggaaggctgacaacactgccttcagagaattaattacggctaaagaaattgagaaaaatgtgcaggaaatgagcaaaggctcggctcccggtccagacgggattactcttggggacgtcgtaaagatggatcccgagttttcccggaccatggagattttcaatttatggttaacaactggtaaaatcccggacatggtgagggggtgcagaaccgttttgattccaaaatcatcaaagccggatcgtttgaaagacattaataactggagacctatcacgatcggttccatcttgctgagactgttctccaggattgtaacagctaggctgagcaaagcgtgccccctgaacccaaggcaaagaggctttatcagagcggcgggatgctctgaaaacttaaaactcctgcaaactataatttggtcggccaaaagagaacacagaccactgggtgttgtattcgtggacatcgccaaggcttttgacaccgtaagccaccagcacatcattcatgctttgcagcaaagagaggtggatccccacatcgtcggtctggtgagcaatatgtacgagaacatcagtacgtatatcaccacaaagaggaacacacacacagacaaaatccagatccgggttggagtaaagcagggtgacccgatgtcgccccttttatttaacctggcaatggaccctctattatgcaagctggaagagagtggcaaaggataccaccgaggacagagcagcatcacagcgatggcatttgcagacgatctggttttgctgagcgactcctgggaaaatatgaatacaaatattagcatactggagaccttctgcaatctgaccggactcaaaacacaggggcaaaagtgccacggcttttacatcaagccgacaaaggactcttacaccatcaatgactgcgctgcctggactatcaacggcacacccctgaacatgatcgaccccggcgaatctgagaaatacctcggcctgcagtttgacccgtggattggaatagcaaggtccggtctctccacaaaactagatttttggcttcagcggatcgatcaagcaccacttaaacctctgcagaaaactgatattctcaaaacatacaccatccctcggctgatctacatagctgaccactcagaagtgaaaactgcactactcgaaacccttgaccagaagatccggacagcggtcaaggaatggcttcacctacctccgtgcacctgcgatgccatcctgtactcgagcacgagagacggcggtttgggcatcaccaaattggcaggactgatccccagcgtgcaggcccgtagactgcatcggatcgcacagtcatctgacgatacgatgaaatgcttcatggaaaaagagaaaatggaacagctgcataagaaattgtggattcaagctggaggggacagagagaacataccctcgatttgggaagcaccaccgtcgagtgaaccaccaaacaacgtgagcacaaattcggaatgggaagcaccgacccagaaagataaatttccaaagccttgcaattggaggaaaaacgaattcaaaaaatggaccaaattggcatcccaaggccgcggaattgtaaattttgaaagagacaaaattagtaaccattggatccaatactacagacgcatacctcacaggaaactcctcactgcactacaactcagggccaacgtttaccccacgagagaatttctagccaggggtagacaagaccaatacatcaaggcgtgtaggcactgcgatgcggacattgaatcctgcgcccacatcatcggcaactgcccagtgacacaggacgcccgaatcaagaggcacaattacatctgcgaactgcttctcgaggaggcgaagaagaaggactgggtagtgttcaaggaaccgcacataagggattccaacaaggaactgtacaaacctgacctgatatttgtgaaggatgcccgtgcacttgtcgtggatgtgacagtacggtatgaagcagccaaatcatcgctggaggaagccgctgcagagaaagtgagaaagtacaaacacctggaaacggaagtaagacatctcacgaatgcaaaggacgttacttttgtgggctttcccctaggagcgcgggggaaatggcaccaagataactttaaacttttgactgagcttggcctctccaaatcgaggcaagtgaaaatggcagagactttttccacagtagcgctcttttcatctgtggacattgtacatatgtttgccagtagggccagaaaatctatggttatgtctggaggatctagcggaggatcctctggcagcgagacaccaggaacaagcgagtcagcaacaccagagagcagtggcggcagcagcggcggcagcagccggctgaagaaactggacaagcccacactgcacacctgtaacaagaccagcttcgccaaggccttcctgcctaacgagacataccggcagcggctgctggactatatcgccatcattcaccagctggccgaccacgcctctcacgccctgaagttttacatcctgagcacctccaccagcagcttccctgtggtgcacgaggataccatcgaggccatcctgtacctgctgaacaagggcgaagcctggcatcccagaaaagaggccaagaaggcctggcgggattgcctgctgccttacgtgcagagatactgccagatcgtgggcttcattcaccccaacctgagaggcgagcagcagagcatcaactacctgaccgtgtccatgatgaccaacctgaaagtgaacgtgcaagagcacttcatgcagatgctgctgcggtacatcaatctgcgcttcgacgtgaagggccagaagcagagactgcctcctaagagcgacgcccgcaaggcctttttcacccggctgagatacctgaagtccgtgttcctgttcgacgtggtgcccgagctggaattcctggacgatctgacccctctggaaagcgaggtgctggaagagatctggtccctggacctgccttttctgcccaacgatcctctggcctacgccatcgtggccgatcctatgagcttcttcccagcctactgcaagctgagcggcctgtacgagcagtacggcttccagcggtttagcgccattcctctgcggagaagcctgatccagtctcacgtgcggatcgacaccatcatcctgtatcagcacatcctgtgcatcaccagacgggacgccgagacagtggaaaaggacgacctgtggatgagagtgtgcaacctgtgcaccaaagccttccggtccagatgcggcatgcacttcgagggcagcatcacaacagatggcgccagcgtgtccgtgtacctgaaacaccctgaggccgataagtacggcaagagaggcgccagaaagtccgccaatactgtggccgccgaagtgaaggccctgtacgtggaaaacaacctgcctgcctgtagagccgccgagaacgtggtggtcatcgaccccaacaagcgggatatcctgtactgccaggacagcaacggcaccaccttcagatacaccgccaaccagagagccgtggaaaccggcagcagaagattcgccaagcggcgggaagccatgaaggaagaagccggcgttgacctgatcgagagcagaatccctagccacaagaccatgaacctgatggacttcaccagatacctgctcgtgcggagagccgactgggacagacggaaagagttctactctcaccccgctcacacccggtggaagtggcacagcttcatcaaccggcagaagtccgagagcgacctgatcagcaacatgcggaacaaatacggcgagaacttcaccgtggtcatgggcgattggagcgacgctggaagaaccgccagattccagaccagcagcaagaccaaaggctggcggaccctgttcaagcggaaccggatcgattgcttcctgctggacgagtacaagacctccagcgtgtgccctagatgcagcagcagcgagttcgtggaaaagaagttcaagacccggcctcacagcagaccctggcgaagaagagagggcaagatcgagaaggtgcacggcctgctgggctgcaccaatcctaattgtctgcagcaggcctggaccagcggcatgagatactggaaccgggccatgctgagcacatgcaacatgctgctgatcgtgcggtccatgctggatggccatggcagacctgaggtgttctctagatctgtgcctgccgtggcctaaaccggtagacatgataagatacattgatgagtttggacaaaccacaactagaatgcagtgaaaaaaatgctttatttgtgaaatttgtgatgctattgctttatttgtaaccattataagctgcaataaacaagttaacaacaacaaaaaaaaaaaaaaaaaaaaaaaaaaaaaaacgttgactaaaaaaaaaaaaaaaaaaaaaaaaaaaaaaaaaaaaaaaaaaaaaaaaaaaaaaaaaaaaaaaaaaaaaa

SEQ ID NO: 10172-10229 - skipped (58 entries)

SEQ ID NO: 10230 - DNA, 3314 bp, synthetic construct
  source 1..3314: mol_type = other DNA
gagagatatccctagctagttcaccgcggcagcggtcgcggcagcctcgtgtgaggaccgacgagggtaaagaccatcgactctacctgcgcgactccaccgagcaaagacaccgacaaagcacttgagtactttactttattgttttactttacacttattttttgttgtcagtgcacttttattatgtgttttctaattcctgttgttactaacactcgcaaaacacgggaggtacgctgcaagcgtaatcctcacaaccttcgttcaatacatgtatctactatttcacaactctctctctccgtgggcctctggaattgtcaatcagctgttaacaaggctgattttattacctccatagctacatattctgactataatctcatggctctaactaggacctggttgaggccggaggacactgctacacatgctactctttctgctaatttctctttttcccacactcctcgtcagatcgggagagggggtgggactggactactaatttccaaagaatggaaatttactctgataccgtccctgccaacaatcagctcctttgaattccatgcagtcaccattatccaccccttctacataaatgtggttgtcatctaccgcccaccaggtaaacacggtaggttcctaatggaactggatgttcttctctcatctttttctaattttgacactcccttattggtgctaggtcacttcaacattagggttgacaaaccgcaaaggcacgactttcagactttgcttgcctcttttgacctaaaaagagcacctacttctgctacccacaaatcaggtaatcagctagaccttatttacacacgacactgcttcactgatcaaacaatagtaactccactacaaatgtctgatcatttccttctgtctctcaacatccacattactcctgagccgccacacactcctacactggttacctttcgcagaaacctacgatctctctcacccaatagactatccaccattgtttcagactctcttcctccatctcgcaaactcactgcacttgattcgaacagtgccactaatacactctgctccacactagcatcatgtctagaccgattatgtcctcttgcatccaggccagcccgtgccagtcctcctgcaccctggctctcggatgctctccgtgagcatcgctcaaaacttcgggctgcggagagaatttggcggaaaactaaaaatcctgcacatctcttaacataccaaactcttctgtcctctttctcagctgaggttacttctgcaaagcagacgtattaccgtctgaaaatcaacaatgccactaatcctcgcctactttttaaaacattttcctccctcctatatcctcctcctccacccgcatcctccacacttactactgatgactttgctacattcttctgcaccaaaactgcaaaaatcagtgctcaatttgctgcacctacaacaaacacgcaagatacaacaccaacaccacacacactcacctctttttctcagctctctgagtctgaggtgtccaaacttgtgctatctagccatgcaaccacctgtccactcgatcccattccctctcatctcttgcaagccatctctcctgcagtcataccaacactgactcacataattaacacatctcttgactctggtttattccccactacatttaagcaggctagggtaaccccactgctaaagaaacccaacctggaccatacgctacttgaaaactacagaccagtatccctgcttccattcatggccaagattctggagaaagtagtgttcaatcaagtcctggactttcttactcaaaacaatctcatggacaacaagcaatccggctttaagaaaggccactcaactgagactgccctgctctcggtcgtggaggatctcagactggctaaagcagactctaaatcatcagtcctcattttgctggacttgtcagctgcttttgacactgtcaaccaccagatcctgctatctacgcttgagtcactgggcgttgcgggcactgttatacaatggtttagatcttacctctctgacaggtcattcagggtgtcttggaggggagaggtgtccaacctacagcatctaaacactggggtacctcaaggctctgttcttgggccacttctcttctccatctacacatcatctctaggaccagtcatccagagacatggattctcctaccactgctatgctgatgacacccagctatacctctcttttcatcctgatgatccctcggttccagctcgtatctcagcctgcctgttggatatttcacactggatgaaagatcatcatcttcagctgaacctcgcaaaaacggaaatgcttgtagtttctagcaacatgactctacaccataacttttcaatccagatggatggggcaaccattactgcatccaaaatggtgaaaagccttggagtaacgattgatgaccaactaaacttctctgaccacatttctagaactgctcgatcgtgcagatttgcactctataacatcagaaagatccgacccttcttatctgaacatgcagctcaactccttgttcaagctcttgttctctccaaactggattactgcaactctctactagctttgcttccagctaacaagatcaagcctcttcaactgctccagaatgcagcagcacgagttgtgttcaatgaacctaaacgagcacatgtcactccgctgctagtccgtttgcactggctgccagttgctgctcgcatcaaattcaaaactctgatgtttgcctacaaagtgacttctggcctagcaccttcttatctgcactcacttctgcagatctatgtgccctccagaaacttgcgttctgtgaatgaacgtcgcctcgtggttccatcccaaagagggaaaaaatcacttaggcgaacgctcacgctcaatctgcccagttggtggaatgaactccctaactgcatcagaacagcagagtcactcgctattttcaagaaacgactaaaaactcaactatttagtctccacttcacttcctgataataggctgcaattgcctctttgaatatcacactaattgtacaaaaaaaaaaaaaaaaaaaaaaaaaactactaacacttcccttcttagactttacagaccgcggcctactcggatccaaaaaaaaaaaaaaaaaaaaaaaaaaaaaaaacgttgactaaaaaaaaaaaaaaaaaaaaaaaaaaaaaaaaaaaaaaaaaaaaaaaaaaaaaaaaaaaaaaaaaaaaaa

SEQ ID NO: 10231 - DNA, 4603 bp, synthetic construct
  source 1..4603: mol_type = other DNA
ggtctagttacaactgggcatcgctgcagagatcgcacctcctcgtggtcccgctggtagcccttcgaagggtgactaagtcgatctctgccccaggtacggagccgttgggactcaccagtccaacgtaactcctgcctaaattcggtgaaacaaattcctcggtaaaaagccccatggcttcttgcccgaaacctggccccccggtttcagcaggggcaatgagtttggaaagtggactgaccacccactccgttctcgccatcgaacgtggtcccaattcgttggcaaattccggatcagactttgggggggggggtctggggctaccgttacgcctattgagggtatcggtcggcactcagacctcccgctccgactgggtagacctggtgtcctggagccacccaggacccacgtctaagtcccagcaggttgacctggtgtctttatttcctaaacaccgggttgacctgttatccaaaaacgaccaggtagacctggtggctcaatttttaccatctaaatttccccccaatttggcagaaaatgatttggctttgctggtgaacttagagttctacagatcggatttgcatgtgtatgagtgtgttcattttgctgcacattgggagggattaagtggtttgcctgaggtgtatgaacaacttgcaccacaaccgtgtgtgggagaaactttacattctagcctcccacgagacagtgaactgtttgtgcctgaagaggggagcagcgagaaggagagcgaggacgcgccaaaaacatctcctccgacgcctgggaaacatggtttggaacagactggggaggaaaaagtgatggtgactgttcctgacaaaaatccaccttgtccttgctgtggtacccgggtaaactctgtgttgaatctgattgaacatctgaaagtgtcacacgggaaaaggggggtttgttttcggtgtgcaaaatgtggaaaggaaaatagtaactatcacagtgttgtttgtcattttaagaaatgcaggggtccagagacggagaaagccccagctggggagtggatttgtgaggtatgcaacagagattttacaaccaaaattggcctgggacaacacaagagattggcacacccagcagtgagaaatcaggaaaggatcgttgcttcccaaccgaaagaaacatcaaatagaggtgctcacaaaaggtgctggacaaaggaggaggaagaattactaataagactggaggctcagttcgagggaaacaaaaatattaataagcttattgcagaacacataaccaccaaaacagctaagcagatcagtgacaaaaggcgattgctgtccagaaagccagcagaggagccacgtgaggagcctggaacgtgtcatcacaccaggagagcagctgcgagcctgagaacggagcctgagatgagtcatcacgcccaggcagaggacagagataatggacctgggagacgccctctgccaggcagggcagctgccggagggagaacaatggacgagataagacgccaccctgataagggcaacggacagcagagacccaccaagcaaaaatcagaagaacagctgcaggcttactataaaaagacactagaggaacgactttcagctggggcacttaacaccttcccccgagcattcaagcaggtaatggaaggccgggatataaagctagtaatcaatcagacagcgcaggactgcttcggatgcctggaatccataagccaaataagaacggcaacccgagataaaaaggacacggtgacccgggagaaacacccaaagaaaccttttcagaagtggatgaaggacagagcaatcaaaaaaggtaattatcttcggttccagcgtttattttatcttgatagagggaaactggctaggatcattttagatgatattgaatgcttgtcttgtgacataccactcagtgaaatttattcggtttttaaaacaagatgggaaacaactggtagctttaaaagccttggggactttaaaacttacgggaaggctgacaacactgccttcagagaattaattacggctaaagaaattgagaaaaatgtgcaggaaatgagcaaaggctcggctcccggtccagacgggattactcttggggacgtcgtaaagatggatcccgagttttcccggaccatggagattttcaatttatggttaacaactggtaaaatcccggacatggtgagggggtgcagaaccgttttgattccaaaatcatcaaagccggatcgtttgaaagacattaataactggagacctatcacgatcggttccatcttgctgagactgttctccaggattgtaacagctaggctgagcaaagcgtgccccctgaacccaaggcaaagaggctttatcagagcggcgggatgctctgaaaacttaaaactcctgcaaactataatttggtcggccaaaagagaacacagaccactgggtgttgtattcgtggacatcgccaaggcttttgacaccgtaagccaccagcacatcattcatgctttgcagcaaagagaggtggatccccacatcgtcggtctggtgagcaatatgtacgagaacatcagtacgtatatcaccacaaagaggaacacacacacagacaaaatccagatccgggttggagtaaagcagggtgacccgatgtcgccccttttatttaacctggcaatggaccctctattatgcaagctggaagagagtggcaaaggataccaccgaggacagagcagcatcacagcgatggcatttgcagacgatctggttttgctgagcgactcctgggaaaatatgaatacaaatattagcatactggagaccttctgcaatctgaccggactcaaaacacaggggcaaaagtgccacggcttttacatcaagccgacaaaggactcttacaccatcaatgactgcgctgcctggactatcaacggcacacccctgaacatgatcgaccccggcgaatctgagaaatacctcggcctgcagtttgacccgtggattggaatagcaaggtccggtctctccacaaaactagatttttggcttcagcggatcgatcaagcaccacttaaacctctgcagaaaactgatattctcaaaacatacaccatccctcggctgatctacatagctgaccactcagaagtgaaaactgcactactcgaaacccttgaccagaagatccggacagcggtcaaggaatggcttcacctacctccgtgcacctgcgatgccatcctgtactcgagcacgagagacggcggtttgggcatcaccaaattggcaggactgatccccagcgtgcaggcccgtagactgcatcggatcgcacagtcatctgacgatacgatgaaatgcttcatggaaaaagagaaaatggaacagctgcataagaaattgtggattcaagctggaggggacagagagaacataccctcgatttgggaagcaccaccgtcgagtgaaccaccaaacaacgtgagcacaaattcggaatgggaagcaccgacccagaaagataaatttccaaagccttgcaattggaggaaaaacgaattcaaaaaatggaccaaattggcatcccaaggccgcggaattgtaaattttgaaagagacaaaattagtaaccattggatccaatactacagacgcatacctcacaggaaactcctcactgcactacaactcagggccaacgtttaccccacgagagaatttctagccaggggtagacaagaccaatacatcaaggcgtgtaggcactgcgatgcggacattgaatcctgcgcccacatcatcggcaactgcccagtgacacaggacgcccgaatcaagaggcacaattacatctgcgaactgcttctcgaggaggcgaagaagaaggactgggtagtgttcaaggaaccgcacataagggattccaacaaggaactgtacaaacctgacctgatatttgtgaaggatgcccgtgcacttgtcgtggatgtgacagtacggtatgaagcagccaaatcatcgctggaggaagccgctgcagagaaagtgagaaagtacaaacacctggaaacggaagtaagacatctcacgaatgcaaaggacgttacttttgtgggctttcccctaggagcgcgggggaaatggcaccaagataactttaaacttttgactgagcttggcctctccaaatcgaggcaagtgaaaatggcagagactttttccacagtagcgctcttttcatctgtggacattgtacatatgtttgccagtagggccagaaaatctatggttatgtaaaccggtagacatgataagatacattgatgagtttggacaaaccacaactagaatgcagtgaaaaaaatgctttatttgtgaaatttgtgatgctattgctttatttgtaaccattataagctgcaataaacaagttaacaacaacaaaaaaaaaaaaaaaaaaaaaaaaaaaaaaacgttgactaaaaaaaaaaaaaaaaaaaaaaaaaaaaaaaaaaaaaaaaaaaaaaaaaaaaaaaaaaaaaaaaaaaaaa

SEQ ID NO: 10232 - DNA, 4603 bp, synthetic construct
  source 1..4603: mol_type = other DNA
ggtctagttacaactgggcatcgctgcagagatcgcacctcctcgtggtcccgctggtagcccttcgaagggtgactaagtcgatctctgccccaggtacggagccgttgggactcaccagtccaacgtaactcctgcctaaattcggtgaaacaaattcctcggtaaaaagccccatggcttcttgcccgaaacctggccccccggtttcagcaggggcaatgagtttggaaagtggactgaccacccactccgttctcgccatcgaacgtggtcccaattcgttggcaaattccggatcagactttgggggggggggtctggggctaccgttacgcctattgagggtatcggtcggcactcagacctcccgctccgactgggtagacctggtgtcctggagccacccaggacccacgtctaagtcccagcaggttgacctggtgtctttatttcctaaacaccgggttgacctgttatccaaaaacgaccaggtagacctggtggctcaatttttaccatctaaatttccccccaatttggcagaaaatgatttggctttgctggtgaacttagagttctacagatcggatttgcatgtgtatgagtgtgttcattttgctgcacattgggagggattaagtggtttgcctgaggtgtatgaacaacttgcaccacaaccgtgtgtgggagaaactttacattctagcctcccacgagacagtgaactgtttgtgcctgaagaggggagcagcgagaaggagagcgaggacgcgccaaaaacatctcctccgacgcctgggaaacatggtttggaacagactggggaggaaaaagtgatggtgactgttcctgacaaaaatccaccttgtccttgctgtggtacccgggtaaactctgtgttgaatctgattgaacatctgaaagtgtcacacgggaaaaggggggtttgttttcggtgtgcaaaatgtggaaaggaaaatagtaactatcacagtgttgtttgtcattttccaaaatgcaggggtccagagacggagaaagccccagctggggagtggatttgtgaggtatgcaacagagattttacaaccaaaattggcctgggacaacacaagagattggcacacccagcagtgagaaatcaggaaaggatcgttgcttcccaaccgaaagaaacatcaaatagaggtgctcacaaaaggtgctggacaaaggaggaggaagaattactaataagactggaggctcagttcgagggaaacaaaaatattaataagcttattgcagaacacataaccaccaaaacagctaagcagatcagtgacaaaaggcgattgctgtccagaaagccagcagaggagccacgtgaggagcctggaacgtgtcatcacaccaggagagcagctgcgagcctgagaacggagcctgagatgagtcatcacgcccaggcagaggacagagataatggacctgggagacgccctctgccaggcagggcagctgccggagggagaacaatggacgagataagacgccaccctgataagggcaacggacagcagagacccaccaagcaaaaatcagaagaacagctgcaggcttactataaaaagacactagaggaacgactttcagctggggcacttaacaccttcccccgagcattcaagcaggtaatggaaggccgggatataaagctagtaatcaatcagacagcgcaggactgcttcggatgcctggaatccataagccaaataagaacggcaacccgagataaaaaggacacggtgacccgggagaaacacccaaagaaaccttttcagaagtggatgaagaagagagcaatcaaaaaaggtaattatcttcggttccagcgtttattttatcttgatagagggaaactggctaaaatcattttagatgatattgaatgcttgtcttgtgacataccactcagtgaaatttattcggtttttaaaacaagatgggaaacaactggtagctttaaaagccttggggactttaaaacttacgggaaggctgacaacactgccttcagagaattaattacggctaaagaaattgagaaaaatgtgcaggaaatgagcaaaggctcggctcccggtccagacgggattactcttggggacgtcgtaaagatggatcccgagttttcccggaccatggagattttcaatttatggttaacaactggtaaaatcccggacatggtgagggggtgcagaaccgttttgattccaaaatcatcaaagccggatcgtttgaaagacattaataactggagacctatcacgatcggttccatcttgctgagactgttctccaggattgtaacagctaggctgagcaaagcgtgccccctgaacccaaggcaaagaggctttatcagagcggcgggatgctctgaaaacttaaaactcctgcaaactataatttggtcggccaaaagagaacacagaccactgggtgttgtattcgtggacatcgccaaggcttttgacaccgtaagccaccagcacatcattcatgctttgcagcaaagagaggtggatccccacatcgtcggtctggtgagcaatatgtacgagaacatcagtacgtatatcaccacaaagaggaacacacacacagacaaaatccagatccgggttggagtaaagcagggtgacccgatgtcgccccttttatttaacctggcaatggaccctctattatgcaagctggaagagagtggcaaaggataccaccgaggacagagcagcatcacagcgatggcatttgcagacgatctggttttgctgagcgactcctgggaaaatatgaatacaaatattagcatactggagaccttctgcaatctgaccggactcaaaacacaggggcaaaagtgccacggcttttacatcaagccgacaaaggactcttacaccatcaatgactgcgctgcctggactatcaacggcacacccctgaacatgatcgaccccggcgaatctgagaaatacctcggcctgcagtttgacccgtggattggaatagcaaggtccggtctctccacaaaactagatttttggcttcagcggatcgatcaagcaccacttaaacctctgcagaaaactgatattctcaaaacatacaccatccctcggctgatctacatagctgaccactcagaagtgaaaactggcctactcgaaacccttgaccagaagatccggacagcggtcaaggaatggcttcacctacctccgtgcacctgcgatgccatcctgtactcgagcacgagagacggcggtttgggcatcaccaaattggcaggactgatccccagcgtgcaggcccgtagactgcatcggatcgcacagtcatctgacgatacgatgaaatgcttcatggaaaaagagaaaatggaacagctgcataagaaattgtggattcaagctggaggggacagagagaacataccctcgatttgggaagcaccaccgtcgagtgaaccaccaaacaacgtgagcacaaattcggaatgggaagcaccgacccagaaagataaatttccaaagccttgcaattggaggaaaaacgaattcaaaaaatggaccaaattggcatcccaaggccgcggaattgtaaattttgaaagagacaaaattagtaaccattggatccaatactacagacgcatacctcacaggaaactcctcactgcactacaactcagggccaacgtttaccccacgagagaatttctagccaggggtagacaagaccaatacatcaaggcgtgtaggcactgcgatgcggacattgaatcctgcgcccacatcatcggcaactgcccagtgacacaggacgcccgaatcaagaggcacaattacatctgcgaactgcttctcgaggaggcgaagaagaaggactgggtagtgttcaaggaaccgcacataagggattccaacaaggaactgtacaaacctgacctgatatttgtgaaggatgcccgtgcacttgtcgtggatgtgacagtacggtatgaagcagccaaatcatcgctggaggaagccgctgcagagaaagtgagaaagtacaaacacctggaaacggaagtaagacatctcacgaatgcaaaggacgttacttttgtgggctttcccctaggagcgcgggggaaatggcaccaagataactttaaacttttgactgagcttggcctctccaaatcgaggcaagtgaaaatggcagagactttttccacagtagcgctcttttcatctgtggacattgtacatatgtttgccagtagggccagaaaatctatggttatgtaaaccggtagacatgataagatacattgatgagtttggacaaaccacaactagaatgcagtgaaaaaaatgctttatttgtgaaatttgtgatgctattgctttatttgtaaccattataagctgcaataaacaagttaacaacaacaaaaaaaaaaaaaaaaaaaaaaaaaaaaaaacgttgactaaaaaaaaaaaaaaaaaaaaaaaaaaaaaaaaaaaaaaaaaaaaaaaaaaaaaaaaaaaaaaaaaaaaaa

SEQ ID NO: 10233 - DNA, 4603 bp, synthetic construct
  source 1..4603: mol_type = other DNA
ggtctagttacaactgggcatcgctgcagagatcgcacctcctcgtggtcccgctggtagcccttcgaagggtgactaagtcgatctctgccccaggtacggagccgttgggactcaccagtccaacgtaactcctgcctaaattcggtgaaacaaattcctcggtaaaaagccccatggcttcttgcccgaaacctggccccccggtttcagcaggggcaatgagtttggaaagtggactgaccacccactccgttctcgccatcgaacgtggtcccaattcgttggcaaattccggatcagactttgggggggggggtctggggctaccgttacgcctattgagggtatcggtcggcactcagacctcccgctccgactgggtagacctggtgtcctggagccacccaggacccacgtctaagtcccagcaggttgacctggtgtctttatttcctaaacaccgggttgacctgttatccaaaaacgaccaggtagacctggtggctcaatttttaccatctaaatttccccccaatttggcagaaaatgatttggctttgctggtgaacttagagttctacagatcggatttgcatgtgtatgagggcgttcattttgctgcacattgggagggattaagtggtttgcctgaggtgtatgaacaacttgcaccacaaccgtgtgtgggagaaactttacattctagcctcccacgagacagtgaactgtttgtgcctgaagaggggagcagcgagaaggagagcgaggacgcgccaaaaacatctcctccgacgcctgggaaacatggtttggaacagactggggaggaaaaagtgatggtgactgttcctgacaaaaatccaccttgtccttgctgtggtacccgggtaaactctgtgttgaatctgattgaacatctgaaagtgtcacacgggaaaaggggggtttgttttcggtgtgcaaaatgtggaaaggaaaatagtaactatcacagtgttgtttgtcattttccaaaatgcaggggtccagagacggagaaagccccagctggggagtggatttgtgaggtatgcaacagagattttacaaccaaaattggcctgggacaacacaagagattggcacacccagcagtgagaaatcaggaaaggatcgttgcttcccaaccgaaagaaacatcaaatagaggtgctcacaaaaggtgctggacaaaggaggaggaagaattactaataagactggaggctcagttcgagggaaacaaaaatattaataagcttattgcagaacacataaccaccaaaacagctaagcagatcagtgacaaaaggcgattgctgtccagaaagccagcagaggagccacgtgaggagcctggaacgtgtcatcacaccaggagagcagctgcgagcctgagaacggagcctgagatgagtcatcacgcccaggcagaggacagagataatggacctgggagacgccctctgccaggcagggcagctgccggagggagaacaatggacgagataagacgccaccctgataagggcaacggacagcagagacccaccaagcaaaaatcagaagaacagctgcaggcttactataaaaagacactagaggaacgactttcagctggggcacttaacaccttcccccgagcattcaagcaggtaatggaaggccgggatataaagctagtaatcaatcagacagcgcaggactgcttcggatgcctggaatccataagccaaataagaacggcaacccgagataaaaaggacacggtgacccgggagaaacacccaaagaaaccttttcagaagtggatgaaggacagagcaatcaaaaaaggtaattatcttcggttccagcgtttattttatcttgatagagggaaactggctaaaatcattttagatgatattgaatgcttgtcttgtgacataccactcagtgaaatttattcggtttttaaaacaagatgggaaacaactggtagctttaaaagccttggggactttaaaacttacgggaaggctgacaacactgccttcagagaattaattacggctaaagaaattgagaaaaatgtgcaggaaatgagcaaaggctcggctcccggtccagacgggattactcttggggacgtcgtaaagatggatcccgagttttcccggaccatggagattttcaatttatggttaacaactggtaaaatcccggacatggtgagggggtgcagaaccgttttgattccaaaatcatcaaagccggatcgtttgaaagacattaataactggagacctatcacgatcggttccatcttgctgagactgttctccaggattgtaacagctaggctgagcaaagcgtgccccctgaacccaaggcaaagaggctttatcagagcggcgggatgctctgaaaacttaaaactcctgcaaactataatttggtcggccaaaagagaacacagaccactgggtgttgtattcgtggacatcgccaaggcttttgacaccgtaagccaccagcacatcattcatgctttgcagcaaagagaggtggatccccacatcgtcggtctggtgagcaatatgtacgagaacatcagtacgtatatcaccacaaagaggaacacacacacagacaaaatccagatccgggttggagtaaagcagggtgacccgatgtcgccccttttatttaacctggcaatggaccctctattatgcaagctggaagagagtggcaaaggataccaccgaggacagagcagcatcacagcgatggcatttgcagacgatctggttttgctgagcgactcctgggaaaatatgaatacaaatattagcatactggagaccttctgcaatctgaccggactcaaaacacaggggcaaaagtgccacggcttttacatcaagccgacaaaggactcttacaccatcaatgactgcgctgcctggactatcaacggcacacccctgaacatgatcgaccccggcgaatctgagaaatacctcggcctgcagtttgacccgtggattggaatagcaaggtccggtctctccacaaaactagatttttggcttcagcggatcgatcaagcaccacttaaacctctgcagaaaactgatattctcaaaacatacaccatccctcggctgatctacatagctgaccactcagaagtgaaaactgcactactcgaaacccttgaccagaagatccggacagcggtcaaggaatggcttcacctacctccgtgcacctgcgatgccatcctgtactcgagcacgagagacggcggtttgggcatcaccaaattggcaggactgatccccagcgtgcaggcccgtagactgcatcggatcgcacagtcatctgacgatacgatgaaatgcttcatggaaaaagagaaaatggaacagctgcataagaaattgtggattcaagctggaggggacagagagaacataccctcgatttgggaagcaccaccgtcgagtgaaccaccaaacaacgtgagcacaaattcggaatgggaagcaccgacccagaaagataaatttccaaagccttgcaattggaggaaaaacgaattcaaaaaatggaccaaattggcatcccaaggccgcggaattgtaaattttgaaagagacaaaattagtaaccattggatccaatactacagacgcatacctcacaggaaactcctcactgcactacaactcagggccaacgtttaccccacgagagaatttctagccaggggtagacaagaccaatacatcaaggcgtgtaggcactgcgatgcggacattgaatcctgcgcccacatcatcggcaactgcccagtgacacaggacgcccgaatcaagaggcacaattacatctgcgaactgcttctcgaggaggcgaagaagaaggactgggtagtgttcaaggaaccgcacataagggattccaacaaggaactgtacaaacctgacctgatatttgtgaaggatgcccgtgcacttgtcgtggatgtgacagtacggtatgaagcagccaaatcatcgctggaggaagccgctgcagagaaagtgagaaagtacaaacacctggaaacggaagtaagacatctcacgaatgcaaaggacgttacttttgtgggctttcccctaggagcgcgggggaaatggcaccaagataactttaaacttttgactgagcttggcctctccaaatcgaggcaagtgaaaatggcagagactttttccacagtagcgctcttttcatctgtggacattgtacatatgtttgccagtagggccagaaaatctatggttatgtaaaccggtagacatgataagatacattgatgagtttggacaaaccacaactagaatgcagtgaaaaaaatgctttatttgtgaaatttgtgatgctattgctttatttgtaaccattataagctgcaataaacaagttaacaacaacaaaaaaaaaaaaaaaaaaaaaaaaaaaaaaacgttgactaaaaaaaaaaaaaaaaaaaaaaaaaaaaaaaaaaaaaaaaaaaaaaaaaaaaaaaaaaaaaaaaaaaaaa

SEQ ID NO: 10234 - DNA, 4603 bp, synthetic construct
  source 1..4603: mol_type = other DNA
ggtctagttacaactgggcatcgctgcagagatcgcacctcctcgtggtcccgctggtagcccttcgaagggtgactaagtcgatctctgccccaggtacggagccgttgggactcaccagtccaacgtaactcctgcctaaattcggtgaaacaaattcctcggtaaaaagccccatggcttcttgcccgaaacctggccccccggtttcagcaggggcaatgagtttggaaagtggactgaccacccactccgttctcgccatcgaacgtggtcccaattcgttggcaaattccggatcagactttgggggggggggtctggggctaccgttacgcctattgagggtatcggtcggcactcagacctcccgctccgactgggtagacctggtgtcctggagccacccaggacccacgtctaagtcccagcaggttgacctggtgtctttatttcctaaacaccgggttgacctgttatccaaaaacgaccaggtagacctggtggctcaatttttaccatctaaatttccccccaatttggcagaaaatgatttggctttgctggtgaacttagagttctacagatcggatttgcatgtgtatgagtgtgttcattttgctgcacattgggagggattaagtggtttgcctgaggtgtatgaacaacttgcaccacaaccgtgtgtgggagaaactttacattctagcctcccacgagacagtgaactgtttgtgcctgaagaggggagcagcgagaaggagagcgaggacgcgccaaaaacatctcctccgacgcctgggaaacatggtttggaacagactggggaggaaaaagtgatggtgactgttcctgacaaaaatccaccttgtccttgctgtggtacccgggtaaactctgtgttgaatctgattgaacatctgaaagtgtcacacgggaaaaggggggtttgttttcggtgtgcaaaatgtggaaaggaaaatagtaactatcacagtgttgtttgtcattttaagaaatgcaggggtccagagacggagaaagccccagctggggagtggatttgtgaggtatgcaacagagattttacaaccaaaattggcctgggacaacacaagagattggcacacccagcagtgagaaatcaggaaaggatcgttgcttcccaaccgaaagaaacatcaaatagaggtgctcacaaaaggtgctggacaaaggaggaggaagaattactaataagactggaggctcagttcgagggaaacaaaaatattaataagcttattgcagaacacataaccaccaaaacagctaagcagatcagtgacaaaaggcgattgctgtccagaaagccagcagaggagccacgtgaggagcctggaacgtgtcatcacaccaggagagcagctgcgagcctgagaacggagcctgagatgagtcatcacgcccaggcagaggacagagataatggacctgggagacgccctctgccaggcagggcagctgccggagggagaacaatggacgagataagacgccaccctgataagggcaacggacagcagagacccaccaagcaaaaatcagaagaacagctgcaggcttactataaaaagacactagaggaacgactttcagctggggcacttaacaccttcccccgagcattcaagcaggtaatggaaggccgggatataaagctagtaatcaatcagacagcgcaggactgcttcggatgcctggaatccataagccaaataagaacggcaacccgagataaaaaggacacggtgacccgggagaaacacccaaagaaaccttttcagaagtggatgaagaagagagcaatcaaaaaaggtaattatcttcggttccagcgtttattttatcttgatagagggaaactggctaaaatcattttagatgatattgaatgcttgtcttgtgacataccactcagtgaaatttattcggtttttaaaacaagatgggaaacaactggtagctttaaaagccttggggactttaaaacttacgggaaggctgacaacactgccttcagagaattaattacggctaaagaaattgagaaaaatgtgcaggaaatgagcaaaggctcggctcccggtccagacgggattactcttggggacgtcgtaaagatggatcccgagttttcccggaccatggagattttcaatttatggttaacaactggtaaaatcccggacatggtgagggggtgcagaaccgttttgattccaaaatcatcaaagccggatcgtttgaaagacattaataactggagacctatcacgatcggttccatcttgctgagactgttctccaggattgtaacagctaggctgagcaaagcgtgccccctgaacccaaggcaaagaggctttatcagagcggcgggatgctctgaaaacttaaaactcctgcaaactataatttggtcggccaaaagagaacacagaccactgggtgttgtattcgtggacatcgccaaggcttttgacaccgtaagccaccagcacatcattcatgctttgcagcaaagagaggtggatccccacatcgtcggtctggtgagcaatatgtacgagaacatcagtacgtatatcaccacaaagaggaacacacacacagacaaaatccagatccgggttggagtaaagcagggtgacccgatgtcgccccttttatttaacctggcaatggaccctctattatgcaagctggaagagagtggcaaaggataccaccgaggacagagcagcatcacagcgatggcatttgcagacgatctggttttgctgagcgactcctgggaaaatatgaatacaaatattagcatactggagaccttctgcaatctgaccggactcaaaacacaggggcaaaagtgccacggcttttacatcaagccgacaaaggactcttacaccatcaatgactgcgctgcctggactatcaacggcacacccctgaacatgatcgaccccggcgaatctgagaaatacctcggcctgcagtttgacccgtggattggaatagcaaggtccggtctctccacaaaactagatttttggcttcagcggatcgatcaagcaccacttaaacctctgcagaaaactgatattctcaaaacatacaccatccctcggctgatctacatagctgaccactcagaagtgaaaagcgcactactcgaaacccttgaccagaagatccggacagcggtcaaggaatggcttcacctacctccgtgcacctgcgatgccatcctgtactcgagcacgagagacggcggtttgggcatcaccaaattggcaggactgatccccagcgtgcaggcccgtagactgcatcggatcgcacagtcatctgacgatacgatgaaatgcttcatggaaaaagagaaaatggaacagctgcataagaaattgtggattcaagctggaggggacagagagaacataccctcgatttgggaagcaccaccgtcgagtgaaccaccaaacaacgtgagcacaaattcggaatgggaagcaccgacccagaaagataaatttccaaagccttgcaattggaggaaaaacgaattcaaaaaatggaccaaattggcatcccaaggccgcggaattgtaaattttgaaagagacaaaattagtaaccattggatccaatactacagacgcatacctcacaggaaactcctcactgcactacaactcagggccaacgtttaccccacgagagaatttctagccaggggtagacaagaccaatacatcaaggcgtgtaggcactgcgatgcggacaacgaatcctgcgcccacatcatcggcaactgcccagtgacacaggacgcccgaatcaagaggcacaattacatctgcgaactgcttctcgaggaggcgaagaagaaggactgggtagtgttcaaggaaccgcacataagggattccaacaaggaactgtacaaacctgacctgatatttgtgaaggatgcccgtgcacttgtcgtggatgtgacagtacggtatgaagcagccaaatcatcgctggaggaagccgctgcagagaaagtgagaaagtacaaacacctggaaacggaagtaagacatctcacgaatgcaaaggacgttacttttgtgggctttcccctaggagcgcgggggaaatggcaccaagataactttaaacttttgactgagcttggcctctccaaatcgaggcaagtgaaaatggcagagactttttccacagtagcgctcttttcatctgtggacattgtacatatgtttgccagtagggccagaaaatctatggttatgtaaaccggtagacatgataagatacattgatgagtttggacaaaccacaactagaatgcagtgaaaaaaatgctttatttgtgaaatttgtgatgctattgctttatttgtaaccattataagctgcaataaacaagttaacaacaacaaaaaaaaaaaaaaaaaaaaaaaaaaaaaaacgttgactaaaaaaaaaaaaaaaaaaaaaaaaaaaaaaaaaaaaaaaaaaaaaaaaaaaaaaaaaaaaaaaaaaaaaa

SEQ ID NO: 10235 - DNA, 4603 bp, synthetic construct
  source 1..4603: mol_type = other DNA
ggtctagttacaactgggcatcgctgcagagatcgcacctcctcgtggtcccgctggtagcccttcgaagggtgactaagtcgatctctgccccaggtacggagccgttgggactcaccagtccaacgtaactcctgcctaaattcggtgaaacaaattcctcggtaaaaagccccatggcttcttgcccgaaacctggccccccggtttcagcaggggcaatgagtttggaaagtggactgaccacccactccgttctcgccatcgaacgtggtcccaattcgttggcaaattccggatcagactttgggggggggggtctggggctaccgttacgcctattgagggtatcggtcggcactcagacctcccgctccgactgggtagacctggtgtcctggagccacccaggacccacgtctaagtcccagcaggttgacctggtgtctttatttcctaaacaccgggttgacctgttatccaaaaacgaccaggtagacctggtggctcaatttttaccatctaaatttccccccaatttggcagaaaatgatttggctttgctggtgaacttagagttctacagatcggatttgcatgtgtatgagggcgttcattttgctgcacattgggagggattaagtggtttgcctgaggtgtatgaacaacttgcaccacaaccgtgtgtgggagaaactttacattctagcctcccacgagacagtgaactgtttgtgcctgaagaggggagcagcgagaaggagagcgaggacgcgccaaaaacatctcctccgacgcctgggaaacatggtttggaacagactggggaggaaaaagtgatggtgactgttcctgacaaaaatccaccttgtccttgctgtggtacccgggtaaactctgtgttgaatctgattgaacatctgaaagtgtcacacgggaaaaggagggtttgttttcggtgtgcaaaatgtggaaaggaaaatagtaactatcacagtgttgtttgtcattttccaaaatgcaggggtccagagacggagaaagccccagctggggagtggatttgtgaggtatgcaacagagattttacaaccaaaattggcctgggacaacacaagagattggcacacccagcagtgagaaatcaggaaaggatcgttgcttcccaaccgaaagaaacatcaaatagaggtgctcacaaaaggtgctggacaaaggaggaggaagaattactaataagactggaggctcagttcgagggaaacaaaaatattaataagcttattgcagaacacataaccaccaaaacagctaagcagatcagtgacaaaaggcgattgctgtccagaaagccagcagaggagccacgtgaggagcctggaacgtgtcatcacaccaggagagcagctgcgagcctgagaacggagcctgagatgagtcatcacgcccaggcagaggacagagataatggacctgggagacgccctctgccaggcagggcagctgccggagggagaacaatggacgagataagacgccaccctgataagggcaacggacagcagagacccaccaagcaaaaatcagaagaacagctgcaggcttactataaaaagacactagaggaacgactttcagctggggcacttaacaccttcccccgagcattcaagcaggtaatggaaggccgggatataaagctagtaatcaatcagacagcgcaggactgcttcggatgcctggaatccataagccaaataagaacggcaacccgagataaaaaggacacggtgacccgggagaaacacccaaagaaaccttttcagaagtggatgaaggacagagcaatcaaaaaaggtaattatcttcggttccagcgtttattttatcttgatagagggaaactggctaaaatcattttagatgatattgaatgcttgtcttgtgacataccactcagtgaaatttattcggtttttaaaacaagatgggaaacaactggtagctttaaaagccttggggactttaaaacttacgggaaggctgacaacactgccttcagagaattaattacggctaaagaaattgagaaaaatgtgcaggaaatgagcaaaggctcggctcccggtccagacgggattactcttggggacgtcgtaaagatggatcccgagttttcccggaccatggagattttcaatttatggttaacaactggtaaaatcccggacatggtgagggggtgcagaaccgttttgattccaaaatcatcaaagccggatcgtttgaaagacattaataactggagacctatcacgatcggttccatcttgctgagactgttctccaggattgtaacagctaggctgagcaaagcgtgccccctgaacccaaggcaaagaggctttatcagagcggcgggatgctctgaaaacttaaaactcctgcaaactataatttggtcggccaaaagagaacacagaccactgggtgttgtattcgtggacatcgccaaggcttttgacaccgtaagccaccagcacatcattcatgctttgcagcaaagagaggtggatccccacatcgtcggtctggtgagcaatatgtacgagaacatcagtacgtatatcaccacaaagaggaacacacacacagacaaaatccagatccgggttggagtaaagcagggtgacccgatgtcgccccttttatttaacctggcaatggaccctctattatgcaagctggaagagagtggcaaaggataccaccgaggacagagcagcatcacagcgatggcatttgcagacgatctggttttgctgagcgactcctgggaaaatatgaatacaaatattagcatactggagaccttctgcaatctgaccggactcaaaacacaggggcaaaagtgccacggcttttacatcaagccgacaaaggactcttacaccatcaatgactgcgctgcctggactatcaacggcacacccctgaacatgatcgaccccggcgaatctgagaaatacctcggcctgcagtttgacccgtggattggaatagcaaggtccggtctctccacaaaactagatttttggcttcagcggatcgatcaagcaccacttaaacctctgcagaaaactgatattctcaaaacatacaccatccctcggctgatctacatagctgaccactcagaagtgaaaactgcactactcgaaacccttgaccagaagatccggacagcggtcaaggaatggcttcacctacctccgtgcacctgcgatgccatcctgtactcgagcacgagagacggcggtttgggcatcaccaaattggcaggactgatccccagcgtgcaggcccgtagactgcatcggatcgcacagtcatctgacgatacgatgaaatgcttcatggaaaaagagaaaatggaacagctgcataagaaattgtggattcaagctggaggggacagagagaacataccctcgatttgggaagcaccaccgtcgagtgaaccaccaaacaacgtgagcacaaattcggaatgggaagcaccgacccagaaagataaatttccaaagccttgcaattggaggaaaaacgaattcaaaaaatggaccaaattggcatcccaaggccgcggaattgtaaattttgaaagagacaaaattagtaaccattggatccaatactacagacgcatacctcacaggaaactcctcactgcactacaactcagggccaacgtttaccccacgagagaatttctagccaggggtagacaagaccaatacatcaaggcgtgtaggcactgcgatgcggacattgaatcctgcgcccacatcatcggcaactgcccagtgacacaggacgcccgaatcaagaggcacaattacatctgcgaactgcttctcgaggaggcgaagaagaaggactgggtagtgttcaaggaaccgcacataagggattccaacaaggaactgtacaaacctgacctgatatttgtgaaggatgcccgtgcacttgtcgtggatgtgacagtacggtatgaagcagccaaatcatcgctggaggaagccgctgcagagaaagtgagaaagtacaaacacctggaaacggaagtaagacatctcacgaatgcaaaggacgttacttttgtgggctttcccctaggagcgcgggggaaatggcaccaagataactttaaacttttgactgagcttggcctctccaaatcgaggcaagtgaaaatggcagagactttttccacagtagcgctcttttcatctgtggacattgtacatatgtttgccagtagggccagaaaatctatggttatgtaaaccggtagacatgataagatacattgatgagtttggacaaaccacaactagaatgcagtgaaaaaaatgctttatttgtgaaatttgtgatgctattgctttatttgtaaccattataagctgcaataaacaagttaacaacaacaaaaaaaaaaaaaaaaaaaaaaaaaaaaaaacgttgactaaaaaaaaaaaaaaaaaaaaaaaaaaaaaaaaaaaaaaaaaaaaaaaaaaaaaaaaaaaaaaaaaaaaaa

SEQ ID NO: 10236 - skipped

SEQ ID NO: 10237 - DNA, 4603 bp, synthetic construct
  source 1..4603: mol_type = other DNA
ggtctagttacaactgggcatcgctgcagagatcgcacctcctcgtggtcccgctggtagcccttcgaagggtgactaagtcgatctctgccccaggtacggagccgttgggactcaccagtccaacgtaactcctgcctaaattcggtgaaacaaattcctcggtaaaaagccccatggcttcttgcccgaaacctggccccccggtttcagcaggggcaatgagtttggaaagtggactgaccacccactccgttctcgccatcgaacgtggtcccaattcgttggcaaattccggatcagactttgggggggggggtctggggctaccgttacgcctattgagggtatcggtcggcactcagacctcccgctccgactgggtagacctggtgtcctggagccacccaggacccacgtctaagtcccagcaggttgacctggtgtctttatttcctaaacaccgggttgacctgttatccaaaaacgaccaggtagacctggtggctcaatttttaccatctaaatttccccccaatttggcagaaaatgatttggctttgctggtgaacttagagttctacagatcggatttgcatgtgtatgagtgtgttcattttgctgcacattgggagggattaagtggtttgcctgaggtgtatgaacaacttgcaccacaaccgtgtgtgggagaaactttacattctagcctcccacgagacagtgaactgtttgtgcctgaagaggggagcagcgagaaggagagcgaggacgcgccaaaaacatctcctccgacgcctgggaaacatggtttggaacagactggggaggaaaaagtgatggtgactgttcctgacaaaaatccaccttgtccttgctgtggtacccgggtaaactctgtgttgaatctgattgaacatctgaaagtgtcacacgggaaaaggggggtttgttttcggtgtgcaaaatgtggaaaggaaaatagtaactatcacagtgttgtttgtcattttccaaaatgcaggggtccagagacggagaaagccccagctggggagtggatttgtgaggtatgcaacagagattttacaaccaaaattggcctgggacaacacaagagattggcacacccagcagtgagaaatcaggaaaggatcgttgcttcccaaccgaaagaaacatcaaatagaggtgctcacaaaaggtgctggacaaaggaggaggaagaattactaataagactggaggctcagttcgagggaaacaaaaatattaataagcttattgcagaacacataaccaccaaaacagctaagcagatcagtgacaaaaggcgattgctgtccagaaagccagcagaggagccacgtgaggagcctggaacgtgtcatcacaccaggagagcagctgcgagcctgagaacggagcctgagatgagtcatcacgcccaggcagaggacagagataatggacctgggagacgccctctgccaggcagggcagctgccggagggagaacaatggacgagataagacgccaccctgataagggcaacggacagcagagacccaccaagcaaaaatcagaagaacagctgcaggcttactataaaaagacactagaggaacgactttcagctggggcacttaacaccttcccccgagcattcaagcaggtaatggaaggccgggatataaagctagtaatcaatcagacagcgcaggactgcttcggatgcctggaatccataagccaaataagaacggcaacccgagataaaaaggacacggtgacccgggagaaacacccaaagaaaccttttcagaagtggatgaaggacagagcaatcaaaaaaggtaattatcttcggttccagcgtttattttatcttgatagagggaaactggctaaaatcattttagatgatattgaatgcttgtcttgtgacataccactcagtgaaatttattcggtttttaaaacaagatgggaaacaactggtagctttaaaagccttggggactttaaaacttacgggaaggctgacaacactgccttcagagaattaattacggctaaagaaattgagaaaaatgtgcaggaaatgagcaaaggctcggctcccggtccagacgggattactcttggggacgtcgtaaagatggatcccgagttttcccggaccatggagattttcaatttatggttaacaactggtaaaatcccggacatggtgagggggtgcagaaccgttttgattccaaaatcatcagacccggatcgtttgaaagacattaataactggagacctatcacgatcggttccatcttgctgagactgttctccaggattgtaacagctaggctgagcaaagcgtgccccctgaacccaaggcaaagaggctttatcagagcggcgggatgctctgaaaacttaaaactcctgcaaactataatttggtcggccaaaagagaacacagaccactgggtgttgtattcgtggacatcgccaaggcttttgacaccgtaagccaccagcacatcattcatgctttgcagcaaagagaggtggatccccacatcgtcggtctggtgagcaatatgtacgagaacatcagtacgtatatcaccacaaagaggaacacacacacagacaaaatccagatccgggttggagtaaagcagggtgacccgatgtcgccccttttatttaacctggcaatggaccctctattatgcaagctggaagagagtggcaaaggataccaccgaggacagagcagcatcacagcgatggcatttgcagacgatctggttttgctgagcgactcctgggaaaatatgaatacaaatattagcatactggagaccttctgcaatctgaccggactcaaaacacaggggcaaaagtgccacggcttttacatcaagccgacaaaggactcttacaccatcaatgactgcgctgcctggactatcaacggcacacccctgaacatgatcgaccccggcgaatctgagaaatacctcggcctgcagtttgacccgtggattggaatagcaaggtccggtctctccacaaaactagatttttggcttcagcggatcgatcaagcaccacttaaacctctgcagaaaactgatattctcaaaacatacaccatccctcggctgatctacatagctgaccactcagaagtgaaaactgcactactcgaaacccttgaccagaagatccggacagcggtcaaggaatggcttcacctacctccgtgcacctgcgatgccatcctgtactcgagcacgagagacggcggtttgggcatcaccaaattggcaggactgatccccagcgtgcaggcccgtagactgcatcggatcgcacagtcatctgacgatacgatgaaatgcttcatggaaaaagagaaaatggaacagctgcataagaaattgtggattcaagctggaggggacagagagaacataccctcgatttgggaagcaccaccgtcgagtgaaccaccaaacaacgtgagcacaaattcggaatgggaagcaccgacccagaaagataaatttccaaagccttgcaattggaggaaaaacgaattcaaaaaatggaccaaattggcatcccaaggccgcggaattgtaaattttgaaagagacaaaattagtaaccattggatccaatactacagacgcatacctcacaggaaactcctcactgcactacaactcagggccaacgtttaccccacgagagaatttctagccaggggtagacaagaccaatacatcaaggcgtgtaggcactgcgatgcggacattgaatcctgcgcccacatcatcggcaactgcccagtgacacaggacgcccgaatcaagaggcacaattacatctgcgaactgcttctcgaggaggcgaagaagaaggactgggtagtgttcaaggaaccgcacataagggattccaacaaggaactgtacaaacctgacctgatatttgtgaaggatgcccgtgcacttgtcgtggatgtgacagtacggtatgaagcagccaaatcatcgctggaggaagccgctgcagagaaagtgagaaagtacaaacacctggaaacggaagtaagacatctcacgaatgcaaaggacgttacttttgtgggctttcccctaggagcgcgggggaaatggcaccaagataactttaaacttttgactgagcttggcctctccaaatcgaggcaagtgaaaatggcagagactttttccacagtagcgctcttttcatctgtggacattgtacatatgtttgccagtagggccagaaaatctatggttatgtaaaccggtagacatgataagatacattgatgagtttggacaaaccacaactagaatgcagtgaaaaaaatgctttatttgtgaaatttgtgatgctattgctttatttgtaaccattataagctgcaataaacaagttaacaacaacaaaaaaaaaaaaaaaaaaaaaaaaaaaaaaacgttgactaaaaaaaaaaaaaaaaaaaaaaaaaaaaaaaaaaaaaaaaaaaaaaaaaaaaaaaaaaaaaaaaaaaaaa

SEQ ID NO: 10238 - DNA, 4603 bp, synthetic construct
  source 1..4603: mol_type = other DNA
ggtctagttacaactgggcatcgctgcagagatcgcacctcctcgtggtcccgctggtagcccttcgaagggtgactaagtcgatctctgccccaggtacggagccgttgggactcaccagtccaacgtaactcctgcctaaattcggtgaaacaaattcctcggtaaaaagccccatggcttcttgcccgaaacctggccccccggtttcagcaggggcaatgagtttggaaagtggactgaccacccactccgttctcgccatcgaacgtggtcccaattcgttggcaaattccggatcagactttgggggggggggtctggggctaccgttacgcctattgagggtatcggtcggcactcagacctcccgctccgactgggtagacctggtgtcctggagccacccaggacccacgtctaagtcccagcaggttgacctggtgtctttatttcctaaacaccgggttgacctgttatccaaaaacgaccaggtagacctggtggctcaatttttaccatctaaatttccccccaatttggcagaaaatgatttggctttgctggtgaacttagagttctacagatcggatttgcatgtgtatgagtgtgttcataaggctgcacattgggagggattaagtggtttgcctgaggtgtatgaacaacttgcaccacaaccgtgtgtgggagaaactttacattctagcctcccacgagacagtgaactgtttgtgcctgaagaggggagcagcgagaaggagagcgaggacgcgccaaaaacatctcctccgacgcctgggaaacatggtttggaacagactggggaggaaaaagtgatggtgactgttcctgacaaaaatccaccttgtccttgctgtggtacccgggtaaactctgtgttgaatctgattgaacatctgaaagtgtcacacgggaaaaggggggtttgttttcggtgtgcaaaatgtggaaaggaaaatagtaactatcacagtgttgtttgtcattttccaaaatgcaggggtccagagacggagaaagccccagctggggagtggatttgtgaggtatgcaacagagattttacaaccaaaattggcctgggacaacacaagagattggcacacccagcagtgagaaatcaggaaaggatcgttgcttcccaaccgaaagaaacatcaaatagaggtgctcacaaaaggtgctggacaaaggaggaggaagaattactaataagactggaggctcagttcgagggaaacaaaaatattaataagcttattgcagaacacataaccaccaaaacagctaagcagatcagtgacaaaaggcgattgctgtccagaaagccagcagaggagccacgtgaggagcctggaacgtgtcatcacaccaggagagcagctgcgagcctgagaacggagcctgagatgagtcatcacgcccaggcagaggacagagataatggacctgggagacgccctctgccaggcagggcagctgccggagggagaacaatggacgagataagacgccaccctgataagggcaacggacagcagagacccaccaagcaaaaatcagaagaacagctgcaggcttactataaaaagacactagaggaacgactttcagctggggcacttaacaccttcccccgagcattcaagcaggtaatggaaggccgggatataaagctagtaatcaatcagacagcgcaggactgcttcggatgcctggaatccataagccaaataagaacggcaacccgagataaaaaggacacggtgacccgggagaaacacccaaagaaaccttttcagaagtggatgaaggacagagcaatcaaaaaaggtaattatcttcggttccagcgtttattttatcttgatagagggaaactggctaaaatcattttagatgatattgaatgcttgtcttgtgacataccactcagtgaaatttattcggtttttaaaacaagatgggaaacaactggtagctttaaaagccttggggactttaaaacttacgggaaggctgacaacactgccttcagagaattaattacggctaaagaaattgagaaaaatgtgcaggaaatgagcaaaggctcggctcccggtccagacgggattactcttggggacgtcgtaaagatggatcccgagttttcccggaccatggagattttcaatttatggttaacaactggtaaaatcccggacatggtgagggggtgcagaaccgttttgattccaaaatcatcaaagccggatcgtttgaaagacattaataactggagacctatcacgatcggttccatcttgctgagactgttctccaggattgtaacagctaggctgagcaaagcgtgccccctgaacccaaggcaaagaggctttatcagagcggcgggatgctctgaaaacttaaaactcctgcaaactataatttggtcggccaaaagagaacacagaccactgggtgttgtattcgtggacatcgccaaggcttttgacaccgtaagccaccagcacatcattcatgctttgcagcaaagagaggtggatccccacatcgtcggtctggtgagcaatatgtacgagaacatcagtacgtatatcaccacaaagaggaacacacacacagacaaaatccagatccgggttggagtaaagcagggtgacccgatgtcgccccttttatttaacctggcaatggaccctctattatgcaagctggaagagagtggcaaaggataccaccgaggacagagcagcatcacagcgatggcatttgcagacgatctggttttgctgagcgactcctgggaaaatatgaatacaaatattagcatactggagaccttctgcaatctgaccggactcaaaacacaggggcaaaagtgccacggcttttacatcaagccgacaaaggactcttacaccatcaatgactgcgctgcctggactatcaacggcacacccctgaacatgatcgaccccggcgaatctgagaaatacctcggcctgcagtttgacccgtggattggaatagcaaggtccggtctctccacaaaactagatttttggcttcagcggatcgatcaagcaccacttaaacctctgcagaaaactgatattctcaaaacatacaccatccctcggctgatctacatagctgaccactcagaagtgaaaactgcactactcgaaacccttgaccagaagatccggacagcggtcaaggaatggcttcacctacctccgtgcacctgcgatgccatcctgtactcgagcacgagagacggcggtttgggcatcaccaaattggcaggactgatccccagcgtgcaggcccgtagactgcatcggatcgcacagtcatctgacgatacgatgaaatgcttcatggaaaaagagaaaatggaacagctgcataagaaattgtggattcaagctggaggggacagagagaacataccctcgatttgggaagcaccaccgtcgagtgaaccaccaaacaacgtgagcacaaattcggaatgggaagcaccgacccagaaagataaatttccaaagccttgcaattggaggaaaaacgaattcaaaaaatggaccaaattggcatcccaaggccgcggaattgtaaattttgaaagagacaaaattagtaaccattggatccaatactacagacgcatacctcacaggaaactcctcactgcactacaactcagggccaacgtttaccccacgagagaatttctagccaggggtagacaagaccaatacatcaaggcgtgtaggcactgcgatgcggacattgaatcctgcgcccacatcatcggcaactgcccagtgacacaggacgcccgaatcaagaggcacaattacatctgcgaactgcttctcgaggaggcgaagaagaaggactgggtagtgttcaaggaaccgcacataagggattccaacaaggaactgtacaaacctgacctgatatttgtgaaggatgcccgtgcacttgtcgtggatgtgacagtacggtatgaagcagccaaatcatcgctggaggaagccgctgcagagaaagtgagaaagtacaaacacctggaaacggaagtaagacatctcacgaatgcaaaggacgttacttttgtgggctttcccctaggagcgcgggggaaatggcaccaagataactttaaacttttgactgagcttggcctctccaaatcgaggcaagtgaaaatggcagagactttttccacagtagcgctcttttcatctgtggacattgtacatatgtttgccagtagggccagaaaatctatggttatgtaaaccggtagacatgataagatacattgatgagtttggacaaaccacaactagaatgcagtgaaaaaaatgctttatttgtgaaatttgtgatgctattgctttatttgtaaccattataagctgcaataaacaagttaacaacaacaaaaaaaaaaaaaaaaaaaaaaaaaaaaaaacgttgactaaaaaaaaaaaaaaaaaaaaaaaaaaaaaaaaaaaaaaaaaaaaaaaaaaaaaaaaaaaaaaaaaaaaaa

SEQ ID NO: 10239-10249 - skipped (11 entries)

SEQ ID NO: 10250 - DNA, 4468 bp, synthetic construct
  source 1..4468: mol_type = other DNA
ggtctagttacaactgggcatcgctgcagagatcgcacctcctcgtggtcccgctggtagcccttcgaagggtgactaagtcgatctctgccccaggtacggagccgttgggactcaccagtccaacgtaactcctgcctaaattcggtgaaacaaattcctcggtaaaaagccccatgcctaagagaaaggtgtccagcgccgagggcgctgccaaggaagagcctaaacggagaagcgccagactgagcgccaagccccccgccaaggtggaagccaagcctaagaaggccgccgctaaggacaagagcagcgataagaaagtccagaccaagggcaagcggggcgccaaaggcaaacaggccgaggtggccaaccaggagacaaaggaagatctgcctgctgagaacggcgaaaccaagaccgaggaatctccagcttctgacgaggccggagagaaggaggccaaaagcgacagcggctctgagacacctggaacaagcgagagcgccaccccggaatcctatgaacaacttgcaccacaaccgtgtgtgggagaaactttacattctagcctcccacgagacagtgaactgtttgtgcctgaagaggggagcagcgagaaggagagcgaggacgcgccaaaaacatctcctccgacgcctgggaaacatggtttggaacagactggggaggaaaaagtgatggtgactgttcctgacaaaaatccaccttgtccttgctgtggtacccgggtaaactctgtgttgaatctgattgaacatctgaaagtgtcacacgggaaaaggggggtttgttttcggtgtgcaaaatgtggaaaggaaaatagtaactatcacagtgttgtttgtcattttccaaaatgcaggggtccagagacggagaaagccccagctggggagtggatttgtgaggtatgcaacagagattttacaaccaaaattggcctgggacaacacaagagattggcacacccagcagtgagaaatcaggaaaggatcgttgcttcccaaccgaaagaaacatcaaatagaggtgctcacaaaaggtgctggacaaaggaggaggaagaattactaataagactggaggctcagttcgagggaaacaaaaatattaataagcttattgcagaacacataaccaccaaaacagctaagcagatcagtgacaaaaggcgattgctgtccagaaagccagcagaggagccacgtgaggagcctggaacgtgtcatcacaccaggagagcagctgcgagcctgagaacggagcctgagatgagtcatcacgcccaggcagaggacagagataatggacctgggagacgccctctgccaggcagggcagctgccggagggagaacaatggacgagataagacgccaccctgataagggcaacggacagcagagacccaccaagcaaaaatcagaagaacagctgcaggcttactataaaaagacactagaggaacgactttcagctggggcacttaacaccttcccccgagcattcaagcaggtaatggaaggccgggatataaagctagtaatcaatcagacagcgcaggactgcttcggatgcctggaatccataagccaaataagaacggcaacccgagataaaaaggacacggtgacccgggagaaacacccaaagaaaccttttcagaagtggatgaaggacagagcaatcaaaaaaggtaattatcttcggttccagcgtttattttatcttgatagagggaaactggctaaaatcattttagatgatattgaatgcttgtcttgtgacataccactcagtgaaatttattcggtttttaaaacaagatgggaaacaactggtagctttaaaagccttggggactttaaaacttacgggaaggctgacaacactgccttcagagaattaattacggctaaagaaattgagaaaaatgtgcaggaaatgagcaaaggctcggctcccggtccagacgggattactcttggggacgtcgtaaagatggatcccgagttttcccggaccatggagattttcaatttatggttaacaactggtaaaatcccggacatggtgagggggtgcagaaccgttttgattccaaaatcatcaaagccggatcgtttgaaagacattaataactggagacctatcacgatcggttccatcttgctgagactgttctccaggattgtaacagctaggctgagcaaagcgtgccccctgaacccaaggcaaagaggctttatcagagcggcgggatgctctgaaaacttaaaactcctgcaaactataatttggtcggccaaaagagaacacagaccactgggtgttgtattcgtggacatcgccaaggcttttgacaccgtaagccaccagcacatcattcatgctttgcagcaaagagaggtggatccccacatcgtcggtctggtgagcaatatgtacgagaacatcagtacgtatatcaccacaaagaggaacacacacacagacaaaatccagatccgggttggagtaaagcagggtgacccgatgtcgccccttttatttaacctggcaatggaccctctattatgcaagctggaagagagtggcaaaggataccaccgaggacagagcagcatcacagcgatggcatttgcagacgatctggttttgctgagcgactcctgggaaaatatgaatacaaatattagcatactggagaccttctgcaatctgaccggactcaaaacacaggggcaaaagtgccacggcttttacatcaagccgacaaaggactcttacaccatcaatgactgcgctgcctggactatcaacggcacacccctgaacatgatcgaccccggcgaatctgagaaatacctcggcctgcagtttgacccgtggattggaatagcaaggtccggtctctccacaaaactagatttttggcttcagcggatcgatcaagcaccacttaaacctctgcagaaaactgatattctcaaaacatacaccatccctcggctgatctacatagctgaccactcagaagtgaaaactgcactactcgaaacccttgaccagaagatccggacagcggtcaaggaatggcttcacctacctccgtgcacctgcgatgccatcctgtactcgagcacgagagacggcggtttgggcatcaccaaattggcaggactgatccccagcgtgcaggcccgtagactgcatcggatcgcacagtcatctgacgatacgatgaaatgcttcatggaaaaagagaaaatggaacagctgcataagaaattgtggattcaagctggaggggacagagagaacataccctcgatttgggaagcaccaccgtcgagtgaaccaccaaacaacgtgagcacaaattcggaatgggaagcaccgacccagaaagataaatttccaaagccttgcaattggaggaaaaacgaattcaaaaaatggaccaaattggcatcccaaggccgcggaattgtaaattttgaaagagacaaaattagtaaccattggatccaatactacagacgcatacctcacaggaaactcctcactgcactacaactcagggccaacgtttaccccacgagagaatttctagccaggggtagacaagaccaatacatcaaggcgtgtaggcactgcgatgcggacattgaatcctgcgcccacatcatcggcaactgcccagtgacacaggacgcccgaatcaagaggcacaattacatctgcgaactgcttctcgaggaggcgaagaagaaggactgggtagtgttcaaggaaccgcacataagggattccaacaaggaactgtacaaacctgacctgatatttgtgaaggatgcccgtgcacttgtcgtggatgtgacagtacggtatgaagcagccaaatcatcgctggaggaagccgctgcagagaaagtgagaaagtacaaacacctggaaacggaagtaagacatctcacgaatgcaaaggacgttacttttgtgggctttcccctaggagcgcgggggaaatggcaccaagataactttaaacttttgactgagcttggcctctccaaatcgaggcaagtgaaaatggcagagactttttccacagtagcgctcttttcatctgtggacattgtacatatgtttgccagtagggccagaaaatctatggttatgtaaaccggtagacatgataagatacattgatgagtttggacaaaccacaactagaatgcagtgaaaaaaatgctttatttgtgaaatttgtgatgctattgctttatttgtaaccattataagctgcaataaacaagttaacaacaacaaaaaaaaaaaaaaaaaaaaaaaaaaaaaaacgttgactaaaaaaaaaaaaaaaaaaaaaaaaaaaaaaaaaaaaaaaaaaaaaaaaaaaaaaaaaaaaaaaaaaaaaa

SEQ ID NO: 10251 - DNA, 4372 bp, synthetic construct
  source 1..4372: mol_type = other DNA
ggtctagttacaactgggcatcgctgcagagatcgcacctcctcgtggtcccgctggtagcccttcgaagggtgactaagtcgatctctgccccaggtacggagccgttgggactcaccagtccaacgtaactcctgcctaaattcggtgaaacaaattcctcggtaaaaagccccatggcccctaagaaaaagagaaaggtggtgaccgtgaagttcaagtacaagggcgaggaaaaggaagtggacatcagcaagatcaagaaggtctggcgggtgggcaagatgatcagctttacctacgacgataacggcaagacaggcagaggcgccgtgtccgagaaggacgcccctaaagagctgctgcagatgctggaaaaaagcggctctgagacacctggaacaagcgagagcgccaccccggaatcctatgaacaacttgcaccacaaccgtgtgtgggagaaactttacattctagcctcccacgagacagtgaactgtttgtgcctgaagaggggagcagcgagaaggagagcgaggacgcgccaaaaacatctcctccgacgcctgggaaacatggtttggaacagactggggaggaaaaagtgatggtgactgttcctgacaaaaatccaccttgtccttgctgtggtacccgggtaaactctgtgttgaatctgattgaacatctgaaagtgtcacacgggaaaaggggggtttgttttcggtgtgcaaaatgtggaaaggaaaatagtaactatcacagtgttgtttgtcattttccaaaatgcaggggtccagagacggagaaagccccagctggggagtggatttgtgaggtatgcaacagagattttacaaccaaaattggcctgggacaacacaagagattggcacacccagcagtgagaaatcaggaaaggatcgttgcttcccaaccgaaagaaacatcaaatagaggtgctcacaaaaggtgctggacaaaggaggaggaagaattactaataagactggaggctcagttcgagggaaacaaaaatattaataagcttattgcagaacacataaccaccaaaacagctaagcagatcagtgacaaaaggcgattgctgtccagaaagccagcagaggagccacgtgaggagcctggaacgtgtcatcacaccaggagagcagctgcgagcctgagaacggagcctgagatgagtcatcacgcccaggcagaggacagagataatggacctgggagacgccctctgccaggcagggcagctgccggagggagaacaatggacgagataagacgccaccctgataagggcaacggacagcagagacccaccaagcaaaaatcagaagaacagctgcaggcttactataaaaagacactagaggaacgactttcagctggggcacttaacaccttcccccgagcattcaagcaggtaatggaaggccgggatataaagctagtaatcaatcagacagcgcaggactgcttcggatgcctggaatccataagccaaataagaacggcaacccgagataaaaaggacacggtgacccgggagaaacacccaaagaaaccttttcagaagtggatgaaggacagagcaatcaaaaaaggtaattatcttcggttccagcgtttattttatcttgatagagggaaactggctaaaatcattttagatgatattgaatgcttgtcttgtgacataccactcagtgaaatttattcggtttttaaaacaagatgggaaacaactggtagctttaaaagccttggggactttaaaacttacgggaaggctgacaacactgccttcagagaattaattacggctaaagaaattgagaaaaatgtgcaggaaatgagcaaaggctcggctcccggtccagacgggattactcttggggacgtcgtaaagatggatcccgagttttcccggaccatggagattttcaatttatggttaacaactggtaaaatcccggacatggtgagggggtgcagaaccgttttgattccaaaatcatcaaagccggatcgtttgaaagacattaataactggagacctatcacgatcggttccatcttgctgagactgttctccaggattgtaacagctaggctgagcaaagcgtgccccctgaacccaaggcaaagaggctttatcagagcggcgggatgctctgaaaacttaaaactcctgcaaactataatttggtcggccaaaagagaacacagaccactgggtgttgtattcgtggacatcgccaaggcttttgacaccgtaagccaccagcacatcattcatgctttgcagcaaagagaggtggatccccacatcgtcggtctggtgagcaatatgtacgagaacatcagtacgtatatcaccacaaagaggaacacacacacagacaaaatccagatccgggttggagtaaagcagggtgacccgatgtcgccccttttatttaacctggcaatggaccctctattatgcaagctggaagagagtggcaaaggataccaccgaggacagagcagcatcacagcgatggcatttgcagacgatctggttttgctgagcgactcctgggaaaatatgaatacaaatattagcatactggagaccttctgcaatctgaccggactcaaaacacaggggcaaaagtgccacggcttttacatcaagccgacaaaggactcttacaccatcaatgactgcgctgcctggactatcaacggcacacccctgaacatgatcgaccccggcgaatctgagaaatacctcggcctgcagtttgacccgtggattggaatagcaaggtccggtctctccacaaaactagatttttggcttcagcggatcgatcaagcaccacttaaacctctgcagaaaactgatattctcaaaacatacaccatccctcggctgatctacatagctgaccactcagaagtgaaaactgcactactcgaaacccttgaccagaagatccggacagcggtcaaggaatggcttcacctacctccgtgcacctgcgatgccatcctgtactcgagcacgagagacggcggtttgggcatcaccaaattggcaggactgatccccagcgtgcaggcccgtagactgcatcggatcgcacagtcatctgacgatacgatgaaatgcttcatggaaaaagagaaaatggaacagctgcataagaaattgtggattcaagctggaggggacagagagaacataccctcgatttgggaagcaccaccgtcgagtgaaccaccaaacaacgtgagcacaaattcggaatgggaagcaccgacccagaaagataaatttccaaagccttgcaattggaggaaaaacgaattcaaaaaatggaccaaattggcatcccaaggccgcggaattgtaaattttgaaagagacaaaattagtaaccattggatccaatactacagacgcatacctcacaggaaactcctcactgcactacaactcagggccaacgtttaccccacgagagaatttctagccaggggtagacaagaccaatacatcaaggcgtgtaggcactgcgatgcggacattgaatcctgcgcccacatcatcggcaactgcccagtgacacaggacgcccgaatcaagaggcacaattacatctgcgaactgcttctcgaggaggcgaagaagaaggactgggtagtgttcaaggaaccgcacataagggattccaacaaggaactgtacaaacctgacctgatatttgtgaaggatgcccgtgcacttgtcgtggatgtgacagtacggtatgaagcagccaaatcatcgctggaggaagccgctgcagagaaagtgagaaagtacaaacacctggaaacggaagtaagacatctcacgaatgcaaaggacgttacttttgtgggctttcccctaggagcgcgggggaaatggcaccaagataactttaaacttttgactgagcttggcctctccaaatcgaggcaagtgaaaatggcagagactttttccacagtagcgctcttttcatctgtggacattgtacatatgtttgccagtagggccagaaaatctatggttatgtaaaccggtagacatgataagatacattgatgagtttggacaaaccacaactagaatgcagtgaaaaaaatgctttatttgtgaaatttgtgatgctattgctttatttgtaaccattataagctgcaataaacaagttaacaacaacaaaaaaaaaaaaaaaaaaaaaaaaaaaaaaacgttgactaaaaaaaaaaaaaaaaaaaaaaaaaaaaaaaaaaaaaaaaaaaaaaaaaaaaaaaaaaaaaaaaaaaaaa

SEQ ID NO: 10252 - DNA, 4414 bp, synthetic construct
  source 1..4414: mol_type = other DNA
ggtctagttacaactgggcatcgctgcagagatcgcacctcctcgtggtcccgctggtagcccttcgaagggtgactaagtcgatctctgccccaggtacggagccgttgggactcaccagtccaacgtaactcctgcctaaattcggtgaaacaaattcctcggtaaaaagccccatgaaacggacagccgacggaagcgagttcgagtcaccaaagaagaagcggaaagtcgctacagtgaagttcaagtacaagggcgaggaaaaagaggtggatatctctaagatcaagaaagtgtggcgggtgggcaagatgatcagcttcacctacgacgagggcggaggaaaaaccggcagaggcgccgtcagcgagaaggacgcccctaaggaactgctgcagatgctggaaaagcagaagaagagcggctctgagacacctggaacaagcgagagcgccaccccggaatcctatgaacaacttgcaccacaaccgtgtgtgggagaaactttacattctagcctcccacgagacagtgaactgtttgtgcctgaagaggggagcagcgagaaggagagcgaggacgcgccaaaaacatctcctccgacgcctgggaaacatggtttggaacagactggggaggaaaaagtgatggtgactgttcctgacaaaaatccaccttgtccttgctgtggtacccgggtaaactctgtgttgaatctgattgaacatctgaaagtgtcacacgggaaaaggggggtttgttttcggtgtgcaaaatgtggaaaggaaaatagtaactatcacagtgttgtttgtcattttccaaaatgcaggggtccagagacggagaaagccccagctggggagtggatttgtgaggtatgcaacagagattttacaaccaaaattggcctgggacaacacaagagattggcacacccagcagtgagaaatcaggaaaggatcgttgcttcccaaccgaaagaaacatcaaatagaggtgctcacaaaaggtgctggacaaaggaggaggaagaattactaataagactggaggctcagttcgagggaaacaaaaatattaataagcttattgcagaacacataaccaccaaaacagctaagcagatcagtgacaaaaggcgattgctgtccagaaagccagcagaggagccacgtgaggagcctggaacgtgtcatcacaccaggagagcagctgcgagcctgagaacggagcctgagatgagtcatcacgcccaggcagaggacagagataatggacctgggagacgccctctgccaggcagggcagctgccggagggagaacaatggacgagataagacgccaccctgataagggcaacggacagcagagacccaccaagcaaaaatcagaagaacagctgcaggcttactataaaaagacactagaggaacgactttcagctggggcacttaacaccttcccccgagcattcaagcaggtaatggaaggccgggatataaagctagtaatcaatcagacagcgcaggactgcttcggatgcctggaatccataagccaaataagaacggcaacccgagataaaaaggacacggtgacccgggagaaacacccaaagaaaccttttcagaagtggatgaaggacagagcaatcaaaaaaggtaattatcttcggttccagcgtttattttatcttgatagagggaaactggctaaaatcattttagatgatattgaatgcttgtcttgtgacataccactcagtgaaatttattcggtttttaaaacaagatgggaaacaactggtagctttaaaagccttggggactttaaaacttacgggaaggctgacaacactgccttcagagaattaattacggctaaagaaattgagaaaaatgtgcaggaaatgagcaaaggctcggctcccggtccagacgggattactcttggggacgtcgtaaagatggatcccgagttttcccggaccatggagattttcaatttatggttaacaactggtaaaatcccggacatggtgagggggtgcagaaccgttttgattccaaaatcatcaaagccggatcgtttgaaagacattaataactggagacctatcacgatcggttccatcttgctgagactgttctccaggattgtaacagctaggctgagcaaagcgtgccccctgaacccaaggcaaagaggctttatcagagcggcgggatgctctgaaaacttaaaactcctgcaaactataatttggtcggccaaaagagaacacagaccactgggtgttgtattcgtggacatcgccaaggcttttgacaccgtaagccaccagcacatcattcatgctttgcagcaaagagaggtggatccccacatcgtcggtctggtgagcaatatgtacgagaacatcagtacgtatatcaccacaaagaggaacacacacacagacaaaatccagatccgggttggagtaaagcagggtgacccgatgtcgccccttttatttaacctggcaatggaccctctattatgcaagctggaagagagtggcaaaggataccaccgaggacagagcagcatcacagcgatggcatttgcagacgatctggttttgctgagcgactcctgggaaaatatgaatacaaatattagcatactggagaccttctgcaatctgaccggactcaaaacacaggggcaaaagtgccacggcttttacatcaagccgacaaaggactcttacaccatcaatgactgcgctgcctggactatcaacggcacacccctgaacatgatcgaccccggcgaatctgagaaatacctcggcctgcagtttgacccgtggattggaatagcaaggtccggtctctccacaaaactagatttttggcttcagcggatcgatcaagcaccacttaaacctctgcagaaaactgatattctcaaaacatacaccatccctcggctgatctacatagctgaccactcagaagtgaaaactgcactactcgaaacccttgaccagaagatccggacagcggtcaaggaatggcttcacctacctccgtgcacctgcgatgccatcctgtactcgagcacgagagacggcggtttgggcatcaccaaattggcaggactgatccccagcgtgcaggcccgtagactgcatcggatcgcacagtcatctgacgatacgatgaaatgcttcatggaaaaagagaaaatggaacagctgcataagaaattgtggattcaagctggaggggacagagagaacataccctcgatttgggaagcaccaccgtcgagtgaaccaccaaacaacgtgagcacaaattcggaatgggaagcaccgacccagaaagataaatttccaaagccttgcaattggaggaaaaacgaattcaaaaaatggaccaaattggcatcccaaggccgcggaattgtaaattttgaaagagacaaaattagtaaccattggatccaatactacagacgcatacctcacaggaaactcctcactgcactacaactcagggccaacgtttaccccacgagagaatttctagccaggggtagacaagaccaatacatcaaggcgtgtaggcactgcgatgcggacattgaatcctgcgcccacatcatcggcaactgcccagtgacacaggacgcccgaatcaagaggcacaattacatctgcgaactgcttctcgaggaggcgaagaagaaggactgggtagtgttcaaggaaccgcacataagggattccaacaaggaactgtacaaacctgacctgatatttgtgaaggatgcccgtgcacttgtcgtggatgtgacagtacggtatgaagcagccaaatcatcgctggaggaagccgctgcagagaaagtgagaaagtacaaacacctggaaacggaagtaagacatctcacgaatgcaaaggacgttacttttgtgggctttcccctaggagcgcgggggaaatggcaccaagataactttaaacttttgactgagcttggcctctccaaatcgaggcaagtgaaaatggcagagactttttccacagtagcgctcttttcatctgtggacattgtacatatgtttgccagtagggccagaaaatctatggttatgtaaaccggtagacatgataagatacattgatgagtttggacaaaccacaactagaatgcagtgaaaaaaatgctttatttgtgaaatttgtgatgctattgctttatttgtaaccattataagctgcaataaacaagttaacaacaacaaaaaaaaaaaaaaaaaaaaaaaaaaaaaaacgttgactaaaaaaaaaaaaaaaaaaaaaaaaaaaaaaaaaaaaaaaaaaaaaaaaaaaaaaaaaaaaaaaaaaaaaa

SEQ ID NO: 10253 - DNA, 4300 bp, synthetic construct
  source 1..4300: mol_type = other DNA
ggtctagttacaactgggcatcgctgcagagatcgcacctcctcgtggtcccgctggtagcccttcgaagggtgactaagtcgatctctgccccaggtacggagccgttgggactcaccagtccaacgtaactcctgcctaaattcggtgaaacaaattcctcggtaaaaagccccatgaaacggacagccgacggaagcgagttcgagtcaccaaagaagaagcggaaagtccggaaaagacggcagacaagcatgaccgacttctaccactctaagcggagactgatcttcagcaagagaaagcctagcggctctgagacacctggaacaagcgagagcgccaccccggaatcctatgaacaacttgcaccacaaccgtgtgtgggagaaactttacattctagcctcccacgagacagtgaactgtttgtgcctgaagaggggagcagcgagaaggagagcgaggacgcgccaaaaacatctcctccgacgcctgggaaacatggtttggaacagactggggaggaaaaagtgatggtgactgttcctgacaaaaatccaccttgtccttgctgtggtacccgggtaaactctgtgttgaatctgattgaacatctgaaagtgtcacacgggaaaaggggggtttgttttcggtgtgcaaaatgtggaaaggaaaatagtaactatcacagtgttgtttgtcattttccaaaatgcaggggtccagagacggagaaagccccagctggggagtggatttgtgaggtatgcaacagagattttacaaccaaaattggcctgggacaacacaagagattggcacacccagcagtgagaaatcaggaaaggatcgttgcttcccaaccgaaagaaacatcaaatagaggtgctcacaaaaggtgctggacaaaggaggaggaagaattactaataagactggaggctcagttcgagggaaacaaaaatattaataagcttattgcagaacacataaccaccaaaacagctaagcagatcagtgacaaaaggcgattgctgtccagaaagccagcagaggagccacgtgaggagcctggaacgtgtcatcacaccaggagagcagctgcgagcctgagaacggagcctgagatgagtcatcacgcccaggcagaggacagagataatggacctgggagacgccctctgccaggcagggcagctgccggagggagaacaatggacgagataagacgccaccctgataagggcaacggacagcagagacccaccaagcaaaaatcagaagaacagctgcaggcttactataaaaagacactagaggaacgactttcagctggggcacttaacaccttcccccgagcattcaagcaggtaatggaaggccgggatataaagctagtaatcaatcagacagcgcaggactgcttcggatgcctggaatccataagccaaataagaacggcaacccgagataaaaaggacacggtgacccgggagaaacacccaaagaaaccttttcagaagtggatgaaggacagagcaatcaaaaaaggtaattatcttcggttccagcgtttattttatcttgatagagggaaactggctaaaatcattttagatgatattgaatgcttgtcttgtgacataccactcagtgaaatttattcggtttttaaaacaagatgggaaacaactggtagctttaaaagccttggggactttaaaacttacgggaaggctgacaacactgccttcagagaattaattacggctaaagaaattgagaaaaatgtgcaggaaatgagcaaaggctcggctcccggtccagacgggattactcttggggacgtcgtaaagatggatcccgagttttcccggaccatggagattttcaatttatggttaacaactggtaaaatcccggacatggtgagggggtgcagaaccgttttgattccaaaatcatcaaagccggatcgtttgaaagacattaataactggagacctatcacgatcggttccatcttgctgagactgttctccaggattgtaacagctaggctgagcaaagcgtgccccctgaacccaaggcaaagaggctttatcagagcggcgggatgctctgaaaacttaaaactcctgcaaactataatttggtcggccaaaagagaacacagaccactgggtgttgtattcgtggacatcgccaaggcttttgacaccgtaagccaccagcacatcattcatgctttgcagcaaagagaggtggatccccacatcgtcggtctggtgagcaatatgtacgagaacatcagtacgtatatcaccacaaagaggaacacacacacagacaaaatccagatccgggttggagtaaagcagggtgacccgatgtcgccccttttatttaacctggcaatggaccctctattatgcaagctggaagagagtggcaaaggataccaccgaggacagagcagcatcacagcgatggcatttgcagacgatctggttttgctgagcgactcctgggaaaatatgaatacaaatattagcatactggagaccttctgcaatctgaccggactcaaaacacaggggcaaaagtgccacggcttttacatcaagccgacaaaggactcttacaccatcaatgactgcgctgcctggactatcaacggcacacccctgaacatgatcgaccccggcgaatctgagaaatacctcggcctgcagtttgacccgtggattggaatagcaaggtccggtctctccacaaaactagatttttggcttcagcggatcgatcaagcaccacttaaacctctgcagaaaactgatattctcaaaacatacaccatccctcggctgatctacatagctgaccactcagaagtgaaaactgcactactcgaaacccttgaccagaagatccggacagcggtcaaggaatggcttcacctacctccgtgcacctgcgatgccatcctgtactcgagcacgagagacggcggtttgggcatcaccaaattggcaggactgatccccagcgtgcaggcccgtagactgcatcggatcgcacagtcatctgacgatacgatgaaatgcttcatggaaaaagagaaaatggaacagctgcataagaaattgtggattcaagctggaggggacagagagaacataccctcgatttgggaagcaccaccgtcgagtgaaccaccaaacaacgtgagcacaaattcggaatgggaagcaccgacccagaaagataaatttccaaagccttgcaattggaggaaaaacgaattcaaaaaatggaccaaattggcatcccaaggccgcggaattgtaaattttgaaagagacaaaattagtaaccattggatccaatactacagacgcatacctcacaggaaactcctcactgcactacaactcagggccaacgtttaccccacgagagaatttctagccaggggtagacaagaccaatacatcaaggcgtgtaggcactgcgatgcggacattgaatcctgcgcccacatcatcggcaactgcccagtgacacaggacgcccgaatcaagaggcacaattacatctgcgaactgcttctcgaggaggcgaagaagaaggactgggtagtgttcaaggaaccgcacataagggattccaacaaggaactgtacaaacctgacctgatatttgtgaaggatgcccgtgcacttgtcgtggatgtgacagtacggtatgaagcagccaaatcatcgctggaggaagccgctgcagagaaagtgagaaagtacaaacacctggaaacggaagtaagacatctcacgaatgcaaaggacgttacttttgtgggctttcccctaggagcgcgggggaaatggcaccaagataactttaaacttttgactgagcttggcctctccaaatcgaggcaagtgaaaatggcagagactttttccacagtagcgctcttttcatctgtggacattgtacatatgtttgccagtagggccagaaaatctatggttatgtaaaccggtagacatgataagatacattgatgagtttggacaaaccacaactagaatgcagtgaaaaaaatgctttatttgtgaaatttgtgatgctattgctttatttgtaaccattataagctgcaataaacaagttaacaacaacaaaaaaaaaaaaaaaaaaaaaaaaaaaaaaacgttgactaaaaaaaaaaaaaaaaaaaaaaaaaaaaaaaaaaaaaaaaaaaaaaaaaaaaaaaaaaaaaaaaaaaaaa

SEQ ID NO: 10254 - DNA, 4273 bp, synthetic construct
  source 1..4273: mol_type = other DNA
ggtctagttacaactgggcatcgctgcagagatcgcacctcctcgtggtcccgctggtagcccttcgaagggtgactaagtcgatctctgccccaggtacggagccgttgggactcaccagtccaacgtaactcctgcctaaattcggtgaaacaaattcctcggtaaaaagccccatgaaacggacagccgacggaagcgagttcgagtcaccaaagaagaagcggaaagtctctacccagggcagactggacgatttcttcaaggtgacaggcagcctgagcggctctgagacacctggaacaagcgagagcgccaccccggaatcctatgaacaacttgcaccacaaccgtgtgtgggagaaactttacattctagcctcccacgagacagtgaactgtttgtgcctgaagaggggagcagcgagaaggagagcgaggacgcgccaaaaacatctcctccgacgcctgggaaacatggtttggaacagactggggaggaaaaagtgatggtgactgttcctgacaaaaatccaccttgtccttgctgtggtacccgggtaaactctgtgttgaatctgattgaacatctgaaagtgtcacacgggaaaaggggggtttgttttcggtgtgcaaaatgtggaaaggaaaatagtaactatcacagtgttgtttgtcattttccaaaatgcaggggtccagagacggagaaagccccagctggggagtggatttgtgaggtatgcaacagagattttacaaccaaaattggcctgggacaacacaagagattggcacacccagcagtgagaaatcaggaaaggatcgttgcttcccaaccgaaagaaacatcaaatagaggtgctcacaaaaggtgctggacaaaggaggaggaagaattactaataagactggaggctcagttcgagggaaacaaaaatattaataagcttattgcagaacacataaccaccaaaacagctaagcagatcagtgacaaaaggcgattgctgtccagaaagccagcagaggagccacgtgaggagcctggaacgtgtcatcacaccaggagagcagctgcgagcctgagaacggagcctgagatgagtcatcacgcccaggcagaggacagagataatggacctgggagacgccctctgccaggcagggcagctgccggagggagaacaatggacgagataagacgccaccctgataagggcaacggacagcagagacccaccaagcaaaaatcagaagaacagctgcaggcttactataaaaagacactagaggaacgactttcagctggggcacttaacaccttcccccgagcattcaagcaggtaatggaaggccgggatataaagctagtaatcaatcagacagcgcaggactgcttcggatgcctggaatccataagccaaataagaacggcaacccgagataaaaaggacacggtgacccgggagaaacacccaaagaaaccttttcagaagtggatgaaggacagagcaatcaaaaaaggtaattatcttcggttccagcgtttattttatcttgatagagggaaactggctaaaatcattttagatgatattgaatgcttgtcttgtgacataccactcagtgaaatttattcggtttttaaaacaagatgggaaacaactggtagctttaaaagccttggggactttaaaacttacgggaaggctgacaacactgccttcagagaattaattacggctaaagaaattgagaaaaatgtgcaggaaatgagcaaaggctcggctcccggtccagacgggattactcttggggacgtcgtaaagatggatcccgagttttcccggaccatggagattttcaatttatggttaacaactggtaaaatcccggacatggtgagggggtgcagaaccgttttgattccaaaatcatcaaagccggatcgtttgaaagacattaataactggagacctatcacgatcggttccatcttgctgagactgttctccaggattgtaacagctaggctgagcaaagcgtgccccctgaacccaaggcaaagaggctttatcagagcggcgggatgctctgaaaacttaaaactcctgcaaactataatttggtcggccaaaagagaacacagaccactgggtgttgtattcgtggacatcgccaaggcttttgacaccgtaagccaccagcacatcattcatgctttgcagcaaagagaggtggatccccacatcgtcggtctggtgagcaatatgtacgagaacatcagtacgtatatcaccacaaagaggaacacacacacagacaaaatccagatccgggttggagtaaagcagggtgacccgatgtcgccccttttatttaacctggcaatggaccctctattatgcaagctggaagagagtggcaaaggataccaccgaggacagagcagcatcacagcgatggcatttgcagacgatctggttttgctgagcgactcctgggaaaatatgaatacaaatattagcatactggagaccttctgcaatctgaccggactcaaaacacaggggcaaaagtgccacggcttttacatcaagccgacaaaggactcttacaccatcaatgactgcgctgcctggactatcaacggcacacccctgaacatgatcgaccccggcgaatctgagaaatacctcggcctgcagtttgacccgtggattggaatagcaaggtccggtctctccacaaaactagatttttggcttcagcggatcgatcaagcaccacttaaacctctgcagaaaactgatattctcaaaacatacaccatccctcggctgatctacatagctgaccactcagaagtgaaaactgcactactcgaaacccttgaccagaagatccggacagcggtcaaggaatggcttcacctacctccgtgcacctgcgatgccatcctgtactcgagcacgagagacggcggtttgggcatcaccaaattggcaggactgatccccagcgtgcaggcccgtagactgcatcggatcgcacagtcatctgacgatacgatgaaatgcttcatggaaaaagagaaaatggaacagctgcataagaaattgtggattcaagctggaggggacagagagaacataccctcgatttgggaagcaccaccgtcgagtgaaccaccaaacaacgtgagcacaaattcggaatgggaagcaccgacccagaaagataaatttccaaagccttgcaattggaggaaaaacgaattcaaaaaatggaccaaattggcatcccaaggccgcggaattgtaaattttgaaagagacaaaattagtaaccattggatccaatactacagacgcatacctcacaggaaactcctcactgcactacaactcagggccaacgtttaccccacgagagaatttctagccaggggtagacaagaccaatacatcaaggcgtgtaggcactgcgatgcggacattgaatcctgcgcccacatcatcggcaactgcccagtgacacaggacgcccgaatcaagaggcacaattacatctgcgaactgcttctcgaggaggcgaagaagaaggactgggtagtgttcaaggaaccgcacataagggattccaacaaggaactgtacaaacctgacctgatatttgtgaaggatgcccgtgcacttgtcgtggatgtgacagtacggtatgaagcagccaaatcatcgctggaggaagccgctgcagagaaagtgagaaagtacaaacacctggaaacggaagtaagacatctcacgaatgcaaaggacgttacttttgtgggctttcccctaggagcgcgggggaaatggcaccaagataactttaaacttttgactgagcttggcctctccaaatcgaggcaagtgaaaatggcagagactttttccacagtagcgctcttttcatctgtggacattgtacatatgtttgccagtagggccagaaaatctatggttatgtaaaccggtagacatgataagatacattgatgagtttggacaaaccacaactagaatgcagtgaaaaaaatgctttatttgtgaaatttgtgatgctattgctttatttgtaaccattataagctgcaataaacaagttaacaacaacaaaaaaaaaaaaaaaaaaaaaaaaaaaaaaacgttgactaaaaaaaaaaaaaaaaaaaaaaaaaaaaaaaaaaaaaaaaaaaaaaaaaaaaaaaaaaaaaaaaaaaaaa

SEQ ID NO: 10255 - DNA, 4570 bp, synthetic construct
  source 1..4570: mol_type = other DNA
ggtctagttacaactgggcatcgctgcagagatcgcacctcctcgtggtcccgctggtagcccttcgaagggtgactaagtcgatctctgccccaggtacggagccgttgggactcaccagtccaacgtaactcctgcctaaattcggtgaaacaaattcctcggtaaaaagccccatggcccctaagaaaaagagaaaggtggagagcacagtgggccctgcctgccctcctggcagaaccgtcaccaagagaccttgggccctggccgaagatacccctcgcggccccgacagccctccaaagcggcccagacccaacagcctgcccctgaccacaacattcagacctctgcctccacctccacagacaaccagcgccgtggaccccagcagccacagccctgtgaaccccccccgggaccagcacgccaccgacaccgccgacgagaaacctcgggccgcttctcctgctctgagcgacgcctctggacctcccacccctgacatccccctgtccccaggcggaacacacgccagagatcctgatgctgatcctgattctcctgacctggactccagcggctctgagacacctggaacaagcgagagcgccaccccggaatcctatgaacaacttgcaccacaaccgtgtgtgggagaaactttacattctagcctcccacgagacagtgaactgtttgtgcctgaagaggggagcagcgagaaggagagcgaggacgcgccaaaaacatctcctccgacgcctgggaaacatggtttggaacagactggggaggaaaaagtgatggtgactgttcctgacaaaaatccaccttgtccttgctgtggtacccgggtaaactctgtgttgaatctgattgaacatctgaaagtgtcacacgggaaaaggggggtttgttttcggtgtgcaaaatgtggaaaggaaaatagtaactatcacagtgttgtttgtcattttccaaaatgcaggggtccagagacggagaaagccccagctggggagtggatttgtgaggtatgcaacagagattttacaaccaaaattggcctgggacaacacaagagattggcacacccagcagtgagaaatcaggaaaggatcgttgcttcccaaccgaaagaaacatcaaatagaggtgctcacaaaaggtgctggacaaaggaggaggaagaattactaataagactggaggctcagttcgagggaaacaaaaatattaataagcttattgcagaacacataaccaccaaaacagctaagcagatcagtgacaaaaggcgattgctgtccagaaagccagcagaggagccacgtgaggagcctggaacgtgtcatcacaccaggagagcagctgcgagcctgagaacggagcctgagatgagtcatcacgcccaggcagaggacagagataatggacctgggagacgccctctgccaggcagggcagctgccggagggagaacaatggacgagataagacgccaccctgataagggcaacggacagcagagacccaccaagcaaaaatcagaagaacagctgcaggcttactataaaaagacactagaggaacgactttcagctggggcacttaacaccttcccccgagcattcaagcaggtaatggaaggccgggatataaagctagtaatcaatcagacagcgcaggactgcttcggatgcctggaatccataagccaaataagaacggcaacccgagataaaaaggacacggtgacccgggagaaacacccaaagaaaccttttcagaagtggatgaaggacagagcaatcaaaaaaggtaattatcttcggttccagcgtttattttatcttgatagagggaaactggctaaaatcattttagatgatattgaatgcttgtcttgtgacataccactcagtgaaatttattcggtttttaaaacaagatgggaaacaactggtagctttaaaagccttggggactttaaaacttacgggaaggctgacaacactgccttcagagaattaattacggctaaagaaattgagaaaaatgtgcaggaaatgagcaaaggctcggctcccggtccagacgggattactcttggggacgtcgtaaagatggatcccgagttttcccggaccatggagattttcaatttatggttaacaactggtaaaatcccggacatggtgagggggtgcagaaccgttttgattccaaaatcatcaaagccggatcgtttgaaagacattaataactggagacctatcacgatcggttccatcttgctgagactgttctccaggattgtaacagctaggctgagcaaagcgtgccccctgaacccaaggcaaagaggctttatcagagcggcgggatgctctgaaaacttaaaactcctgcaaactataatttggtcggccaaaagagaacacagaccactgggtgttgtattcgtggacatcgccaaggcttttgacaccgtaagccaccagcacatcattcatgctttgcagcaaagagaggtggatccccacatcgtcggtctggtgagcaatatgtacgagaacatcagtacgtatatcaccacaaagaggaacacacacacagacaaaatccagatccgggttggagtaaagcagggtgacccgatgtcgccccttttatttaacctggcaatggaccctctattatgcaagctggaagagagtggcaaaggataccaccgaggacagagcagcatcacagcgatggcatttgcagacgatctggttttgctgagcgactcctgggaaaatatgaatacaaatattagcatactggagaccttctgcaatctgaccggactcaaaacacaggggcaaaagtgccacggcttttacatcaagccgacaaaggactcttacaccatcaatgactgcgctgcctggactatcaacggcacacccctgaacatgatcgaccccggcgaatctgagaaatacctcggcctgcagtttgacccgtggattggaatagcaaggtccggtctctccacaaaactagatttttggcttcagcggatcgatcaagcaccacttaaacctctgcagaaaactgatattctcaaaacatacaccatccctcggctgatctacatagctgaccactcagaagtgaaaactgcactactcgaaacccttgaccagaagatccggacagcggtcaaggaatggcttcacctacctccgtgcacctgcgatgccatcctgtactcgagcacgagagacggcggtttgggcatcaccaaattggcaggactgatccccagcgtgcaggcccgtagactgcatcggatcgcacagtcatctgacgatacgatgaaatgcttcatggaaaaagagaaaatggaacagctgcataagaaattgtggattcaagctggaggggacagagagaacataccctcgatttgggaagcaccaccgtcgagtgaaccaccaaacaacgtgagcacaaattcggaatgggaagcaccgacccagaaagataaatttccaaagccttgcaattggaggaaaaacgaattcaaaaaatggaccaaattggcatcccaaggccgcggaattgtaaattttgaaagagacaaaattagtaaccattggatccaatactacagacgcatacctcacaggaaactcctcactgcactacaactcagggccaacgtttaccccacgagagaatttctagccaggggtagacaagaccaatacatcaaggcgtgtaggcactgcgatgcggacattgaatcctgcgcccacatcatcggcaactgcccagtgacacaggacgcccgaatcaagaggcacaattacatctgcgaactgcttctcgaggaggcgaagaagaaggactgggtagtgttcaaggaaccgcacataagggattccaacaaggaactgtacaaacctgacctgatatttgtgaaggatgcccgtgcacttgtcgtggatgtgacagtacggtatgaagcagccaaatcatcgctggaggaagccgctgcagagaaagtgagaaagtacaaacacctggaaacggaagtaagacatctcacgaatgcaaaggacgttacttttgtgggctttcccctaggagcgcgggggaaatggcaccaagataactttaaacttttgactgagcttggcctctccaaatcgaggcaagtgaaaatggcagagactttttccacagtagcgctcttttcatctgtggacattgtacatatgtttgccagtagggccagaaaatctatggttatgtaaaccggtagacatgataagatacattgatgagtttggacaaaccacaactagaatgcagtgaaaaaaatgctttatttgtgaaatttgtgatgctattgctttatttgtaaccattataagctgcaataaacaagttaacaacaacaaaaaaaaaaaaaaaaaaaaaaaaaaaaaaacgttgactaaaaaaaaaaaaaaaaaaaaaaaaaaaaaaaaaaaaaaaaaaaaaaaaaaaaaaaaaaaaaaaaaaaaaa

SEQ ID NO: 10256 - DNA, 4264 bp, synthetic construct
  source 1..4264: mol_type = other DNA
ggtctagttacaactgggcatcgctgcagagatcgcacctcctcgtggtcccgctggtagcccttcgaagggtgactaagtcgatctctgccccaggtacggagccgttgggactcaccagtccaacgtaactcctgcctaaattcggtgaaacaaattcctcggtaaaaagccccatggcccctaagaagaaaagaaaggtgcccacactgctgggcttccacaccgccagcggcaagaaggtgaagatcgccaaggaatccctggataaggtgaaaaacctgttcgacgagaaggagcagggcggaagcggaggcggctatgaacaacttgcaccacaaccgtgtgtgggagaaactttacattctagcctcccacgagacagtgaactgtttgtgcctgaagaggggagcagcgagaaggagagcgaggacgcgccaaaaacatctcctccgacgcctgggaaacatggtttggaacagactggggaggaaaaagtgatggtgactgttcctgacaaaaatccaccttgtccttgctgtggtacccgggtaaactctgtgttgaatctgattgaacatctgaaagtgtcacacgggaaaaggggggtttgttttcggtgtgcaaaatgtggaaaggaaaatagtaactatcacagtgttgtttgtcattttccaaaatgcaggggtccagagacggagaaagccccagctggggagtggatttgtgaggtatgcaacagagattttacaaccaaaattggcctgggacaacacaagagattggcacacccagcagtgagaaatcaggaaaggatcgttgcttcccaaccgaaagaaacatcaaatagaggtgctcacaaaaggtgctggacaaaggaggaggaagaattactaataagactggaggctcagttcgagggaaacaaaaatattaataagcttattgcagaacacataaccaccaaaacagctaagcagatcagtgacaaaaggcgattgctgtccagaaagccagcagaggagccacgtgaggagcctggaacgtgtcatcacaccaggagagcagctgcgagcctgagaacggagcctgagatgagtcatcacgcccaggcagaggacagagataatggacctgggagacgccctctgccaggcagggcagctgccggagggagaacaatggacgagataagacgccaccctgataagggcaacggacagcagagacccaccaagcaaaaatcagaagaacagctgcaggcttactataaaaagacactagaggaacgactttcagctggggcacttaacaccttcccccgagcattcaagcaggtaatggaaggccgggatataaagctagtaatcaatcagacagcgcaggactgcttcggatgcctggaatccataagccaaataagaacggcaacccgagataaaaaggacacggtgacccgggagaaacacccaaagaaaccttttcagaagtggatgaaggacagagcaatcaaaaaaggtaattatcttcggttccagcgtttattttatcttgatagagggaaactggctaaaatcattttagatgatattgaatgcttgtcttgtgacataccactcagtgaaatttattcggtttttaaaacaagatgggaaacaactggtagctttaaaagccttggggactttaaaacttacgggaaggctgacaacactgccttcagagaattaattacggctaaagaaattgagaaaaatgtgcaggaaatgagcaaaggctcggctcccggtccagacgggattactcttggggacgtcgtaaagatggatcccgagttttcccggaccatggagattttcaatttatggttaacaactggtaaaatcccggacatggtgagggggtgcagaaccgttttgattccaaaatcatcaaagccggatcgtttgaaagacattaataactggagacctatcacgatcggttccatcttgctgagactgttctccaggattgtaacagctaggctgagcaaagcgtgccccctgaacccaaggcaaagaggctttatcagagcggcgggatgctctgaaaacttaaaactcctgcaaactataatttggtcggccaaaagagaacacagaccactgggtgttgtattcgtggacatcgccaaggcttttgacaccgtaagccaccagcacatcattcatgctttgcagcaaagagaggtggatccccacatcgtcggtctggtgagcaatatgtacgagaacatcagtacgtatatcaccacaaagaggaacacacacacagacaaaatccagatccgggttggagtaaagcagggtgacccgatgtcgccccttttatttaacctggcaatggaccctctattatgcaagctggaagagagtggcaaaggataccaccgaggacagagcagcatcacagcgatggcatttgcagacgatctggttttgctgagcgactcctgggaaaatatgaatacaaatattagcatactggagaccttctgcaatctgaccggactcaaaacacaggggcaaaagtgccacggcttttacatcaagccgacaaaggactcttacaccatcaatgactgcgctgcctggactatcaacggcacacccctgaacatgatcgaccccggcgaatctgagaaatacctcggcctgcagtttgacccgtggattggaatagcaaggtccggtctctccacaaaactagatttttggcttcagcggatcgatcaagcaccacttaaacctctgcagaaaactgatattctcaaaacatacaccatccctcggctgatctacatagctgaccactcagaagtgaaaactgcactactcgaaacccttgaccagaagatccggacagcggtcaaggaatggcttcacctacctccgtgcacctgcgatgccatcctgtactcgagcacgagagacggcggtttgggcatcaccaaattggcaggactgatccccagcgtgcaggcccgtagactgcatcggatcgcacagtcatctgacgatacgatgaaatgcttcatggaaaaagagaaaatggaacagctgcataagaaattgtggattcaagctggaggggacagagagaacataccctcgatttgggaagcaccaccgtcgagtgaaccaccaaacaacgtgagcacaaattcggaatgggaagcaccgacccagaaagataaatttccaaagccttgcaattggaggaaaaacgaattcaaaaaatggaccaaattggcatcccaaggccgcggaattgtaaattttgaaagagacaaaattagtaaccattggatccaatactacagacgcatacctcacaggaaactcctcactgcactacaactcagggccaacgtttaccccacgagagaatttctagccaggggtagacaagaccaatacatcaaggcgtgtaggcactgcgatgcggacattgaatcctgcgcccacatcatcggcaactgcccagtgacacaggacgcccgaatcaagaggcacaattacatctgcgaactgcttctcgaggaggcgaagaagaaggactgggtagtgttcaaggaaccgcacataagggattccaacaaggaactgtacaaacctgacctgatatttgtgaaggatgcccgtgcacttgtcgtggatgtgacagtacggtatgaagcagccaaatcatcgctggaggaagccgctgcagagaaagtgagaaagtacaaacacctggaaacggaagtaagacatctcacgaatgcaaaggacgttacttttgtgggctttcccctaggagcgcgggggaaatggcaccaagataactttaaacttttgactgagcttggcctctccaaatcgaggcaagtgaaaatggcagagactttttccacagtagcgctcttttcatctgtggacattgtacatatgtttgccagtagggccagaaaatctatggttatgtaaaccggtagacatgataagatacattgatgagtttggacaaaccacaactagaatgcagtgaaaaaaatgctttatttgtgaaatttgtgatgctattgctttatttgtaaccattataagctgcaataaacaagttaacaacaacaaaaaaaaaaaaaaaaaaaaaaaaaaaaaaacgttgactaaaaaaaaaaaaaaaaaaaaaaaaaaaaaaaaaaaaaaaaaaaaaaaaaaaaaaaaaaaaaaaaaaaaaa

SEQ ID NO: 10257 - DNA, 5224 bp, synthetic construct
  source 1..5224: mol_type = other DNA
ggtctagttacaactgggcatcgctgcagagatcgcacctcctcgtggtcccgctggtagcccttcgaagggtgactaagtcgatctctgccccaggtacggagccgttgggactcaccagtccaacgtaactcctgcctaaattcggtgaaacaaattcctcggtaaaaagccccatggcccctaagaagaagcggaaggtgggcatccacggcgtgcccgccgctgccatgcagatgcaactggaagctaatgctgataccagcgtggaagaggaaagcttcggcccccagcctattagcagactggaacagtgcggcatcaacgccaacgacgtgaagaaactggaagaggcaggcttccatacagtggaagctgtggcttacgcccctaagaaggaactgatcaacatcaagggcatcagcgaggccaaggccgataagatcctggccgaggccgccaaactggtgccaatgggctttaccaccgagacagagttccaccagaggcggagcgagatcatccagatcacaaccggctcaaaggaactcgacaagctgctgcagggcggcatcgaaaccggcagcatcaccgagatgttcggcgagtttcgcaccggcaaaacccagatttgccacaccctggccgtgacatgccagctgcctatcgatagaggtggaggcgagggcaaggccatgtacatcgacaccgagggcaccttcagacctgagcggctgctggccgttgctgaaagatacggcctgagcggatctgatgtgctggacaacgtggcctacgccagagccttcaacaccgaccaccaaacacagctgctctaccaggcctctgccatgatggtggaatctcggtacgccctgctgatcgtggatagcgccacagccctgtatagaaccgactacagcggcagaggagaactgtccgccagacagatgcacctggccagattcctgcggatgctgctgagactggctgacgagttcggcgtggccgtggtgatcaccaaccaggtggtcgcccaggtggacggcgccgctatgtttgccgctgaccccaagaaacctatcggcggcaacatcatcgcccacgccagcacaacaagactgtacctgagaaagggccggggagaaaccagaatctgtaaaatctacgacagcccttgcctgcccgaggctgaggccatgttcgccatcaatgccgacggcgtgggagatgccaaggacggcggctccggcagcgaaacccctggcacatctgagtcttatgaacaacttgcaccacaaccgtgtgtgggagaaactttacattctagcctcccacgagacagtgaactgtttgtgcctgaagaggggagcagcgagaaggagagcgaggacgcgccaaaaacatctcctccgacgcctgggaaacatggtttggaacagactggggaggaaaaagtgatggtgactgttcctgacaaaaatccaccttgtccttgctgtggtacccgggtaaactctgtgttgaatctgattgaacatctgaaagtgtcacacgggaaaaggggggtttgttttcggtgtgcaaaatgtggaaaggaaaatagtaactatcacagtgttgtttgtcattttccaaaatgcaggggtccagagacggagaaagccccagctggggagtggatttgtgaggtatgcaacagagattttacaaccaaaattggcctgggacaacacaagagattggcacacccagcagtgagaaatcaggaaaggatcgttgcttcccaaccgaaagaaacatcaaatagaggtgctcacaaaaggtgctggacaaaggaggaggaagaattactaataagactggaggctcagttcgagggaaacaaaaatattaataagcttattgcagaacacataaccaccaaaacagctaagcagatcagtgacaaaaggcgattgctgtccagaaagccagcagaggagccacgtgaggagcctggaacgtgtcatcacaccaggagagcagctgcgagcctgagaacggagcctgagatgagtcatcacgcccaggcagaggacagagataatggacctgggagacgccctctgccaggcagggcagctgccggagggagaacaatggacgagataagacgccaccctgataagggcaacggacagcagagacccaccaagcaaaaatcagaagaacagctgcaggcttactataaaaagacactagaggaacgactttcagctggggcacttaacaccttcccccgagcattcaagcaggtaatggaaggccgggatataaagctagtaatcaatcagacagcgcaggactgcttcggatgcctggaatccataagccaaataagaacggcaacccgagataaaaaggacacggtgacccgggagaaacacccaaagaaaccttttcagaagtggatgaaggacagagcaatcaaaaaaggtaattatcttcggttccagcgtttattttatcttgatagagggaaactggctaaaatcattttagatgatattgaatgcttgtcttgtgacataccactcagtgaaatttattcggtttttaaaacaagatgggaaacaactggtagctttaaaagccttggggactttaaaacttacgggaaggctgacaacactgccttcagagaattaattacggctaaagaaattgagaaaaatgtgcaggaaatgagcaaaggctcggctcccggtccagacgggattactcttggggacgtcgtaaagatggatcccgagttttcccggaccatggagattttcaatttatggttaacaactggtaaaatcccggacatggtgagggggtgcagaaccgttttgattccaaaatcatcaaagccggatcgtttgaaagacattaataactggagacctatcacgatcggttccatcttgctgagactgttctccaggattgtaacagctaggctgagcaaagcgtgccccctgaacccaaggcaaagaggctttatcagagcggcgggatgctctgaaaacttaaaactcctgcaaactataatttggtcggccaaaagagaacacagaccactgggtgttgtattcgtggacatcgccaaggcttttgacaccgtaagccaccagcacatcattcatgctttgcagcaaagagaggtggatccccacatcgtcggtctggtgagcaatatgtacgagaacatcagtacgtatatcaccacaaagaggaacacacacacagacaaaatccagatccgggttggagtaaagcagggtgacccgatgtcgccccttttatttaacctggcaatggaccctctattatgcaagctggaagagagtggcaaaggataccaccgaggacagagcagcatcacagcgatggcatttgcagacgatctggttttgctgagcgactcctgggaaaatatgaatacaaatattagcatactggagaccttctgcaatctgaccggactcaaaacacaggggcaaaagtgccacggcttttacatcaagccgacaaaggactcttacaccatcaatgactgcgctgcctggactatcaacggcacacccctgaacatgatcgaccccggcgaatctgagaaatacctcggcctgcagtttgacccgtggattggaatagcaaggtccggtctctccacaaaactagatttttggcttcagcggatcgatcaagcaccacttaaacctctgcagaaaactgatattctcaaaacatacaccatccctcggctgatctacatagctgaccactcagaagtgaaaactgcactactcgaaacccttgaccagaagatccggacagcggtcaaggaatggcttcacctacctccgtgcacctgcgatgccatcctgtactcgagcacgagagacggcggtttgggcatcaccaaattggcaggactgatccccagcgtgcaggcccgtagactgcatcggatcgcacagtcatctgacgatacgatgaaatgcttcatggaaaaagagaaaatggaacagctgcataagaaattgtggattcaagctggaggggacagagagaacataccctcgatttgggaagcaccaccgtcgagtgaaccaccaaacaacgtgagcacaaattcggaatgggaagcaccgacccagaaagataaatttccaaagccttgcaattggaggaaaaacgaattcaaaaaatggaccaaattggcatcccaaggccgcggaattgtaaattttgaaagagacaaaattagtaaccattggatccaatactacagacgcatacctcacaggaaactcctcactgcactacaactcagggccaacgtttaccccacgagagaatttctagccaggggtagacaagaccaatacatcaaggcgtgtaggcactgcgatgcggacattgaatcctgcgcccacatcatcggcaactgcccagtgacacaggacgcccgaatcaagaggcacaattacatctgcgaactgcttctcgaggaggcgaagaagaaggactgggtagtgttcaaggaaccgcacataagggattccaacaaggaactgtacaaacctgacctgatatttgtgaaggatgcccgtgcacttgtcgtggatgtgacagtacggtatgaagcagccaaatcatcgctggaggaagccgctgcagagaaagtgagaaagtacaaacacctggaaacggaagtaagacatctcacgaatgcaaaggacgttacttttgtgggctttcccctaggagcgcgggggaaatggcaccaagataactttaaacttttgactgagcttggcctctccaaatcgaggcaagtgaaaatggcagagactttttccacagtagcgctcttttcatctgtggacattgtacatatgtttgccagtagggccagaaaatctatggttatgtaaaccggtagacatgataagatacattgatgagtttggacaaaccacaactagaatgcagtgaaaaaaatgctttatttgtgaaatttgtgatgctattgctttatttgtaaccattataagctgcaataaacaagttaacaacaacaaaaaaaaaaaaaaaaaaaaaaaaaaaaaaacgttgactaaaaaaaaaaaaaaaaaaaaaaaaaaaaaaaaaaaaaaaaaaaaaaaaaaaaaaaaaaaaaaaaaaaaaa

SEQ ID NO: 10258 - DNA, 5083 bp, synthetic construct
  source 1..5083: mol_type = other DNA
ggtctagttacaactgggcatcgctgcagagatcgcacctcctcgtggtcccgctggtagcccttcgaagggtgactaagtcgatctctgccccaggtacggagccgttgggactcaccagtccaacgtaactcctgcctaaattcggtgaaacaaattcctcggtaaaaagccccatggcccctaagaaaaagcggaaggtgaatatcagcggctctagctgcggcagccccaacagcgccgacaccagcagcgacttcaaggacctgtggaccaagctgaaggaatgccacgaccgggaagtgcagggactccaggtgaaggtcaccaaactcaagcaagaaagaatcctggacgcccagagactggaagaattcttcaccaagaaccagcagctgagagagcagcagaaagtgctgcacgagacaatcaaggttctggaagatagactgcgggccggcctgtgcgacagatgcgccgtgaccgaggaacacatgcgcaaaaagcagcaggagttcgagaacattagacagcaaaatctgaaattgatcacagagctgatgaacgagagaaacacactgcaggaggagaacaagaagctgagcgagcagctgcaacagaagatcgagaatgatcagcaacaccaggccgctgagctggaatgtgaagaggacgtgatccccgacagcccaatcacagctttcagcttttctggcgtgaacagactgaggcggaaggaaaacccccacgtgcggtacatcgagcagacccataccaagctggaacacagcgtgtgtgccaacgagatgagaaaggtgtccaagtcctccacccatccccagcacaaccctaacgaaaatgagatcctggtggctgatacctacgaccagtctcagagccctatggccaaggcccacggcaccagctcttatacccctgataagagctccttcaacctggccaccgtggtggccgagacactgggcctgggcgtgcaggaggaaagcgagacacagggcccaatgagccctctgggagatgagctgtaccactgcctggaaggcaaccacaagaaacagccttttgagtccggctccgagactcctggaacaagcgagagcgctacacctgagggcagctatgaacaacttgcaccacaaccgtgtgtgggagaaactttacattctagcctcccacgagacagtgaactgtttgtgcctgaagaggggagcagcgagaaggagagcgaggacgcgccaaaaacatctcctccgacgcctgggaaacatggtttggaacagactggggaggaaaaagtgatggtgactgttcctgacaaaaatccaccttgtccttgctgtggtacccgggtaaactctgtgttgaatctgattgaacatctgaaagtgtcacacgggaaaaggggggtttgttttcggtgtgcaaaatgtggaaaggaaaatagtaactatcacagtgttgtttgtcattttccaaaatgcaggggtccagagacggagaaagccccagctggggagtggatttgtgaggtatgcaacagagattttacaaccaaaattggcctgggacaacacaagagattggcacacccagcagtgagaaatcaggaaaggatcgttgcttcccaaccgaaagaaacatcaaatagaggtgctcacaaaaggtgctggacaaaggaggaggaagaattactaataagactggaggctcagttcgagggaaacaaaaatattaataagcttattgcagaacacataaccaccaaaacagctaagcagatcagtgacaaaaggcgattgctgtccagaaagccagcagaggagccacgtgaggagcctggaacgtgtcatcacaccaggagagcagctgcgagcctgagaacggagcctgagatgagtcatcacgcccaggcagaggacagagataatggacctgggagacgccctctgccaggcagggcagctgccggagggagaacaatggacgagataagacgccaccctgataagggcaacggacagcagagacccaccaagcaaaaatcagaagaacagctgcaggcttactataaaaagacactagaggaacgactttcagctggggcacttaacaccttcccccgagcattcaagcaggtaatggaaggccgggatataaagctagtaatcaatcagacagcgcaggactgcttcggatgcctggaatccataagccaaataagaacggcaacccgagataaaaaggacacggtgacccgggagaaacacccaaagaaaccttttcagaagtggatgaaggacagagcaatcaaaaaaggtaattatcttcggttccagcgtttattttatcttgatagagggaaactggctaaaatcattttagatgatattgaatgcttgtcttgtgacataccactcagtgaaatttattcggtttttaaaacaagatgggaaacaactggtagctttaaaagccttggggactttaaaacttacgggaaggctgacaacactgccttcagagaattaattacggctaaagaaattgagaaaaatgtgcaggaaatgagcaaaggctcggctcccggtccagacgggattactcttggggacgtcgtaaagatggatcccgagttttcccggaccatggagattttcaatttatggttaacaactggtaaaatcccggacatggtgagggggtgcagaaccgttttgattccaaaatcatcaaagccggatcgtttgaaagacattaataactggagacctatcacgatcggttccatcttgctgagactgttctccaggattgtaacagctaggctgagcaaagcgtgccccctgaacccaaggcaaagaggctttatcagagcggcgggatgctctgaaaacttaaaactcctgcaaactataatttggtcggccaaaagagaacacagaccactgggtgttgtattcgtggacatcgccaaggcttttgacaccgtaagccaccagcacatcattcatgctttgcagcaaagagaggtggatccccacatcgtcggtctggtgagcaatatgtacgagaacatcagtacgtatatcaccacaaagaggaacacacacacagacaaaatccagatccgggttggagtaaagcagggtgacccgatgtcgccccttttatttaacctggcaatggaccctctattatgcaagctggaagagagtggcaaaggataccaccgaggacagagcagcatcacagcgatggcatttgcagacgatctggttttgctgagcgactcctgggaaaatatgaatacaaatattagcatactggagaccttctgcaatctgaccggactcaaaacacaggggcaaaagtgccacggcttttacatcaagccgacaaaggactcttacaccatcaatgactgcgctgcctggactatcaacggcacacccctgaacatgatcgaccccggcgaatctgagaaatacctcggcctgcagtttgacccgtggattggaatagcaaggtccggtctctccacaaaactagatttttggcttcagcggatcgatcaagcaccacttaaacctctgcagaaaactgatattctcaaaacatacaccatccctcggctgatctacatagctgaccactcagaagtgaaaactgcactactcgaaacccttgaccagaagatccggacagcggtcaaggaatggcttcacctacctccgtgcacctgcgatgccatcctgtactcgagcacgagagacggcggtttgggcatcaccaaattggcaggactgatccccagcgtgcaggcccgtagactgcatcggatcgcacagtcatctgacgatacgatgaaatgcttcatggaaaaagagaaaatggaacagctgcataagaaattgtggattcaagctggaggggacagagagaacataccctcgatttgggaagcaccaccgtcgagtgaaccaccaaacaacgtgagcacaaattcggaatgggaagcaccgacccagaaagataaatttccaaagccttgcaattggaggaaaaacgaattcaaaaaatggaccaaattggcatcccaaggccgcggaattgtaaattttgaaagagacaaaattagtaaccattggatccaatactacagacgcatacctcacaggaaactcctcactgcactacaactcagggccaacgtttaccccacgagagaatttctagccaggggtagacaagaccaatacatcaaggcgtgtaggcactgcgatgcggacattgaatcctgcgcccacatcatcggcaactgcccagtgacacaggacgcccgaatcaagaggcacaattacatctgcgaactgcttctcgaggaggcgaagaagaaggactgggtagtgttcaaggaaccgcacataagggattccaacaaggaactgtacaaacctgacctgatatttgtgaaggatgcccgtgcacttgtcgtggatgtgacagtacggtatgaagcagccaaatcatcgctggaggaagccgctgcagagaaagtgagaaagtacaaacacctggaaacggaagtaagacatctcacgaatgcaaaggacgttacttttgtgggctttcccctaggagcgcgggggaaatggcaccaagataactttaaacttttgactgagcttggcctctccaaatcgaggcaagtgaaaatggcagagactttttccacagtagcgctcttttcatctgtggacattgtacatatgtttgccagtagggccagaaaatctatggttatgtaaaccggtagacatgataagatacattgatgagtttggacaaaccacaactagaatgcagtgaaaaaaatgctttatttgtgaaatttgtgatgctattgctttatttgtaaccattataagctgcaataaacaagttaacaacaacaaaaaaaaaaaaaaaaaaaaaaaaaaaaaaacgttgactaaaaaaaaaaaaaaaaaaaaaaaaaaaaaaaaaaaaaaaaaaaaaaaaaaaaaaaaaaaaaaaaaaaaaa

SEQ ID NO: 10259 - DNA, 4399 bp, synthetic construct
  source 1..4399: mol_type = other DNA
ggtctagttacaactgggcatcgctgcagagatcgcacctcctcgtggtcccgctggtagcccttcgaagggtgactaagtcgatctctgccccaggtacggagccgttgggactcaccagtccaacgtaactcctgcctaaattcggtgaaacaaattcctcggtaaaaagccccatgcctaagagaaaggtgtccagcgccgagggcgctgccaaggaagagcctaaacggagaagcgccagactgagcgccaagccccccgccaaggtggaagccaagcctaagaaggccgccgctaaggacaagagcagcgataagaaagtccagaccaagggcaagcggggcgccaaaggcaaacaggccgaggtggccaaccaggagacaaaggaagatctgcctgctgagaacggcgaaaccaagaccgaggaatctccagcttctgacgaggccggagagaaggaggccaaaagcgacagcggctctgagacacctggaacaagcgagagcgccaccccggaatccctgtttgtgcctgaagaggggagcagcgagaaggagagcgaggacgcgccaaaaacatctcctccgacgcctgggaaacatggtttggaacagactggggaggaaaaagtgatggtgactgttcctgacaaaaatccaccttgtccttgctgtggtacccgggtaaactctgtgttgaatctgattgaacatctgaaagtgtcacacgggaaaaggggggtttgttttcggtgtgcaaaatgtggaaaggaaaatagtaactatcacagtgttgtttgtcattttccaaaatgcaggggtccagagacggagaaagccccagctggggagtggatttgtgaggtatgcaacagagattttacaaccaaaattggcctgggacaacacaagagattggcacacccagcagtgagaaatcaggaaaggatcgttgcttcccaaccgaaagaaacatcaaatagaggtgctcacaaaaggtgctggacaaaggaggaggaagaattactaataagactggaggctcagttcgagggaaacaaaaatattaataagcttattgcagaacacataaccaccaaaacagctaagcagatcagtgacaaaaggcgattgctgtccagaaagccagcagaggagccacgtgaggagcctggaacgtgtcatcacaccaggagagcagctgcgagcctgagaacggagcctgagatgagtcatcacgcccaggcagaggacagagataatggacctgggagacgccctctgccaggcagggcagctgccggagggagaacaatggacgagataagacgccaccctgataagggcaacggacagcagagacccaccaagcaaaaatcagaagaacagctgcaggcttactataaaaagacactagaggaacgactttcagctggggcacttaacaccttcccccgagcattcaagcaggtaatggaaggccgggatataaagctagtaatcaatcagacagcgcaggactgcttcggatgcctggaatccataagccaaataagaacggcaacccgagataaaaaggacacggtgacccgggagaaacacccaaagaaaccttttcagaagtggatgaaggacagagcaatcaaaaaaggtaattatcttcggttccagcgtttattttatcttgatagagggaaactggctaaaatcattttagatgatattgaatgcttgtcttgtgacataccactcagtgaaatttattcggtttttaaaacaagatgggaaacaactggtagctttaaaagccttggggactttaaaacttacgggaaggctgacaacactgccttcagagaattaattacggctaaagaaattgagaaaaatgtgcaggaaatgagcaaaggctcggctcccggtccagacgggattactcttggggacgtcgtaaagatggatcccgagttttcccggaccatggagattttcaatttatggttaacaactggtaaaatcccggacatggtgagggggtgcagaaccgttttgattccaaaatcatcaaagccggatcgtttgaaagacattaataactggagacctatcacgatcggttccatcttgctgagactgttctccaggattgtaacagctaggctgagcaaagcgtgccccctgaacccaaggcaaagaggctttatcagagcggcgggatgctctgaaaacttaaaactcctgcaaactataatttggtcggccaaaagagaacacagaccactgggtgttgtattcgtggacatcgccaaggcttttgacaccgtaagccaccagcacatcattcatgctttgcagcaaagagaggtggatccccacatcgtcggtctggtgagcaatatgtacgagaacatcagtacgtatatcaccacaaagaggaacacacacacagacaaaatccagatccgggttggagtaaagcagggtgacccgatgtcgccccttttatttaacctggcaatggaccctctattatgcaagctggaagagagtggcaaaggataccaccgaggacagagcagcatcacagcgatggcatttgcagacgatctggttttgctgagcgactcctgggaaaatatgaatacaaatattagcatactggagaccttctgcaatctgaccggactcaaaacacaggggcaaaagtgccacggcttttacatcaagccgacaaaggactcttacaccatcaatgactgcgctgcctggactatcaacggcacacccctgaacatgatcgaccccggcgaatctgagaaatacctcggcctgcagtttgacccgtggattggaatagcaaggtccggtctctccacaaaactagatttttggcttcagcggatcgatcaagcaccacttaaacctctgcagaaaactgatattctcaaaacatacaccatccctcggctgatctacatagctgaccactcagaagtgaaaactgcactactcgaaacccttgaccagaagatccggacagcggtcaaggaatggcttcacctacctccgtgcacctgcgatgccatcctgtactcgagcacgagagacggcggtttgggcatcaccaaattggcaggactgatccccagcgtgcaggcccgtagactgcatcggatcgcacagtcatctgacgatacgatgaaatgcttcatggaaaaagagaaaatggaacagctgcataagaaattgtggattcaagctggaggggacagagagaacataccctcgatttgggaagcaccaccgtcgagtgaaccaccaaacaacgtgagcacaaattcggaatgggaagcaccgacccagaaagataaatttccaaagccttgcaattggaggaaaaacgaattcaaaaaatggaccaaattggcatcccaaggccgcggaattgtaaattttgaaagagacaaaattagtaaccattggatccaatactacagacgcatacctcacaggaaactcctcactgcactacaactcagggccaacgtttaccccacgagagaatttctagccaggggtagacaagaccaatacatcaaggcgtgtaggcactgcgatgcggacattgaatcctgcgcccacatcatcggcaactgcccagtgacacaggacgcccgaatcaagaggcacaattacatctgcgaactgcttctcgaggaggcgaagaagaaggactgggtagtgttcaaggaaccgcacataagggattccaacaaggaactgtacaaacctgacctgatatttgtgaaggatgcccgtgcacttgtcgtggatgtgacagtacggtatgaagcagccaaatcatcgctggaggaagccgctgcagagaaagtgagaaagtacaaacacctggaaacggaagtaagacatctcacgaatgcaaaggacgttacttttgtgggctttcccctaggagcgcgggggaaatggcaccaagataactttaaacttttgactgagcttggcctctccaaatcgaggcaagtgaaaatggcagagactttttccacagtagcgctcttttcatctgtggacattgtacatatgtttgccagtagggccagaaaatctatggttatgtaaaccggtagacatgataagatacattgatgagtttggacaaaccacaactagaatgcagtgaaaaaaatgctttatttgtgaaatttgtgatgctattgctttatttgtaaccattataagctgcaataaacaagttaacaacaacaaaaaaaaaaaaaaaaaaaaaaaaaaaaaaacgttgactaaaaaaaaaaaaaaaaaaaaaaaaaaaaaaaaaaaaaaaaaaaaaaaaaaaaaaaaaaaaaaaaaaaaaa

SEQ ID NO: 10260 - DNA, 4303 bp, synthetic construct
  source 1..4303: mol_type = other DNA
ggtctagttacaactgggcatcgctgcagagatcgcacctcctcgtggtcccgctggtagcccttcgaagggtgactaagtcgatctctgccccaggtacggagccgttgggactcaccagtccaacgtaactcctgcctaaattcggtgaaacaaattcctcggtaaaaagccccatggcccctaagaaaaagagaaaggtggtgaccgtgaagttcaagtacaagggcgaggaaaaggaagtggacatcagcaagatcaagaaggtctggcgggtgggcaagatgatcagctttacctacgacgataacggcaagacaggcagaggcgccgtgtccgagaaggacgcccctaaagagctgctgcagatgctggaaaaaagcggctctgagacacctggaacaagcgagagcgccaccccggaatccctgtttgtgcctgaagaggggagcagcgagaaggagagcgaggacgcgccaaaaacatctcctccgacgcctgggaaacatggtttggaacagactggggaggaaaaagtgatggtgactgttcctgacaaaaatccaccttgtccttgctgtggtacccgggtaaactctgtgttgaatctgattgaacatctgaaagtgtcacacgggaaaaggggggtttgttttcggtgtgcaaaatgtggaaaggaaaatagtaactatcacagtgttgtttgtcattttccaaaatgcaggggtccagagacggagaaagccccagctggggagtggatttgtgaggtatgcaacagagattttacaaccaaaattggcctgggacaacacaagagattggcacacccagcagtgagaaatcaggaaaggatcgttgcttcccaaccgaaagaaacatcaaatagaggtgctcacaaaaggtgctggacaaaggaggaggaagaattactaataagactggaggctcagttcgagggaaacaaaaatattaataagcttattgcagaacacataaccaccaaaacagctaagcagatcagtgacaaaaggcgattgctgtccagaaagccagcagaggagccacgtgaggagcctggaacgtgtcatcacaccaggagagcagctgcgagcctgagaacggagcctgagatgagtcatcacgcccaggcagaggacagagataatggacctgggagacgccctctgccaggcagggcagctgccggagggagaacaatggacgagataagacgccaccctgataagggcaacggacagcagagacccaccaagcaaaaatcagaagaacagctgcaggcttactataaaaagacactagaggaacgactttcagctggggcacttaacaccttcccccgagcattcaagcaggtaatggaaggccgggatataaagctagtaatcaatcagacagcgcaggactgcttcggatgcctggaatccataagccaaataagaacggcaacccgagataaaaaggacacggtgacccgggagaaacacccaaagaaaccttttcagaagtggatgaaggacagagcaatcaaaaaaggtaattatcttcggttccagcgtttattttatcttgatagagggaaactggctaaaatcattttagatgatattgaatgcttgtcttgtgacataccactcagtgaaatttattcggtttttaaaacaagatgggaaacaactggtagctttaaaagccttggggactttaaaacttacgggaaggctgacaacactgccttcagagaattaattacggctaaagaaattgagaaaaatgtgcaggaaatgagcaaaggctcggctcccggtccagacgggattactcttggggacgtcgtaaagatggatcccgagttttcccggaccatggagattttcaatttatggttaacaactggtaaaatcccggacatggtgagggggtgcagaaccgttttgattccaaaatcatcaaagccggatcgtttgaaagacattaataactggagacctatcacgatcggttccatcttgctgagactgttctccaggattgtaacagctaggctgagcaaagcgtgccccctgaacccaaggcaaagaggctttatcagagcggcgggatgctctgaaaacttaaaactcctgcaaactataatttggtcggccaaaagagaacacagaccactgggtgttgtattcgtggacatcgccaaggcttttgacaccgtaagccaccagcacatcattcatgctttgcagcaaagagaggtggatccccacatcgtcggtctggtgagcaatatgtacgagaacatcagtacgtatatcaccacaaagaggaacacacacacagacaaaatccagatccgggttggagtaaagcagggtgacccgatgtcgccccttttatttaacctggcaatggaccctctattatgcaagctggaagagagtggcaaaggataccaccgaggacagagcagcatcacagcgatggcatttgcagacgatctggttttgctgagcgactcctgggaaaatatgaatacaaatattagcatactggagaccttctgcaatctgaccggactcaaaacacaggggcaaaagtgccacggcttttacatcaagccgacaaaggactcttacaccatcaatgactgcgctgcctggactatcaacggcacacccctgaacatgatcgaccccggcgaatctgagaaatacctcggcctgcagtttgacccgtggattggaatagcaaggtccggtctctccacaaaactagatttttggcttcagcggatcgatcaagcaccacttaaacctctgcagaaaactgatattctcaaaacatacaccatccctcggctgatctacatagctgaccactcagaagtgaaaactgcactactcgaaacccttgaccagaagatccggacagcggtcaaggaatggcttcacctacctccgtgcacctgcgatgccatcctgtactcgagcacgagagacggcggtttgggcatcaccaaattggcaggactgatccccagcgtgcaggcccgtagactgcatcggatcgcacagtcatctgacgatacgatgaaatgcttcatggaaaaagagaaaatggaacagctgcataagaaattgtggattcaagctggaggggacagagagaacataccctcgatttgggaagcaccaccgtcgagtgaaccaccaaacaacgtgagcacaaattcggaatgggaagcaccgacccagaaagataaatttccaaagccttgcaattggaggaaaaacgaattcaaaaaatggaccaaattggcatcccaaggccgcggaattgtaaattttgaaagagacaaaattagtaaccattggatccaatactacagacgcatacctcacaggaaactcctcactgcactacaactcagggccaacgtttaccccacgagagaatttctagccaggggtagacaagaccaatacatcaaggcgtgtaggcactgcgatgcggacattgaatcctgcgcccacatcatcggcaactgcccagtgacacaggacgcccgaatcaagaggcacaattacatctgcgaactgcttctcgaggaggcgaagaagaaggactgggtagtgttcaaggaaccgcacataagggattccaacaaggaactgtacaaacctgacctgatatttgtgaaggatgcccgtgcacttgtcgtggatgtgacagtacggtatgaagcagccaaatcatcgctggaggaagccgctgcagagaaagtgagaaagtacaaacacctggaaacggaagtaagacatctcacgaatgcaaaggacgttacttttgtgggctttcccctaggagcgcgggggaaatggcaccaagataactttaaacttttgactgagcttggcctctccaaatcgaggcaagtgaaaatggcagagactttttccacagtagcgctcttttcatctgtggacattgtacatatgtttgccagtagggccagaaaatctatggttatgtaaaccggtagacatgataagatacattgatgagtttggacaaaccacaactagaatgcagtgaaaaaaatgctttatttgtgaaatttgtgatgctattgctttatttgtaaccattataagctgcaataaacaagttaacaacaacaaaaaaaaaaaaaaaaaaaaaaaaaaaaaaacgttgactaaaaaaaaaaaaaaaaaaaaaaaaaaaaaaaaaaaaaaaaaaaaaaaaaaaaaaaaaaaaaaaaaaaaaa

SEQ ID NO: 10261 - DNA, 4345 bp, synthetic construct
  source 1..4345: mol_type = other DNA
ggtctagttacaactgggcatcgctgcagagatcgcacctcctcgtggtcccgctggtagcccttcgaagggtgactaagtcgatctctgccccaggtacggagccgttgggactcaccagtccaacgtaactcctgcctaaattcggtgaaacaaattcctcggtaaaaagccccatgaaacggacagccgacggaagcgagttcgagtcaccaaagaagaagcggaaagtcgctacagtgaagttcaagtacaagggcgaggaaaaagaggtggatatctctaagatcaagaaagtgtggcgggtgggcaagatgatcagcttcacctacgacgagggcggaggaaaaaccggcagaggcgccgtcagcgagaaggacgcccctaaggaactgctgcagatgctggaaaagcagaagaagagcggctctgagacacctggaacaagcgagagcgccaccccggaatccctgtttgtgcctgaagaggggagcagcgagaaggagagcgaggacgcgccaaaaacatctcctccgacgcctgggaaacatggtttggaacagactggggaggaaaaagtgatggtgactgttcctgacaaaaatccaccttgtccttgctgtggtacccgggtaaactctgtgttgaatctgattgaacatctgaaagtgtcacacgggaaaaggggggtttgttttcggtgtgcaaaatgtggaaaggaaaatagtaactatcacagtgttgtttgtcattttccaaaatgcaggggtccagagacggagaaagccccagctggggagtggatttgtgaggtatgcaacagagattttacaaccaaaattggcctgggacaacacaagagattggcacacccagcagtgagaaatcaggaaaggatcgttgcttcccaaccgaaagaaacatcaaatagaggtgctcacaaaaggtgctggacaaaggaggaggaagaattactaataagactggaggctcagttcgagggaaacaaaaatattaataagcttattgcagaacacataaccaccaaaacagctaagcagatcagtgacaaaaggcgattgctgtccagaaagccagcagaggagccacgtgaggagcctggaacgtgtcatcacaccaggagagcagctgcgagcctgagaacggagcctgagatgagtcatcacgcccaggcagaggacagagataatggacctgggagacgccctctgccaggcagggcagctgccggagggagaacaatggacgagataagacgccaccctgataagggcaacggacagcagagacccaccaagcaaaaatcagaagaacagctgcaggcttactataaaaagacactagaggaacgactttcagctggggcacttaacaccttcccccgagcattcaagcaggtaatggaaggccgggatataaagctagtaatcaatcagacagcgcaggactgcttcggatgcctggaatccataagccaaataagaacggcaacccgagataaaaaggacacggtgacccgggagaaacacccaaagaaaccttttcagaagtggatgaaggacagagcaatcaaaaaaggtaattatcttcggttccagcgtttattttatcttgatagagggaaactggctaaaatcattttagatgatattgaatgcttgtcttgtgacataccactcagtgaaatttattcggtttttaaaacaagatgggaaacaactggtagctttaaaagccttggggactttaaaacttacgggaaggctgacaacactgccttcagagaattaattacggctaaagaaattgagaaaaatgtgcaggaaatgagcaaaggctcggctcccggtccagacgggattactcttggggacgtcgtaaagatggatcccgagttttcccggaccatggagattttcaatttatggttaacaactggtaaaatcccggacatggtgagggggtgcagaaccgttttgattccaaaatcatcaaagccggatcgtttgaaagacattaataactggagacctatcacgatcggttccatcttgctgagactgttctccaggattgtaacagctaggctgagcaaagcgtgccccctgaacccaaggcaaagaggctttatcagagcggcgggatgctctgaaaacttaaaactcctgcaaactataatttggtcggccaaaagagaacacagaccactgggtgttgtattcgtggacatcgccaaggcttttgacaccgtaagccaccagcacatcattcatgctttgcagcaaagagaggtggatccccacatcgtcggtctggtgagcaatatgtacgagaacatcagtacgtatatcaccacaaagaggaacacacacacagacaaaatccagatccgggttggagtaaagcagggtgacccgatgtcgccccttttatttaacctggcaatggaccctctattatgcaagctggaagagagtggcaaaggataccaccgaggacagagcagcatcacagcgatggcatttgcagacgatctggttttgctgagcgactcctgggaaaatatgaatacaaatattagcatactggagaccttctgcaatctgaccggactcaaaacacaggggcaaaagtgccacggcttttacatcaagccgacaaaggactcttacaccatcaatgactgcgctgcctggactatcaacggcacacccctgaacatgatcgaccccggcgaatctgagaaatacctcggcctgcagtttgacccgtggattggaatagcaaggtccggtctctccacaaaactagatttttggcttcagcggatcgatcaagcaccacttaaacctctgcagaaaactgatattctcaaaacatacaccatccctcggctgatctacatagctgaccactcagaagtgaaaactgcactactcgaaacccttgaccagaagatccggacagcggtcaaggaatggcttcacctacctccgtgcacctgcgatgccatcctgtactcgagcacgagagacggcggtttgggcatcaccaaattggcaggactgatccccagcgtgcaggcccgtagactgcatcggatcgcacagtcatctgacgatacgatgaaatgcttcatggaaaaagagaaaatggaacagctgcataagaaattgtggattcaagctggaggggacagagagaacataccctcgatttgggaagcaccaccgtcgagtgaaccaccaaacaacgtgagcacaaattcggaatgggaagcaccgacccagaaagataaatttccaaagccttgcaattggaggaaaaacgaattcaaaaaatggaccaaattggcatcccaaggccgcggaattgtaaattttgaaagagacaaaattagtaaccattggatccaatactacagacgcatacctcacaggaaactcctcactgcactacaactcagggccaacgtttaccccacgagagaatttctagccaggggtagacaagaccaatacatcaaggcgtgtaggcactgcgatgcggacattgaatcctgcgcccacatcatcggcaactgcccagtgacacaggacgcccgaatcaagaggcacaattacatctgcgaactgcttctcgaggaggcgaagaagaaggactgggtagtgttcaaggaaccgcacataagggattccaacaaggaactgtacaaacctgacctgatatttgtgaaggatgcccgtgcacttgtcgtggatgtgacagtacggtatgaagcagccaaatcatcgctggaggaagccgctgcagagaaagtgagaaagtacaaacacctggaaacggaagtaagacatctcacgaatgcaaaggacgttacttttgtgggctttcccctaggagcgcgggggaaatggcaccaagataactttaaacttttgactgagcttggcctctccaaatcgaggcaagtgaaaatggcagagactttttccacagtagcgctcttttcatctgtggacattgtacatatgtttgccagtagggccagaaaatctatggttatgtaaaccggtagacatgataagatacattgatgagtttggacaaaccacaactagaatgcagtgaaaaaaatgctttatttgtgaaatttgtgatgctattgctttatttgtaaccattataagctgcaataaacaagttaacaacaacaaaaaaaaaaaaaaaaaaaaaaaaaaaaaaacgttgactaaaaaaaaaaaaaaaaaaaaaaaaaaaaaaaaaaaaaaaaaaaaaaaaaaaaaaaaaaaaaaaaaaaaaa

SEQ ID NO: 10262 - DNA, 4231 bp, synthetic construct
  source 1..4231: mol_type = other DNA
ggtctagttacaactgggcatcgctgcagagatcgcacctcctcgtggtcccgctggtagcccttcgaagggtgactaagtcgatctctgccccaggtacggagccgttgggactcaccagtccaacgtaactcctgcctaaattcggtgaaacaaattcctcggtaaaaagccccatgaaacggacagccgacggaagcgagttcgagtcaccaaagaagaagcggaaagtccggaaaagacggcagacaagcatgaccgacttctaccactctaagcggagactgatcttcagcaagagaaagcctagcggctctgagacacctggaacaagcgagagcgccaccccggaatccctgtttgtgcctgaagaggggagcagcgagaaggagagcgaggacgcgccaaaaacatctcctccgacgcctgggaaacatggtttggaacagactggggaggaaaaagtgatggtgactgttcctgacaaaaatccaccttgtccttgctgtggtacccgggtaaactctgtgttgaatctgattgaacatctgaaagtgtcacacgggaaaaggggggtttgttttcggtgtgcaaaatgtggaaaggaaaatagtaactatcacagtgttgtttgtcattttccaaaatgcaggggtccagagacggagaaagccccagctggggagtggatttgtgaggtatgcaacagagattttacaaccaaaattggcctgggacaacacaagagattggcacacccagcagtgagaaatcaggaaaggatcgttgcttcccaaccgaaagaaacatcaaatagaggtgctcacaaaaggtgctggacaaaggaggaggaagaattactaataagactggaggctcagttcgagggaaacaaaaatattaataagcttattgcagaacacataaccaccaaaacagctaagcagatcagtgacaaaaggcgattgctgtccagaaagccagcagaggagccacgtgaggagcctggaacgtgtcatcacaccaggagagcagctgcgagcctgagaacggagcctgagatgagtcatcacgcccaggcagaggacagagataatggacctgggagacgccctctgccaggcagggcagctgccggagggagaacaatggacgagataagacgccaccctgataagggcaacggacagcagagacccaccaagcaaaaatcagaagaacagctgcaggcttactataaaaagacactagaggaacgactttcagctggggcacttaacaccttcccccgagcattcaagcaggtaatggaaggccgggatataaagctagtaatcaatcagacagcgcaggactgcttcggatgcctggaatccataagccaaataagaacggcaacccgagataaaaaggacacggtgacccgggagaaacacccaaagaaaccttttcagaagtggatgaaggacagagcaatcaaaaaaggtaattatcttcggttccagcgtttattttatcttgatagagggaaactggctaaaatcattttagatgatattgaatgcttgtcttgtgacataccactcagtgaaatttattcggtttttaaaacaagatgggaaacaactggtagctttaaaagccttggggactttaaaacttacgggaaggctgacaacactgccttcagagaattaattacggctaaagaaattgagaaaaatgtgcaggaaatgagcaaaggctcggctcccggtccagacgggattactcttggggacgtcgtaaagatggatcccgagttttcccggaccatggagattttcaatttatggttaacaactggtaaaatcccggacatggtgagggggtgcagaaccgttttgattccaaaatcatcaaagccggatcgtttgaaagacattaataactggagacctatcacgatcggttccatcttgctgagactgttctccaggattgtaacagctaggctgagcaaagcgtgccccctgaacccaaggcaaagaggctttatcagagcggcgggatgctctgaaaacttaaaactcctgcaaactataatttggtcggccaaaagagaacacagaccactgggtgttgtattcgtggacatcgccaaggcttttgacaccgtaagccaccagcacatcattcatgctttgcagcaaagagaggtggatccccacatcgtcggtctggtgagcaatatgtacgagaacatcagtacgtatatcaccacaaagaggaacacacacacagacaaaatccagatccgggttggagtaaagcagggtgacccgatgtcgccccttttatttaacctggcaatggaccctctattatgcaagctggaagagagtggcaaaggataccaccgaggacagagcagcatcacagcgatggcatttgcagacgatctggttttgctgagcgactcctgggaaaatatgaatacaaatattagcatactggagaccttctgcaatctgaccggactcaaaacacaggggcaaaagtgccacggcttttacatcaagccgacaaaggactcttacaccatcaatgactgcgctgcctggactatcaacggcacacccctgaacatgatcgaccccggcgaatctgagaaatacctcggcctgcagtttgacccgtggattggaatagcaaggtccggtctctccacaaaactagatttttggcttcagcggatcgatcaagcaccacttaaacctctgcagaaaactgatattctcaaaacatacaccatccctcggctgatctacatagctgaccactcagaagtgaaaactgcactactcgaaacccttgaccagaagatccggacagcggtcaaggaatggcttcacctacctccgtgcacctgcgatgccatcctgtactcgagcacgagagacggcggtttgggcatcaccaaattggcaggactgatccccagcgtgcaggcccgtagactgcatcggatcgcacagtcatctgacgatacgatgaaatgcttcatggaaaaagagaaaatggaacagctgcataagaaattgtggattcaagctggaggggacagagagaacataccctcgatttgggaagcaccaccgtcgagtgaaccaccaaacaacgtgagcacaaattcggaatgggaagcaccgacccagaaagataaatttccaaagccttgcaattggaggaaaaacgaattcaaaaaatggaccaaattggcatcccaaggccgcggaattgtaaattttgaaagagacaaaattagtaaccattggatccaatactacagacgcatacctcacaggaaactcctcactgcactacaactcagggccaacgtttaccccacgagagaatttctagccaggggtagacaagaccaatacatcaaggcgtgtaggcactgcgatgcggacattgaatcctgcgcccacatcatcggcaactgcccagtgacacaggacgcccgaatcaagaggcacaattacatctgcgaactgcttctcgaggaggcgaagaagaaggactgggtagtgttcaaggaaccgcacataagggattccaacaaggaactgtacaaacctgacctgatatttgtgaaggatgcccgtgcacttgtcgtggatgtgacagtacggtatgaagcagccaaatcatcgctggaggaagccgctgcagagaaagtgagaaagtacaaacacctggaaacggaagtaagacatctcacgaatgcaaaggacgttacttttgtgggctttcccctaggagcgcgggggaaatggcaccaagataactttaaacttttgactgagcttggcctctccaaatcgaggcaagtgaaaatggcagagactttttccacagtagcgctcttttcatctgtggacattgtacatatgtttgccagtagggccagaaaatctatggttatgtaaaccggtagacatgataagatacattgatgagtttggacaaaccacaactagaatgcagtgaaaaaaatgctttatttgtgaaatttgtgatgctattgctttatttgtaaccattataagctgcaataaacaagttaacaacaacaaaaaaaaaaaaaaaaaaaaaaaaaaaaaaacgttgactaaaaaaaaaaaaaaaaaaaaaaaaaaaaaaaaaaaaaaaaaaaaaaaaaaaaaaaaaaaaaaaaaaaaaa

SEQ ID NO: 10263 - DNA, 4204 bp, synthetic construct
  source 1..4204: mol_type = other DNA
ggtctagttacaactgggcatcgctgcagagatcgcacctcctcgtggtcccgctggtagcccttcgaagggtgactaagtcgatctctgccccaggtacggagccgttgggactcaccagtccaacgtaactcctgcctaaattcggtgaaacaaattcctcggtaaaaagccccatgaaacggacagccgacggaagcgagttcgagtcaccaaagaagaagcggaaagtctctacccagggcagactggacgatttcttcaaggtgacaggcagcctgagcggctctgagacacctggaacaagcgagagcgccaccccggaatccctgtttgtgcctgaagaggggagcagcgagaaggagagcgaggacgcgccaaaaacatctcctccgacgcctgggaaacatggtttggaacagactggggaggaaaaagtgatggtgactgttcctgacaaaaatccaccttgtccttgctgtggtacccgggtaaactctgtgttgaatctgattgaacatctgaaagtgtcacacgggaaaaggggggtttgttttcggtgtgcaaaatgtggaaaggaaaatagtaactatcacagtgttgtttgtcattttccaaaatgcaggggtccagagacggagaaagccccagctggggagtggatttgtgaggtatgcaacagagattttacaaccaaaattggcctgggacaacacaagagattggcacacccagcagtgagaaatcaggaaaggatcgttgcttcccaaccgaaagaaacatcaaatagaggtgctcacaaaaggtgctggacaaaggaggaggaagaattactaataagactggaggctcagttcgagggaaacaaaaatattaataagcttattgcagaacacataaccaccaaaacagctaagcagatcagtgacaaaaggcgattgctgtccagaaagccagcagaggagccacgtgaggagcctggaacgtgtcatcacaccaggagagcagctgcgagcctgagaacggagcctgagatgagtcatcacgcccaggcagaggacagagataatggacctgggagacgccctctgccaggcagggcagctgccggagggagaacaatggacgagataagacgccaccctgataagggcaacggacagcagagacccaccaagcaaaaatcagaagaacagctgcaggcttactataaaaagacactagaggaacgactttcagctggggcacttaacaccttcccccgagcattcaagcaggtaatggaaggccgggatataaagctagtaatcaatcagacagcgcaggactgcttcggatgcctggaatccataagccaaataagaacggcaacccgagataaaaaggacacggtgacccgggagaaacacccaaagaaaccttttcagaagtggatgaaggacagagcaatcaaaaaaggtaattatcttcggttccagcgtttattttatcttgatagagggaaactggctaaaatcattttagatgatattgaatgcttgtcttgtgacataccactcagtgaaatttattcggtttttaaaacaagatgggaaacaactggtagctttaaaagccttggggactttaaaacttacgggaaggctgacaacactgccttcagagaattaattacggctaaagaaattgagaaaaatgtgcaggaaatgagcaaaggctcggctcccggtccagacgggattactcttggggacgtcgtaaagatggatcccgagttttcccggaccatggagattttcaatttatggttaacaactggtaaaatcccggacatggtgagggggtgcagaaccgttttgattccaaaatcatcaaagccggatcgtttgaaagacattaataactggagacctatcacgatcggttccatcttgctgagactgttctccaggattgtaacagctaggctgagcaaagcgtgccccctgaacccaaggcaaagaggctttatcagagcggcgggatgctctgaaaacttaaaactcctgcaaactataatttggtcggccaaaagagaacacagaccactgggtgttgtattcgtggacatcgccaaggcttttgacaccgtaagccaccagcacatcattcatgctttgcagcaaagagaggtggatccccacatcgtcggtctggtgagcaatatgtacgagaacatcagtacgtatatcaccacaaagaggaacacacacacagacaaaatccagatccgggttggagtaaagcagggtgacccgatgtcgccccttttatttaacctggcaatggaccctctattatgcaagctggaagagagtggcaaaggataccaccgaggacagagcagcatcacagcgatggcatttgcagacgatctggttttgctgagcgactcctgggaaaatatgaatacaaatattagcatactggagaccttctgcaatctgaccggactcaaaacacaggggcaaaagtgccacggcttttacatcaagccgacaaaggactcttacaccatcaatgactgcgctgcctggactatcaacggcacacccctgaacatgatcgaccccggcgaatctgagaaatacctcggcctgcagtttgacccgtggattggaatagcaaggtccggtctctccacaaaactagatttttggcttcagcggatcgatcaagcaccacttaaacctctgcagaaaactgatattctcaaaacatacaccatccctcggctgatctacatagctgaccactcagaagtgaaaactgcactactcgaaacccttgaccagaagatccggacagcggtcaaggaatggcttcacctacctccgtgcacctgcgatgccatcctgtactcgagcacgagagacggcggtttgggcatcaccaaattggcaggactgatccccagcgtgcaggcccgtagactgcatcggatcgcacagtcatctgacgatacgatgaaatgcttcatggaaaaagagaaaatggaacagctgcataagaaattgtggattcaagctggaggggacagagagaacataccctcgatttgggaagcaccaccgtcgagtgaaccaccaaacaacgtgagcacaaattcggaatgggaagcaccgacccagaaagataaatttccaaagccttgcaattggaggaaaaacgaattcaaaaaatggaccaaattggcatcccaaggccgcggaattgtaaattttgaaagagacaaaattagtaaccattggatccaatactacagacgcatacctcacaggaaactcctcactgcactacaactcagggccaacgtttaccccacgagagaatttctagccaggggtagacaagaccaatacatcaaggcgtgtaggcactgcgatgcggacattgaatcctgcgcccacatcatcggcaactgcccagtgacacaggacgcccgaatcaagaggcacaattacatctgcgaactgcttctcgaggaggcgaagaagaaggactgggtagtgttcaaggaaccgcacataagggattccaacaaggaactgtacaaacctgacctgatatttgtgaaggatgcccgtgcacttgtcgtggatgtgacagtacggtatgaagcagccaaatcatcgctggaggaagccgctgcagagaaagtgagaaagtacaaacacctggaaacggaagtaagacatctcacgaatgcaaaggacgttacttttgtgggctttcccctaggagcgcgggggaaatggcaccaagataactttaaacttttgactgagcttggcctctccaaatcgaggcaagtgaaaatggcagagactttttccacagtagcgctcttttcatctgtggacattgtacatatgtttgccagtagggccagaaaatctatggttatgtaaaccggtagacatgataagatacattgatgagtttggacaaaccacaactagaatgcagtgaaaaaaatgctttatttgtgaaatttgtgatgctattgctttatttgtaaccattataagctgcaataaacaagttaacaacaacaaaaaaaaaaaaaaaaaaaaaaaaaaaaaaacgttgactaaaaaaaaaaaaaaaaaaaaaaaaaaaaaaaaaaaaaaaaaaaaaaaaaaaaaaaaaaaaaaaaaaaaaa

SEQ ID NO: 10264 - DNA, 4501 bp, synthetic construct
  source 1..4501: mol_type = other DNA
ggtctagttacaactgggcatcgctgcagagatcgcacctcctcgtggtcccgctggtagcccttcgaagggtgactaagtcgatctctgccccaggtacggagccgttgggactcaccagtccaacgtaactcctgcctaaattcggtgaaacaaattcctcggtaaaaagccccatggcccctaagaaaaagagaaaggtggagagcacagtgggccctgcctgccctcctggcagaaccgtcaccaagagaccttgggccctggccgaagatacccctcgcggccccgacagccctccaaagcggcccagacccaacagcctgcccctgaccacaacattcagacctctgcctccacctccacagacaaccagcgccgtggaccccagcagccacagccctgtgaaccccccccgggaccagcacgccaccgacaccgccgacgagaaacctcgggccgcttctcctgctctgagcgacgcctctggacctcccacccctgacatccccctgtccccaggcggaacacacgccagagatcctgatgctgatcctgattctcctgacctggactccagcggctctgagacacctggaacaagcgagagcgccaccccggaatccctgtttgtgcctgaagaggggagcagcgagaaggagagcgaggacgcgccaaaaacatctcctccgacgcctgggaaacatggtttggaacagactggggaggaaaaagtgatggtgactgttcctgacaaaaatccaccttgtccttgctgtggtacccgggtaaactctgtgttgaatctgattgaacatctgaaagtgtcacacgggaaaaggggggtttgttttcggtgtgcaaaatgtggaaaggaaaatagtaactatcacagtgttgtttgtcattttccaaaatgcaggggtccagagacggagaaagccccagctggggagtggatttgtgaggtatgcaacagagattttacaaccaaaattggcctgggacaacacaagagattggcacacccagcagtgagaaatcaggaaaggatcgttgcttcccaaccgaaagaaacatcaaatagaggtgctcacaaaaggtgctggacaaaggaggaggaagaattactaataagactggaggctcagttcgagggaaacaaaaatattaataagcttattgcagaacacataaccaccaaaacagctaagcagatcagtgacaaaaggcgattgctgtccagaaagccagcagaggagccacgtgaggagcctggaacgtgtcatcacaccaggagagcagctgcgagcctgagaacggagcctgagatgagtcatcacgcccaggcagaggacagagataatggacctgggagacgccctctgccaggcagggcagctgccggagggagaacaatggacgagataagacgccaccctgataagggcaacggacagcagagacccaccaagcaaaaatcagaagaacagctgcaggcttactataaaaagacactagaggaacgactttcagctggggcacttaacaccttcccccgagcattcaagcaggtaatggaaggccgggatataaagctagtaatcaatcagacagcgcaggactgcttcggatgcctggaatccataagccaaataagaacggcaacccgagataaaaaggacacggtgacccgggagaaacacccaaagaaaccttttcagaagtggatgaaggacagagcaatcaaaaaaggtaattatcttcggttccagcgtttattttatcttgatagagggaaactggctaaaatcattttagatgatattgaatgcttgtcttgtgacataccactcagtgaaatttattcggtttttaaaacaagatgggaaacaactggtagctttaaaagccttggggactttaaaacttacgggaaggctgacaacactgccttcagagaattaattacggctaaagaaattgagaaaaatgtgcaggaaatgagcaaaggctcggctcccggtccagacgggattactcttggggacgtcgtaaagatggatcccgagttttcccggaccatggagattttcaatttatggttaacaactggtaaaatcccggacatggtgagggggtgcagaaccgttttgattccaaaatcatcaaagccggatcgtttgaaagacattaataactggagacctatcacgatcggttccatcttgctgagactgttctccaggattgtaacagctaggctgagcaaagcgtgccccctgaacccaaggcaaagaggctttatcagagcggcgggatgctctgaaaacttaaaactcctgcaaactataatttggtcggccaaaagagaacacagaccactgggtgttgtattcgtggacatcgccaaggcttttgacaccgtaagccaccagcacatcattcatgctttgcagcaaagagaggtggatccccacatcgtcggtctggtgagcaatatgtacgagaacatcagtacgtatatcaccacaaagaggaacacacacacagacaaaatccagatccgggttggagtaaagcagggtgacccgatgtcgccccttttatttaacctggcaatggaccctctattatgcaagctggaagagagtggcaaaggataccaccgaggacagagcagcatcacagcgatggcatttgcagacgatctggttttgctgagcgactcctgggaaaatatgaatacaaatattagcatactggagaccttctgcaatctgaccggactcaaaacacaggggcaaaagtgccacggcttttacatcaagccgacaaaggactcttacaccatcaatgactgcgctgcctggactatcaacggcacacccctgaacatgatcgaccccggcgaatctgagaaatacctcggcctgcagtttgacccgtggattggaatagcaaggtccggtctctccacaaaactagatttttggcttcagcggatcgatcaagcaccacttaaacctctgcagaaaactgatattctcaaaacatacaccatccctcggctgatctacatagctgaccactcagaagtgaaaactgcactactcgaaacccttgaccagaagatccggacagcggtcaaggaatggcttcacctacctccgtgcacctgcgatgccatcctgtactcgagcacgagagacggcggtttgggcatcaccaaattggcaggactgatccccagcgtgcaggcccgtagactgcatcggatcgcacagtcatctgacgatacgatgaaatgcttcatggaaaaagagaaaatggaacagctgcataagaaattgtggattcaagctggaggggacagagagaacataccctcgatttgggaagcaccaccgtcgagtgaaccaccaaacaacgtgagcacaaattcggaatgggaagcaccgacccagaaagataaatttccaaagccttgcaattggaggaaaaacgaattcaaaaaatggaccaaattggcatcccaaggccgcggaattgtaaattttgaaagagacaaaattagtaaccattggatccaatactacagacgcatacctcacaggaaactcctcactgcactacaactcagggccaacgtttaccccacgagagaatttctagccaggggtagacaagaccaatacatcaaggcgtgtaggcactgcgatgcggacattgaatcctgcgcccacatcatcggcaactgcccagtgacacaggacgcccgaatcaagaggcacaattacatctgcgaactgcttctcgaggaggcgaagaagaaggactgggtagtgttcaaggaaccgcacataagggattccaacaaggaactgtacaaacctgacctgatatttgtgaaggatgcccgtgcacttgtcgtggatgtgacagtacggtatgaagcagccaaatcatcgctggaggaagccgctgcagagaaagtgagaaagtacaaacacctggaaacggaagtaagacatctcacgaatgcaaaggacgttacttttgtgggctttcccctaggagcgcgggggaaatggcaccaagataactttaaacttttgactgagcttggcctctccaaatcgaggcaagtgaaaatggcagagactttttccacagtagcgctcttttcatctgtggacattgtacatatgtttgccagtagggccagaaaatctatggttatgtaaaccggtagacatgataagatacattgatgagtttggacaaaccacaactagaatgcagtgaaaaaaatgctttatttgtgaaatttgtgatgctattgctttatttgtaaccattataagctgcaataaacaagttaacaacaacaaaaaaaaaaaaaaaaaaaaaaaaaaaaaaacgttgactaaaaaaaaaaaaaaaaaaaaaaaaaaaaaaaaaaaaaaaaaaaaaaaaaaaaaaaaaaaaaaaaaaaaaa

SEQ ID NO: 10265 - DNA, 4195 bp, synthetic construct
  source 1..4195: mol_type = other DNA
ggtctagttacaactgggcatcgctgcagagatcgcacctcctcgtggtcccgctggtagcccttcgaagggtgactaagtcgatctctgccccaggtacggagccgttgggactcaccagtccaacgtaactcctgcctaaattcggtgaaacaaattcctcggtaaaaagccccatggcccctaagaagaaaagaaaggtgcccacactgctgggcttccacaccgccagcggcaagaaggtgaagatcgccaaggaatccctggataaggtgaaaaacctgttcgacgagaaggagcagggcggaagcggaggcggcctgtttgtgcctgaagaggggagcagcgagaaggagagcgaggacgcgccaaaaacatctcctccgacgcctgggaaacatggtttggaacagactggggaggaaaaagtgatggtgactgttcctgacaaaaatccaccttgtccttgctgtggtacccgggtaaactctgtgttgaatctgattgaacatctgaaagtgtcacacgggaaaaggggggtttgttttcggtgtgcaaaatgtggaaaggaaaatagtaactatcacagtgttgtttgtcattttccaaaatgcaggggtccagagacggagaaagccccagctggggagtggatttgtgaggtatgcaacagagattttacaaccaaaattggcctgggacaacacaagagattggcacacccagcagtgagaaatcaggaaaggatcgttgcttcccaaccgaaagaaacatcaaatagaggtgctcacaaaaggtgctggacaaaggaggaggaagaattactaataagactggaggctcagttcgagggaaacaaaaatattaataagcttattgcagaacacataaccaccaaaacagctaagcagatcagtgacaaaaggcgattgctgtccagaaagccagcagaggagccacgtgaggagcctggaacgtgtcatcacaccaggagagcagctgcgagcctgagaacggagcctgagatgagtcatcacgcccaggcagaggacagagataatggacctgggagacgccctctgccaggcagggcagctgccggagggagaacaatggacgagataagacgccaccctgataagggcaacggacagcagagacccaccaagcaaaaatcagaagaacagctgcaggcttactataaaaagacactagaggaacgactttcagctggggcacttaacaccttcccccgagcattcaagcaggtaatggaaggccgggatataaagctagtaatcaatcagacagcgcaggactgcttcggatgcctggaatccataagccaaataagaacggcaacccgagataaaaaggacacggtgacccgggagaaacacccaaagaaaccttttcagaagtggatgaaggacagagcaatcaaaaaaggtaattatcttcggttccagcgtttattttatcttgatagagggaaactggctaaaatcattttagatgatattgaatgcttgtcttgtgacataccactcagtgaaatttattcggtttttaaaacaagatgggaaacaactggtagctttaaaagccttggggactttaaaacttacgggaaggctgacaacactgccttcagagaattaattacggctaaagaaattgagaaaaatgtgcaggaaatgagcaaaggctcggctcccggtccagacgggattactcttggggacgtcgtaaagatggatcccgagttttcccggaccatggagattttcaatttatggttaacaactggtaaaatcccggacatggtgagggggtgcagaaccgttttgattccaaaatcatcaaagccggatcgtttgaaagacattaataactggagacctatcacgatcggttccatcttgctgagactgttctccaggattgtaacagctaggctgagcaaagcgtgccccctgaacccaaggcaaagaggctttatcagagcggcgggatgctctgaaaacttaaaactcctgcaaactataatttggtcggccaaaagagaacacagaccactgggtgttgtattcgtggacatcgccaaggcttttgacaccgtaagccaccagcacatcattcatgctttgcagcaaagagaggtggatccccacatcgtcggtctggtgagcaatatgtacgagaacatcagtacgtatatcaccacaaagaggaacacacacacagacaaaatccagatccgggttggagtaaagcagggtgacccgatgtcgccccttttatttaacctggcaatggaccctctattatgcaagctggaagagagtggcaaaggataccaccgaggacagagcagcatcacagcgatggcatttgcagacgatctggttttgctgagcgactcctgggaaaatatgaatacaaatattagcatactggagaccttctgcaatctgaccggactcaaaacacaggggcaaaagtgccacggcttttacatcaagccgacaaaggactcttacaccatcaatgactgcgctgcctggactatcaacggcacacccctgaacatgatcgaccccggcgaatctgagaaatacctcggcctgcagtttgacccgtggattggaatagcaaggtccggtctctccacaaaactagatttttggcttcagcggatcgatcaagcaccacttaaacctctgcagaaaactgatattctcaaaacatacaccatccctcggctgatctacatagctgaccactcagaagtgaaaactgcactactcgaaacccttgaccagaagatccggacagcggtcaaggaatggcttcacctacctccgtgcacctgcgatgccatcctgtactcgagcacgagagacggcggtttgggcatcaccaaattggcaggactgatccccagcgtgcaggcccgtagactgcatcggatcgcacagtcatctgacgatacgatgaaatgcttcatggaaaaagagaaaatggaacagctgcataagaaattgtggattcaagctggaggggacagagagaacataccctcgatttgggaagcaccaccgtcgagtgaaccaccaaacaacgtgagcacaaattcggaatgggaagcaccgacccagaaagataaatttccaaagccttgcaattggaggaaaaacgaattcaaaaaatggaccaaattggcatcccaaggccgcggaattgtaaattttgaaagagacaaaattagtaaccattggatccaatactacagacgcatacctcacaggaaactcctcactgcactacaactcagggccaacgtttaccccacgagagaatttctagccaggggtagacaagaccaatacatcaaggcgtgtaggcactgcgatgcggacattgaatcctgcgcccacatcatcggcaactgcccagtgacacaggacgcccgaatcaagaggcacaattacatctgcgaactgcttctcgaggaggcgaagaagaaggactgggtagtgttcaaggaaccgcacataagggattccaacaaggaactgtacaaacctgacctgatatttgtgaaggatgcccgtgcacttgtcgtggatgtgacagtacggtatgaagcagccaaatcatcgctggaggaagccgctgcagagaaagtgagaaagtacaaacacctggaaacggaagtaagacatctcacgaatgcaaaggacgttacttttgtgggctttcccctaggagcgcgggggaaatggcaccaagataactttaaacttttgactgagcttggcctctccaaatcgaggcaagtgaaaatggcagagactttttccacagtagcgctcttttcatctgtggacattgtacatatgtttgccagtagggccagaaaatctatggttatgtaaaccggtagacatgataagatacattgatgagtttggacaaaccacaactagaatgcagtgaaaaaaatgctttatttgtgaaatttgtgatgctattgctttatttgtaaccattataagctgcaataaacaagttaacaacaacaaaaaaaaaaaaaaaaaaaaaaaaaaaaaaacgttgactaaaaaaaaaaaaaaaaaaaaaaaaaaaaaaaaaaaaaaaaaaaaaaaaaaaaaaaaaaaaaaaaaaaaaa

SEQ ID NO: 10266 - DNA, 5155 bp, synthetic construct
  source 1..5155: mol_type = other DNA
ggtctagttacaactgggcatcgctgcagagatcgcacctcctcgtggtcccgctggtagcccttcgaagggtgactaagtcgatctctgccccaggtacggagccgttgggactcaccagtccaacgtaactcctgcctaaattcggtgaaacaaattcctcggtaaaaagccccatggcccctaagaagaagcggaaggtgggcatccacggcgtgcccgccgctgccatgcagatgcaactggaagctaatgctgataccagcgtggaagaggaaagcttcggcccccagcctattagcagactggaacagtgcggcatcaacgccaacgacgtgaagaaactggaagaggcaggcttccatacagtggaagctgtggcttacgcccctaagaaggaactgatcaacatcaagggcatcagcgaggccaaggccgataagatcctggccgaggccgccaaactggtgccaatgggctttaccaccgagacagagttccaccagaggcggagcgagatcatccagatcacaaccggctcaaaggaactcgacaagctgctgcagggcggcatcgaaaccggcagcatcaccgagatgttcggcgagtttcgcaccggcaaaacccagatttgccacaccctggccgtgacatgccagctgcctatcgatagaggtggaggcgagggcaaggccatgtacatcgacaccgagggcaccttcagacctgagcggctgctggccgttgctgaaagatacggcctgagcggatctgatgtgctggacaacgtggcctacgccagagccttcaacaccgaccaccaaacacagctgctctaccaggcctctgccatgatggtggaatctcggtacgccctgctgatcgtggatagcgccacagccctgtatagaaccgactacagcggcagaggagaactgtccgccagacagatgcacctggccagattcctgcggatgctgctgagactggctgacgagttcggcgtggccgtggtgatcaccaaccaggtggtcgcccaggtggacggcgccgctatgtttgccgctgaccccaagaaacctatcggcggcaacatcatcgcccacgccagcacaacaagactgtacctgagaaagggccggggagaaaccagaatctgtaaaatctacgacagcccttgcctgcccgaggctgaggccatgttcgccatcaatgccgacggcgtgggagatgccaaggacggcggctccggcagcgaaacccctggcacatctgagtctctgtttgtgcctgaagaggggagcagcgagaaggagagcgaggacgcgccaaaaacatctcctccgacgcctgggaaacatggtttggaacagactggggaggaaaaagtgatggtgactgttcctgacaaaaatccaccttgtccttgctgtggtacccgggtaaactctgtgttgaatctgattgaacatctgaaagtgtcacacgggaaaaggggggtttgttttcggtgtgcaaaatgtggaaaggaaaatagtaactatcacagtgttgtttgtcattttccaaaatgcaggggtccagagacggagaaagccccagctggggagtggatttgtgaggtatgcaacagagattttacaaccaaaattggcctgggacaacacaagagattggcacacccagcagtgagaaatcaggaaaggatcgttgcttcccaaccgaaagaaacatcaaatagaggtgctcacaaaaggtgctggacaaaggaggaggaagaattactaataagactggaggctcagttcgagggaaacaaaaatattaataagcttattgcagaacacataaccaccaaaacagctaagcagatcagtgacaaaaggcgattgctgtccagaaagccagcagaggagccacgtgaggagcctggaacgtgtcatcacaccaggagagcagctgcgagcctgagaacggagcctgagatgagtcatcacgcccaggcagaggacagagataatggacctgggagacgccctctgccaggcagggcagctgccggagggagaacaatggacgagataagacgccaccctgataagggcaacggacagcagagacccaccaagcaaaaatcagaagaacagctgcaggcttactataaaaagacactagaggaacgactttcagctggggcacttaacaccttcccccgagcattcaagcaggtaatggaaggccgggatataaagctagtaatcaatcagacagcgcaggactgcttcggatgcctggaatccataagccaaataagaacggcaacccgagataaaaaggacacggtgacccgggagaaacacccaaagaaaccttttcagaagtggatgaaggacagagcaatcaaaaaaggtaattatcttcggttccagcgtttattttatcttgatagagggaaactggctaaaatcattttagatgatattgaatgcttgtcttgtgacataccactcagtgaaatttattcggtttttaaaacaagatgggaaacaactggtagctttaaaagccttggggactttaaaacttacgggaaggctgacaacactgccttcagagaattaattacggctaaagaaattgagaaaaatgtgcaggaaatgagcaaaggctcggctcccggtccagacgggattactcttggggacgtcgtaaagatggatcccgagttttcccggaccatggagattttcaatttatggttaacaactggtaaaatcccggacatggtgagggggtgcagaaccgttttgattccaaaatcatcaaagccggatcgtttgaaagacattaataactggagacctatcacgatcggttccatcttgctgagactgttctccaggattgtaacagctaggctgagcaaagcgtgccccctgaacccaaggcaaagaggctttatcagagcggcgggatgctctgaaaacttaaaactcctgcaaactataatttggtcggccaaaagagaacacagaccactgggtgttgtattcgtggacatcgccaaggcttttgacaccgtaagccaccagcacatcattcatgctttgcagcaaagagaggtggatccccacatcgtcggtctggtgagcaatatgtacgagaacatcagtacgtatatcaccacaaagaggaacacacacacagacaaaatccagatccgggttggagtaaagcagggtgacccgatgtcgccccttttatttaacctggcaatggaccctctattatgcaagctggaagagagtggcaaaggataccaccgaggacagagcagcatcacagcgatggcatttgcagacgatctggttttgctgagcgactcctgggaaaatatgaatacaaatattagcatactggagaccttctgcaatctgaccggactcaaaacacaggggcaaaagtgccacggcttttacatcaagccgacaaaggactcttacaccatcaatgactgcgctgcctggactatcaacggcacacccctgaacatgatcgaccccggcgaatctgagaaatacctcggcctgcagtttgacccgtggattggaatagcaaggtccggtctctccacaaaactagatttttggcttcagcggatcgatcaagcaccacttaaacctctgcagaaaactgatattctcaaaacatacaccatccctcggctgatctacatagctgaccactcagaagtgaaaactgcactactcgaaacccttgaccagaagatccggacagcggtcaaggaatggcttcacctacctccgtgcacctgcgatgccatcctgtactcgagcacgagagacggcggtttgggcatcaccaaattggcaggactgatccccagcgtgcaggcccgtagactgcatcggatcgcacagtcatctgacgatacgatgaaatgcttcatggaaaaagagaaaatggaacagctgcataagaaattgtggattcaagctggaggggacagagagaacataccctcgatttgggaagcaccaccgtcgagtgaaccaccaaacaacgtgagcacaaattcggaatgggaagcaccgacccagaaagataaatttccaaagccttgcaattggaggaaaaacgaattcaaaaaatggaccaaattggcatcccaaggccgcggaattgtaaattttgaaagagacaaaattagtaaccattggatccaatactacagacgcatacctcacaggaaactcctcactgcactacaactcagggccaacgtttaccccacgagagaatttctagccaggggtagacaagaccaatacatcaaggcgtgtaggcactgcgatgcggacattgaatcctgcgcccacatcatcggcaactgcccagtgacacaggacgcccgaatcaagaggcacaattacatctgcgaactgcttctcgaggaggcgaagaagaaggactgggtagtgttcaaggaaccgcacataagggattccaacaaggaactgtacaaacctgacctgatatttgtgaaggatgcccgtgcacttgtcgtggatgtgacagtacggtatgaagcagccaaatcatcgctggaggaagccgctgcagagaaagtgagaaagtacaaacacctggaaacggaagtaagacatctcacgaatgcaaaggacgttacttttgtgggctttcccctaggagcgcgggggaaatggcaccaagataactttaaacttttgactgagcttggcctctccaaatcgaggcaagtgaaaatggcagagactttttccacagtagcgctcttttcatctgtggacattgtacatatgtttgccagtagggccagaaaatctatggttatgtaaaccggtagacatgataagatacattgatgagtttggacaaaccacaactagaatgcagtgaaaaaaatgctttatttgtgaaatttgtgatgctattgctttatttgtaaccattataagctgcaataaacaagttaacaacaacaaaaaaaaaaaaaaaaaaaaaaaaaaaaaaacgttgactaaaaaaaaaaaaaaaaaaaaaaaaaaaaaaaaaaaaaaaaaaaaaaaaaaaaaaaaaaaaaaaaaaaaaa

SEQ ID NO: 10267 - DNA, 5014 bp, synthetic construct
  source 1..5014: mol_type = other DNA
ggtctagttacaactgggcatcgctgcagagatcgcacctcctcgtggtcccgctggtagcccttcgaagggtgactaagtcgatctctgccccaggtacggagccgttgggactcaccagtccaacgtaactcctgcctaaattcggtgaaacaaattcctcggtaaaaagccccatggcccctaagaaaaagcggaaggtgaatatcagcggctctagctgcggcagccccaacagcgccgacaccagcagcgacttcaaggacctgtggaccaagctgaaggaatgccacgaccgggaagtgcagggactccaggtgaaggtcaccaaactcaagcaagaaagaatcctggacgcccagagactggaagaattcttcaccaagaaccagcagctgagagagcagcagaaagtgctgcacgagacaatcaaggttctggaagatagactgcgggccggcctgtgcgacagatgcgccgtgaccgaggaacacatgcgcaaaaagcagcaggagttcgagaacattagacagcaaaatctgaaattgatcacagagctgatgaacgagagaaacacactgcaggaggagaacaagaagctgagcgagcagctgcaacagaagatcgagaatgatcagcaacaccaggccgctgagctggaatgtgaagaggacgtgatccccgacagcccaatcacagctttcagcttttctggcgtgaacagactgaggcggaaggaaaacccccacgtgcggtacatcgagcagacccataccaagctggaacacagcgtgtgtgccaacgagatgagaaaggtgtccaagtcctccacccatccccagcacaaccctaacgaaaatgagatcctggtggctgatacctacgaccagtctcagagccctatggccaaggcccacggcaccagctcttatacccctgataagagctccttcaacctggccaccgtggtggccgagacactgggcctgggcgtgcaggaggaaagcgagacacagggcccaatgagccctctgggagatgagctgtaccactgcctggaaggcaaccacaagaaacagccttttgagtccggctccgagactcctggaacaagcgagagcgctacacctgagggcagcctgtttgtgcctgaagaggggagcagcgagaaggagagcgaggacgcgccaaaaacatctcctccgacgcctgggaaacatggtttggaacagactggggaggaaaaagtgatggtgactgttcctgacaaaaatccaccttgtccttgctgtggtacccgggtaaactctgtgttgaatctgattgaacatctgaaagtgtcacacgggaaaaggggggtttgttttcggtgtgcaaaatgtggaaaggaaaatagtaactatcacagtgttgtttgtcattttccaaaatgcaggggtccagagacggagaaagccccagctggggagtggatttgtgaggtatgcaacagagattttacaaccaaaattggcctgggacaacacaagagattggcacacccagcagtgagaaatcaggaaaggatcgttgcttcccaaccgaaagaaacatcaaatagaggtgctcacaaaaggtgctggacaaaggaggaggaagaattactaataagactggaggctcagttcgagggaaacaaaaatattaataagcttattgcagaacacataaccaccaaaacagctaagcagatcagtgacaaaaggcgattgctgtccagaaagccagcagaggagccacgtgaggagcctggaacgtgtcatcacaccaggagagcagctgcgagcctgagaacggagcctgagatgagtcatcacgcccaggcagaggacagagataatggacctgggagacgccctctgccaggcagggcagctgccggagggagaacaatggacgagataagacgccaccctgataagggcaacggacagcagagacccaccaagcaaaaatcagaagaacagctgcaggcttactataaaaagacactagaggaacgactttcagctggggcacttaacaccttcccccgagcattcaagcaggtaatggaaggccgggatataaagctagtaatcaatcagacagcgcaggactgcttcggatgcctggaatccataagccaaataagaacggcaacccgagataaaaaggacacggtgacccgggagaaacacccaaagaaaccttttcagaagtggatgaaggacagagcaatcaaaaaaggtaattatcttcggttccagcgtttattttatcttgatagagggaaactggctaaaatcattttagatgatattgaatgcttgtcttgtgacataccactcagtgaaatttattcggtttttaaaacaagatgggaaacaactggtagctttaaaagccttggggactttaaaacttacgggaaggctgacaacactgccttcagagaattaattacggctaaagaaattgagaaaaatgtgcaggaaatgagcaaaggctcggctcccggtccagacgggattactcttggggacgtcgtaaagatggatcccgagttttcccggaccatggagattttcaatttatggttaacaactggtaaaatcccggacatggtgagggggtgcagaaccgttttgattccaaaatcatcaaagccggatcgtttgaaagacattaataactggagacctatcacgatcggttccatcttgctgagactgttctccaggattgtaacagctaggctgagcaaagcgtgccccctgaacccaaggcaaagaggctttatcagagcggcgggatgctctgaaaacttaaaactcctgcaaactataatttggtcggccaaaagagaacacagaccactgggtgttgtattcgtggacatcgccaaggcttttgacaccgtaagccaccagcacatcattcatgctttgcagcaaagagaggtggatccccacatcgtcggtctggtgagcaatatgtacgagaacatcagtacgtatatcaccacaaagaggaacacacacacagacaaaatccagatccgggttggagtaaagcagggtgacccgatgtcgccccttttatttaacctggcaatggaccctctattatgcaagctggaagagagtggcaaaggataccaccgaggacagagcagcatcacagcgatggcatttgcagacgatctggttttgctgagcgactcctgggaaaatatgaatacaaatattagcatactggagaccttctgcaatctgaccggactcaaaacacaggggcaaaagtgccacggcttttacatcaagccgacaaaggactcttacaccatcaatgactgcgctgcctggactatcaacggcacacccctgaacatgatcgaccccggcgaatctgagaaatacctcggcctgcagtttgacccgtggattggaatagcaaggtccggtctctccacaaaactagatttttggcttcagcggatcgatcaagcaccacttaaacctctgcagaaaactgatattctcaaaacatacaccatccctcggctgatctacatagctgaccactcagaagtgaaaactgcactactcgaaacccttgaccagaagatccggacagcggtcaaggaatggcttcacctacctccgtgcacctgcgatgccatcctgtactcgagcacgagagacggcggtttgggcatcaccaaattggcaggactgatccccagcgtgcaggcccgtagactgcatcggatcgcacagtcatctgacgatacgatgaaatgcttcatggaaaaagagaaaatggaacagctgcataagaaattgtggattcaagctggaggggacagagagaacataccctcgatttgggaagcaccaccgtcgagtgaaccaccaaacaacgtgagcacaaattcggaatgggaagcaccgacccagaaagataaatttccaaagccttgcaattggaggaaaaacgaattcaaaaaatggaccaaattggcatcccaaggccgcggaattgtaaattttgaaagagacaaaattagtaaccattggatccaatactacagacgcatacctcacaggaaactcctcactgcactacaactcagggccaacgtttaccccacgagagaatttctagccaggggtagacaagaccaatacatcaaggcgtgtaggcactgcgatgcggacattgaatcctgcgcccacatcatcggcaactgcccagtgacacaggacgcccgaatcaagaggcacaattacatctgcgaactgcttctcgaggaggcgaagaagaaggactgggtagtgttcaaggaaccgcacataagggattccaacaaggaactgtacaaacctgacctgatatttgtgaaggatgcccgtgcacttgtcgtggatgtgacagtacggtatgaagcagccaaatcatcgctggaggaagccgctgcagagaaagtgagaaagtacaaacacctggaaacggaagtaagacatctcacgaatgcaaaggacgttacttttgtgggctttcccctaggagcgcgggggaaatggcaccaagataactttaaacttttgactgagcttggcctctccaaatcgaggcaagtgaaaatggcagagactttttccacagtagcgctcttttcatctgtggacattgtacatatgtttgccagtagggccagaaaatctatggttatgtaaaccggtagacatgataagatacattgatgagtttggacaaaccacaactagaatgcagtgaaaaaaatgctttatttgtgaaatttgtgatgctattgctttatttgtaaccattataagctgcaataaacaagttaacaacaacaaaaaaaaaaaaaaaaaaaaaaaaaaaaaaacgttgactaaaaaaaaaaaaaaaaaaaaaaaaaaaaaaaaaaaaaaaaaaaaaaaaaaaaaaaaaaaaaaaaaaaaaa

SEQ ID NO: 10268-10269 - skipped (2 entries)

SEQ ID NO: 10270 - DNA, 4730 bp, synthetic construct
  source 1..4730: mol_type = other DNA
ggtctagttacaactgggcatcgctgcagagatcgcacctcctcgtggtcccgctggtagcccttcgaagggtgactaagtcgatctctgccccaggtacggagccgttgggactcaccagtccaacgtaactcctgcctaaattcggtgaaacaaattcctcggtaaaaagccccatggcttcttgcccgaaacctggccccccggtttcagcaggggcaatgagtttggaaagtggactgaccacccactccgttctcgccatcgaacgtggtcccaattcgttggcaaattccggatcagactttgggggggggggtctggggctaccgttacgcctattgagggtatcggtcggcactcagacctcccgctccgactgggtagacctggtgtcctggagccacccaggacccacgtctaagtcccagcaggttgacctggtgtctttatttcctaaacaccgggttgacctgttatccaaaaacgaccaggtagacctggtggctcaatttttaccatctaaatttccccccaatttggcagaaaatgatttggctttgctggtgaacttagagttctacagatcggatttgcatgtgtatgagtgtgttcattttgctgcacattgggagggattaagtggtttgcctgaggtgtatgaacaacttgcaccacaaccgtgtgtgggagaaactttacattctagcctcccacgagacagtgaactgtttgtgcctgaagaggggagcagcgagaaggagagcgaggacgcgccaaaaacatctcctccgacgcctgggaaacatggtttggaacagactggggaggaaaaagtgatggtgactgttcctgacaaaaatccaccttgtccttgctgtggtacccgggtaaactctgtgttgaatctgattgaacatctgaaagtgtcacacgggaaaaggggggtttgttttcggtgtgcaaaatgtggaaaggaaaatagtaactatcacagtgttgtttgtcattttccaaaatgcaggggtccagagacggagaaagccccagctggggagtggatttgtgaggtatgcaacagagattttacaaccaaaattggcctgggacaacacaagagattggcacacccagcagtgagaaatcaggaaaggatcgttgcttcccaaccgaaagaaacatcaaatagaggtgctcacaaaaggtgctggacaaaggaggaggaagaattactaataagactggaggctcagttcgagggaaacaaaaatattaataagcttattgcagaacacataaccaccaaaacagctaagcagatcagtgacaaaaggcgattgctgtccagaaagccagcagaggagccacgtgaggagcctggaacgtgtcatcacaccaggagagcagctgcgagcctgagaacggagcctgagatgagtcatcacgcccaggcagaggacagagataatggacctgggagacgccctctgccaggcagggcagctgccggagggagaacaatggacgagataagacgccaccctgataagggcaacggacagcagagacccaccaagcaaaaatcagaagaacagctgcaggcttactataaaaagacactagaggaacgactttcagctggggcacttaacaccttcccccgagcattcaagcaggtaatggaaggccgggatataaagctagtaatcaatcagacagcgcaggactgcttcggatgcctggaatccataagccaaataagaacggcaacccgagataaaaaggacacggtgacccgggagaaacacccaaagaaaccttttcagaagtggatgaaggacagagcaatcaaaaaaggtaattatcttcggttccagcgtttattttatcttgatagagggaaactggctaaaatcattttagatgatattgaatgcttgtcttgtgacataccactcagtgaaatttattcggtttttaaaacaagatgggaaacaactggtagctttaaaagccttggggactttaaaacttacgggaaggctgacaacactgccttcagagaattaattacggctaaagaaattgagaaaaatgtgcaggaaatgagcaaaggctcggctcccggtccagacgggattactcttggggacgtcgtaaagatggatcccgagttttcccggaccatggagattttcaatttatggttaacaactggtaaaatcccggacatggtgagggggtgcagaaccgttttgattcaatgcctggcacacaaacagattcccagagcatggaggaaaactaagataattgccatcttaaaacctggtaaagatgcctccaatgccaggaactatcgaccaatctccctcttatgtcatctatataaagtctatgagaggatgctattaaatcgactaggacctgttatcgaacccaagcttattgcacaacaagcaggtttcagaccagggaaaaactgtacaggtcaaattcttcatctgactgaacatatcgaggaaggctatgagaaaggctgcattacgggaacagtctttgtggaccttacggcagcctatgacacggtgcaacatagaaaaatgctgcataaagtctaccatatcacccgggactttgactttacaaaaactgtccagaccctcttagaaaaccgcagcttctatgtggagtttcagggccagaaaagcagatggaggaggcaaaagaatggtttaccccaaggcagcgttcttgcaccaaccttatttaacatcttcacgaacgatcagccacaaccaccactcacaaagagctttatatatgctgatgaccttggccttacaacacaagcaaaagattttgaaacagttgaaaagcaactcaccaatgccttgaaagatctctccagctactacaaagagaaccacctgaagcctaaccctgccaagacacaagtgtgtgctttccacctacgtaaccgcgaagccaacaggaaactgaaagttacttgggaaggccaagagctcgaacactgtttccatcctaaataccttggtgtcacccagtttgacccgtggattggaatagcaaggtccggtctctccacaaaactagatttttggcttcagcggatcgatcaagcaccacttaaacctctgcagaaaactgatattctcaaaacatacaccatccctcggctgatctacatagctgaccactcagaagtgaaaactgcactactcgaaacccttgaccagaagatccggacagcggtcaaggaatggcttcacctacctccgtgcacctgcgatgccatcctgtactcgagcacgagagacggcggtttgggcatcaccaaattggcaggactgatccccagcgtgcaggcccgtagactgcatcggatcgcacagtcatctgacgatacgatgaaatgcttcatggaaaaagagaaaatggaacagctgcataagaaattgtggattcaagctggaggggacagagagaacataccctcgatttgggaagcaccaccgtcgagtgaaccaccaaacaacgtgagcacaaattcggaatgggaagcaccgacccagaaagataaatttccaaagccttgcaattggaggaaaaacgaattcaaaaaatggaccaaattggcatcccaaggccgcggaattgtaaattttgaaagagacaaaattagtaaccattggatccaatactacagacgcatacctcacaggaaactcctcactgcactacaactcagggccaacgtttaccccacgagagaatttctagccaggggtagacaagaccaatacatcaaggcgtgtaggcactgcgatgcggacattgaatcctgcgcccacatcatcggcaactgcccagtgacacaggacgcccgaatcaagaggcacaattacatctgcgaactgcttctcgaggaggcgaagaagaaggactgggtagtgttcaaggaaccgcacataagggattccaacaaggaactgtacaaacctgacctgatatttgtgaaggatgcccgtgcacttgtcgtggatgtgacagtacggtatgaagcagccaaatcatcgctggaggaagccgctgcagagaaagtgagaaagtacaaacacctggaaacggaagtaagacatctcacgaatgcaaaggacgttacttttgtgggctttcccctaggagcgcgggggaaatggcaccaagataactttaaacttttgactgagcttggcctctccaaatcgaggcaagtgaaaatggcagagactttttccacagtagcgctcttttcatctgtggacattgtacatatgtttgccagtagggccagaaaatctatggttatgtgataataggctgccttctgcggggcttgccttctggccatgcccttcttctctcccttgcacctgtacctcttggtctttgaataaagcctgagtaggaaggaccggtagacatgataagatacattgatgagtttggacaaaccacaactagaatgcagtgaaaaaaatgctttatttgtgaaatttgtgatgctattgctttatttgtaaccattataagctgcaataaacaagttaacaacaacaaaaaaaaaaaaaaaaaaaaaaaaaaaaaaacgttgactaaaaaaaaaaaaaaaaaaaaaaaaaaaaaaaaaaaaaaaaaaaaaaaaaaaaaaaaaaaaaaaaaaaaaa

SEQ ID NO: 10271 - DNA, 5957 bp, synthetic construct
  source 1..5957: mol_type = other DNA
ggtctagttacaactgggcatcgctgcagagatcgcacctcctcgtggtcccgctggtagcccttcgaagggtgactaagtcgatctctgccccaggtacggagccgttgggactcaccagtccaacgtaactcctgcctaaattcggtgaaacaaattcctcggtaaaaagccccatggcttcttgcccgaaacctggccccccggtttcagcaggggcaatgagtttggaaagtggactgaccacccactccgttctcgccatcgaacgtggtcccaattcgttggcaaattccggatcagactttgggggggggggtctggggctaccgttacgcctattgagggtatcggtcggcactcagacctcccgctccgactgggtagacctggtgtcctggagccacccaggacccacgtctaagtcccagcaggttgacctggtgtctttatttcctaaacaccgggttgacctgttatccaaaaacgaccaggtagacctggtggctcaatttttaccatctaaatttccccccaatttggcagaaaatgatttggctttgctggtgaacttagagttctacagatcggatttgcatgtgtatgagtgtgttcattttgctgcacattgggagggattaagtggtttgcctgaggtgtatgaacaacttgcaccacaaccgtgtgtgggagaaactttacattctagcctcccacgagacagtgaactgtttgtgcctgaagaggggagcagcgagaaggagagcgaggacgcgccaaaaacatctcctccgacgcctgggaaacatggtttggaacagactggggaggaaaaagtgatggtgactgttcctgacaaaaatccaccttgtccttgctgtggtacccgggtaaactctgtgttgaatctgattgaacatctgaaagtgtcacacgggaaaaggggggtttgttttcggtgtgcaaaatgtggaaaggaaaatagtaactatcacagtgttgtttgtcattttccaaaatgcaggggtccagagacggagaaagccccagctggggagtggatttgtgaggtatgcaacagagattttacaaccaaaattggcctgggacaacacaagagattggcacacccagcagtgagaaatcaggaaaggatcgttgcttcccaaccgaaagaaacatcaaatagaggtgctcacaaaaggtgctggacaaaggaggaggaagaattactaataagactggaggctcagttcgagggaaacaaaaatattaataagcttattgcagaacacataaccaccaaaacagctaagcagatcagtgacaaaaggcgattgctgtccagaaagccagcagaggagccacgtgaggagcctggaacgtgtcatcacaccaggagagcagctgcgagcctgagaacggagcctgagatgagtcatcacgcccaggcagaggacagagataatggacctgggagacgccctctgccaggcagggcagctgccggagggagaacaatggacgagataagacgccaccctgataagggcaacggacagcagagacccaccaagcaaaaatcagaagaacagctgcaggcttactataaaaagacactagaggaacgactttcagctggggcacttaacaccttcccccgagcattcaagcaggtaatggaaggccgggatataaagctagtaatcaatcagacagcgcaggactgcttcggatgcctggaatccataagccaaataagaacggcaacccgagataaaaaggacacggtgacccgggagaaacacccaaagaaaccttttcagaagtggatgaaggacagagcaatcaaaaaaggtaattatcttcggttccagcgtttattttatcttgatagagggaaactggctaaaatcattttagatgatattgaatgcttgtcttgtgacataccactcagtgaaatttattcggtttttaaaacaagatgggaaacaactggtagctttaaaagccttggggactttaaaacttacgggaaggctgacaacactgccttcagagaattaattacggctaaagaaattgagaaaaatgtgcaggaaatgagcaaaggctcggctcccggtccagacgggattactcttggggacgtcgtaaagatggatcccgagttttcccggaccatggagattttcaatttatggttaacaactggtaaaatcccggacatggtgagggggtgcagaaccgttttgattaccctaaatatagaagatgagtatcggctacatgagacctcaaaagagccagatgtttctctagggtccacatggctgtctgattttcctcaggcctgggcggaaaccgggggcatgggactggcagttcgccaagctcctctgatcatacctctgaaagcaacctctacccccgtgtccataaaacaataccccatgtcacaagaagccagactggggatcaagccccacatacagagactgttggaccagggaatactggtaccctgccagtccccctggaacacgcccctgctacccgttaagaaaccagggactaatgattataggcctgtccaggatctgagagaagtcaacaagcgggtggaggacatccaccccaccgtgcccaacccttacaacctcttgagcgggctcccaccgtcccaccagtggtacactgtgcttgatttaaaggatgcctttttctgcctgagactccaccccaccagtcagcctctcttcgcctttgagtggagagatccagagatgggaatctcaggacaattgacctggaccagactcccacagggtttcaaaaacagtcccaccctgtttaatgaggcactgcacagagacctagcagacttccggatccagcacccagacttgatcctgctacagtacgtggatgacttactgctggccgccacttctgagctagactgccaacaaggtactcgggccctgttacaaaccctagggaacctcgggtatcgggcctcggccaagaaagcccaaatttgccagaaacaggtcaagtatctggggtatcttctaaaagagggtcagagatggctgactgaggccagaaaagagactgtgatggggcagcctactcctaagacccctcgacaactaagggagttcctagggaaggcaggcttctgtcgcctcttcatccctgggtttgcagaaatggcagcccccctgtaccctctcaccaaaccggggactctgtttaattggggcccagaccaacaaaaggcctatcaagaaatcaagcaagctcttctaactgccccagccctggggttgccagatttgactaagccctttgaactctttgtcgacgagaagcagggctacgccaaaggtgtcctaacgcaaaaactgggaccttggcgtcggccggtggcctacctgtccaaaaagctagacccagtagcagctgggtggcccccttgcctacggatggtagcagccattgccgtactgacaaaggatgcaggcaagctaaccatgggacagccactagtcattctggccccccatgcagtagaggcactagtcaaacaaccccccgaccgctggctttccaacgcccggatgactcactatcaggccttgcttttggacacggaccgggtccagttcggaccggtggtagccctgaacccggctacgctgctcccactgcctgaggaagggctgcaacacaactgccttgatatcctggccgaagcccacggaacccgacccgacctaacggaccagccgctcccagacgccgaccacacctggtacacggatggaagcagtctcttacaagagggacagcgtaaggcgggagctgcggtgaccaccgagaccgaggtaatctgggctaaagccctgccagccgggacatccgctcagcgggctgaactgatagcactcacccaggccctaaagatggcagaaggtaagaagctaaatgtttatactgatagccgttatgcttttgctactgcccatatccatggagaaatatacagaaggcgtgggtggctcacatcagaaggcaaagagatcaaaaataaagacgagatcttggccctactaaaagccctctttctgcccaaaagacttagcataatccattgtccaggacatcaaaagggacacagcgccgaggctagaggcaaccggatggctgaccaagcggcccgaaaggcagccatcacagagactccagacacctctaccctcctcatagaaaattcatcaccccagtttgacccgtggattggaatagcaaggtccggtctctccacaaaactagatttttggcttcagcggatcgatcaagcaccacttaaacctctgcagaaaactgatattctcaaaacatacaccatccctcggctgatctacatagctgaccactcagaagtgaaaactgcactactcgaaacccttgaccagaagatccggacagcggtcaaggaatggcttcacctacctccgtgcacctgcgatgccatcctgtactcgagcacgagagacggcggtttgggcatcaccaaattggcaggactgatccccagcgtgcaggcccgtagactgcatcggatcgcacagtcatctgacgatacgatgaaatgcttcatggaaaaagagaaaatggaacagctgcataagaaattgtggattcaagctggaggggacagagagaacataccctcgatttgggaagcaccaccgtcgagtgaaccaccaaacaacgtgagcacaaattcggaatgggaagcaccgacccagaaagataaatttccaaagccttgcaattggaggaaaaacgaattcaaaaaatggaccaaattggcatcccaaggccgcggaattgtaaattttgaaagagacaaaattagtaaccattggatccaatactacagacgcatacctcacaggaaactcctcactgcactacaactcagggccaacgtttaccccacgagagaatttctagccaggggtagacaagaccaatacatcaaggcgtgtaggcactgcgatgcggacattgaatcctgcgcccacatcatcggcaactgcccagtgacacaggacgcccgaatcaagaggcacaattacatctgcgaactgcttctcgaggaggcgaagaagaaggactgggtagtgttcaaggaaccgcacataagggattccaacaaggaactgtacaaacctgacctgatatttgtgaaggatgcccgtgcacttgtcgtggatgtgacagtacggtatgaagcagccaaatcatcgctggaggaagccgctgcagagaaagtgagaaagtacaaacacctggaaacggaagtaagacatctcacgaatgcaaaggacgttacttttgtgggctttcccctaggagcgcgggggaaatggcaccaagataactttaaacttttgactgagcttggcctctccaaatcgaggcaagtgaaaatggcagagactttttccacagtagcgctcttttcatctgtggacattgtacatatgtttgccagtagggccagaaaatctatggttatgtgataataggctgccttctgcggggcttgccttctggccatgcccttcttctctcccttgcacctgtacctcttggtctttgaataaagcctgagtaggaaggaccggtagacatgataagatacattgatgagtttggacaaaccacaactagaatgcagtgaaaaaaatgctttatttgtgaaatttgtgatgctattgctttatttgtaaccattataagctgcaataaacaagttaacaacaacaaaaaaaaaaaaaaaaaaaaaaaaaaaaaaacgttgactaaaaaaaaaaaaaaaaaaaaaaaaaaaaaaaaaaaaaaaaaaaaaaaaaaaaaaaaaaaaaaaaaaaaaa

SEQ ID NO: 10272 - DNA, 4676 bp, synthetic construct
  source 1..4676: mol_type = other DNA
ggtctagttacaactgggcatcgctgcagagatcgcacctcctcgtggtcccgctggtagcccttcgaagggtgactaagtcgatctctgccccaggtacggagccgttgggactcaccagtccaacgtaactcctgcctaaattcggtgaaacaaattcctcggtaaaaagccccatggcttcttgcccgaaacctggccccccggtttcagcaggggcaatgagtttggaaagtggactgaccacccactccgttctcgccatcgaacgtggtcccaattcgttggcaaattccggatcagactttgggggggggggtctggggctaccgttacgcctattgagggtatcggtcggcactcagacctcccgctccgactgggtagacctggtgtcctggagccacccaggacccacgtctaagtcccagcaggttgacctggtgtctttatttcctaaacaccgggttgacctgttatccaaaaacgaccaggtagacctggtggctcaatttttaccatctaaatttccccccaatttggcagaaaatgatttggctttgctggtgaacttagagttctacagatcggatttgcatgtgtatgagtgtgttcattttgctgcacattgggagggattaagtggtttgcctgaggtgtatgaacaacttgcaccacaaccgtgtgtgggagaaactttacattctagcctcccacgagacagtgaactgtttgtgcctgaagaggggagcagcgagaaggagagcgaggacgcgccaaaaacatctcctccgacgcctgggaaacatggtttggaacagactggggaggaaaaagtgatggtgactgttcctgacaaaaatccaccttgtccttgctgtggtacccgggtaaactctgtgttgaatctgattgaacatctgaaagtgtcacacgggaaaaggggggtttgttttcggtgtgcaaaatgtggaaaggaaaatagtaactatcacagtgttgtttgtcattttccaaaatgcaggggtccagagacggagaaagccccagctggggagtggatttgtgaggtatgcaacagagattttacaaccaaaattggcctgggacaacacaagagattggcacacccagcagtgagaaatcaggaaaggatcgttgcttcccaaccgaaagaaacatcaaatagaggtgctcacaaaaggtgctggacaaaggaggaggaagaattactaataagactggaggctcagttcgagggaaacaaaaatattaataagcttattgcagaacacataaccaccaaaacagctaagcagatcagtgacaaaaggcgattgctgtccagaaagccagcagaggagccacgtgaggagcctggaacgtgtcatcacaccaggagagcagctgcgagcctgagaacggagcctgagatgagtcatcacgcccaggcagaggacagagataatggacctgggagacgccctctgccaggcagggcagctgccggagggagaacaatggacgagataagacgccaccctgataagggcaacggacagcagagacccaccaagcaaaaatcagaagaacagctgcaggcttactataaaaagacactagaggaacgactttcagctggggcacttaacaccttcccccgagcattcaagcaggtaatggaaggccgggatataaagctagtaatcaatcagacagcgcaggactgcttcggatgcctggaatccataagccaaataagaacggcaacccgagataaaaaggacacggtgacccgggagaaacacccaaagaaaccttttcagaagtggatgaaggacagagcaatcaaaaaaggtaattatcttcggttccagcgtttattttatcttgatagagggaaactggctaaaatcattttagatgatattgaatgcttgtcttgtgacataccactcagtgaaatttattcggtttttaaaacaagatgggaaacaactggtagctttaaaagccttggggactttaaaacttacgggaaggctgacaacactgccttcagagaattaattacggctaaagaaattgagaaaaatgtgcaggaaatgagcaaaggctcggctcccggtccagacgggattactcttggggacgtcgtaaagatggatcccgagttttcccggaccatggagattttcaatttatggttaacaactggtaaaatcccggacatggtgagggggtgcagaaccgttttgattccaaaggttccaaaccccaccagccctgatcagcttcgacccatcagcgtgtccagcatcctggtgagatgtttccataaggtgttggccgatagatggtcccggcggctccagctgcctagcctgcagttcgccttcctgcacagagacggctgcctggaggccacctcactgctgcatgcgcttctgagacactctagcgccaccgcctcgaacttgagcttggccttcgtggatatcagcaaggccttcgacagcgtgagccacgatacaatcgtcagatctgctgaggctttcggagctccttctccgctggttagatacatcgcccagtcttacgagaacgccgtggccgtttttccaagctctgaggtgcactgccaccggggcgtacggcagggcgaccctctgagccctctgctgtttatcatggccatggacgaggtgctggggttaagcatgcctcagctgggctaccagtttcacgacacactcgtggacggcttcgcgttcgccgatgactgggtggtgtgtgccgagtcacaggccagactgaaagagaagctggaagccgcagccgtggaactgggccgtgccggaatgaagatcaacgccagaaagaccaaggccatggtcatttgcggcgaccggaaacacagagccaccgccgtgtctgtggaacccttctgcttcgccgaagagctgatcacacccctgggccccactgataccgtgacctacctgggcatccagtttgacccgtggattggaatagcaaggtccggtctctccacaaaactagatttttggcttcagcggatcgatcaagcaccacttaaacctctgcagaaaactgatattctcaaaacatacaccatccctcggctgatctacatagctgaccactcagaagtgaaaactgcactactcgaaacccttgaccagaagatccggacagcggtcaaggaatggcttcacctacctccgtgcacctgcgatgccatcctgtactcgagcacgagagacggcggtttgggcatcaccaaattggcaggactgatccccagcgtgcaggcccgtagactgcatcggatcgcacagtcatctgacgatacgatgaaatgcttcatggaaaaagagaaaatggaacagctgcataagaaattgtggattcaagctggaggggacagagagaacataccctcgatttgggaagcaccaccgtcgagtgaaccaccaaacaacgtgagcacaaattcggaatgggaagcaccgacccagaaagataaatttccaaagccttgcaattggaggaaaaacgaattcaaaaaatggaccaaattggcatcccaaggccgcggaattgtaaattttgaaagagacaaaattagtaaccattggatccaatactacagacgcatacctcacaggaaactcctcactgcactacaactcagggccaacgtttaccccacgagagaatttctagccaggggtagacaagaccaatacatcaaggcgtgtaggcactgcgatgcggacattgaatcctgcgcccacatcatcggcaactgcccagtgacacaggacgcccgaatcaagaggcacaattacatctgcgaactgcttctcgaggaggcgaagaagaaggactgggtagtgttcaaggaaccgcacataagggattccaacaaggaactgtacaaacctgacctgatatttgtgaaggatgcccgtgcacttgtcgtggatgtgacagtacggtatgaagcagccaaatcatcgctggaggaagccgctgcagagaaagtgagaaagtacaaacacctggaaacggaagtaagacatctcacgaatgcaaaggacgttacttttgtgggctttcccctaggagcgcgggggaaatggcaccaagataactttaaacttttgactgagcttggcctctccaaatcgaggcaagtgaaaatggcagagactttttccacagtagcgctcttttcatctgtggacattgtacatatgtttgccagtagggccagaaaatctatggttatgtgataataggctgccttctgcggggcttgccttctggccatgcccttcttctctcccttgcacctgtacctcttggtctttgaataaagcctgagtaggaaggaccggtagacatgataagatacattgatgagtttggacaaaccacaactagaatgcagtgaaaaaaatgctttatttgtgaaatttgtgatgctattgctttatttgtaaccattataagctgcaataaacaagttaacaacaacaaaaaaaaaaaaaaaaaaaaaaaaaaaaaaacgttgactaaaaaaaaaaaaaaaaaaaaaaaaaaaaaaaaaaaaaaaaaaaaaaaaaaaaaaaaaaaaaaaaaaaaaa

SEQ ID NO: 10273 - DNA, 4691 bp, synthetic construct
  source 1..4691: mol_type = other DNA
ggtctagttacaactgggcatcgctgcagagatcgcacctcctcgtggtcccgctggtagcccttcgaagggtgactaagtcgatctctgccccaggtacggagccgttgggactcaccagtccaacgtaactcctgcctaaattcggtgaaacaaattcctcggtaaaaagccccatggcttcttgcccgaaacctggccccccggtttcagcaggggcaatgagtttggaaagtggactgaccacccactccgttctcgccatcgaacgtggtcccaattcgttggcaaattccggatcagactttgggggggggggtctggggctaccgttacgcctattgagggtatcggtcggcactcagacctcccgctccgactgggtagacctggtgtcctggagccacccaggacccacgtctaagtcccagcaggttgacctggtgtctttatttcctaaacaccgggttgacctgttatccaaaaacgaccaggtagacctggtggctcaatttttaccatctaaatttccccccaatttggcagaaaatgatttggctttgctggtgaacttagagttctacagatcggatttgcatgtgtatgagtgtgttcattttgctgcacattgggagggattaagtggtttgcctgaggtgtatgaacaacttgcaccacaaccgtgtgtgggagaaactttacattctagcctcccacgagacagtgaactgtttgtgcctgaagaggggagcagcgagaaggagagcgaggacgcgccaaaaacatctcctccgacgcctgggaaacatggtttggaacagactggggaggaaaaagtgatggtgactgttcctgacaaaaatccaccttgtccttgctgtggtacccgggtaaactctgtgttgaatctgattgaacatctgaaagtgtcacacgggaaaaggggggtttgttttcggtgtgcaaaatgtggaaaggaaaatagtaactatcacagtgttgtttgtcattttccaaaatgcaggggtccagagacggagaaagccccagctggggagtggatttgtgaggtatgcaacagagattttacaaccaaaattggcctgggacaacacaagagattggcacacccagcagtgagaaatcaggaaaggatcgttgcttcccaaccgaaagaaacatcaaatagaggtgctcacaaaaggtgctggacaaaggaggaggaagaattactaataagactggaggctcagttcgagggaaacaaaaatattaataagcttattgcagaacacataaccaccaaaacagctaagcagatcagtgacaaaaggcgattgctgtccagaaagccagcagaggagccacgtgaggagcctggaacgtgtcatcacaccaggagagcagctgcgagcctgagaacggagcctgagatgagtcatcacgcccaggcagaggacagagataatggacctgggagacgccctctgccaggcagggcagctgccggagggagaacaatggacgagataagacgccaccctgataagggcaacggacagcagagacccaccaagcaaaaatcagaagaacagctgcaggcttactataaaaagacactagaggaacgactttcagctggggcacttaacaccttcccccgagcattcaagcaggtaatggaaggccgggatataaagctagtaatcaatcagacagcgcaggactgcttcggatgcctggaatccataagccaaataagaacggcaacccgagataaaaaggacacggtgacccgggagaaacacccaaagaaaccttttcagaagtggatgaaggacagagcaatcaaaaaaggtaattatcttcggttccagcgtttattttatcttgatagagggaaactggctaaaatcattttagatgatattgaatgcttgtcttgtgacataccactcagtgaaatttattcggtttttaaaacaagatgggaaacaactggtagctttaaaagccttggggactttaaaacttacgggaaggctgacaacactgccttcagagaattaattacggctaaagaaattgagaaaaatgtgcaggaaatgagcaaaggctcggctcccggtccagacgggattactcttggggacgtcgtaaagatggatcccgagttttcccggaccatggagattttcaatttatggttaacaactggtaaaatcccggacatggtgagggggtgcagaaccgttttgattcctctgctgaagaagcccagcctggaccccactaactggaataactacagacctatcagcaacctgcccttcctgggaaaagtgcttgagagagtggtggccagccagctccagggatttctggatgacaccgacttcctcgatccaagccagagcggcttccgccctggccacagcaccgagacagccctggtggccctcgtggacgacctgagacgggaactcgatagaggatctgttaccctgctcgtgctgctggacatctcggccgccttcgacaccatcgaccacggcatcctactgggcagactgctgggcatgggcctgggcggcacagtgctccagtggctgcaaagctttctggaaggccggtctcagatggtgaagctgggcgacacatgcagcgacccctggcctctgacctgcggcgtccctcagggctctatcctgtcccctatgctgttcaacatctacatgaagcctctgggagaggtgatcagaagcttcggcgttcgctgccacctgtacgccgatgatacccagctgtactacagcttcccccccgcttccaaggaagccccccagatcctgaaccagtgtctggccgccgtttccgattggatgagagccaacaagctgaaactgaaccccgacaagaccgaggtgctgctggtgtctagaaagagcgatcggggcatcggctggcagcccgtgctggacggcgtggccctgcctctgaaggcccaagtgaggtccctgggcgtgcagtttgacccgtggattggaatagcaaggtccggtctctccacaaaactagatttttggcttcagcggatcgatcaagcaccacttaaacctctgcagaaaactgatattctcaaaacatacaccatccctcggctgatctacatagctgaccactcagaagtgaaaactgcactactcgaaacccttgaccagaagatccggacagcggtcaaggaatggcttcacctacctccgtgcacctgcgatgccatcctgtactcgagcacgagagacggcggtttgggcatcaccaaattggcaggactgatccccagcgtgcaggcccgtagactgcatcggatcgcacagtcatctgacgatacgatgaaatgcttcatggaaaaagagaaaatggaacagctgcataagaaattgtggattcaagctggaggggacagagagaacataccctcgatttgggaagcaccaccgtcgagtgaaccaccaaacaacgtgagcacaaattcggaatgggaagcaccgacccagaaagataaatttccaaagccttgcaattggaggaaaaacgaattcaaaaaatggaccaaattggcatcccaaggccgcggaattgtaaattttgaaagagacaaaattagtaaccattggatccaatactacagacgcatacctcacaggaaactcctcactgcactacaactcagggccaacgtttaccccacgagagaatttctagccaggggtagacaagaccaatacatcaaggcgtgtaggcactgcgatgcggacattgaatcctgcgcccacatcatcggcaactgcccagtgacacaggacgcccgaatcaagaggcacaattacatctgcgaactgcttctcgaggaggcgaagaagaaggactgggtagtgttcaaggaaccgcacataagggattccaacaaggaactgtacaaacctgacctgatatttgtgaaggatgcccgtgcacttgtcgtggatgtgacagtacggtatgaagcagccaaatcatcgctggaggaagccgctgcagagaaagtgagaaagtacaaacacctggaaacggaagtaagacatctcacgaatgcaaaggacgttacttttgtgggctttcccctaggagcgcgggggaaatggcaccaagataactttaaacttttgactgagcttggcctctccaaatcgaggcaagtgaaaatggcagagactttttccacagtagcgctcttttcatctgtggacattgtacatatgtttgccagtagggccagaaaatctatggttatgtgataataggctgccttctgcggggcttgccttctggccatgcccttcttctctcccttgcacctgtacctcttggtctttgaataaagcctgagtaggaaggaccggtagacatgataagatacattgatgagtttggacaaaccacaactagaatgcagtgaaaaaaatgctttatttgtgaaatttgtgatgctattgctttatttgtaaccattataagctgcaataaacaagttaacaacaacaaaaaaaaaaaaaaaaaaaaaaaaaaaaaaacgttgactaaaaaaaaaaaaaaaaaaaaaaaaaaaaaaaaaaaaaaaaaaaaaaaaaaaaaaaaaaaaaaaaaaaaaa

SEQ ID NO: 10274 - DNA, 4766 bp, synthetic construct
  source 1..4766: mol_type = other DNA
ggtctagttacaactgggcatcgctgcagagatcgcacctcctcgtggtcccgctggtagcccttcgaagggtgactaagtcgatctctgccccaggtacggagccgttgggactcaccagtccaacgtaactcctgcctaaattcggtgaaacaaattcctcggtaaaaagccccatggcttcttgcccgaaacctggccccccggtttcagcaggggcaatgagtttggaaagtggactgaccacccactccgttctcgccatcgaacgtggtcccaattcgttggcaaattccggatcagactttgggggggggggtctggggctaccgttacgcctattgagggtatcggtcggcactcagacctcccgctccgactgggtagacctggtgtcctggagccacccaggacccacgtctaagtcccagcaggttgacctggtgtctttatttcctaaacaccgggttgacctgttatccaaaaacgaccaggtagacctggtggctcaatttttaccatctaaatttccccccaatttggcagaaaatgatttggctttgctggtgaacttagagttctacagatcggatttgcatgtgtatgagtgtgttcattttgctgcacattgggagggattaagtggtttgcctgaggtgtatgaacaacttgcaccacaaccgtgtgtgggagaaactttacattctagcctcccacgagacagtgaactgtttgtgcctgaagaggggagcagcgagaaggagagcgaggacgcgccaaaaacatctcctccgacgcctgggaaacatggtttggaacagactggggaggaaaaagtgatggtgactgttcctgacaaaaatccaccttgtccttgctgtggtacccgggtaaactctgtgttgaatctgattgaacatctgaaagtgtcacacgggaaaaggggggtttgttttcggtgtgcaaaatgtggaaaggaaaatagtaactatcacagtgttgtttgtcattttccaaaatgcaggggtccagagacggagaaagccccagctggggagtggatttgtgaggtatgcaacagagattttacaaccaaaattggcctgggacaacacaagagattggcacacccagcagtgagaaatcaggaaaggatcgttgcttcccaaccgaaagaaacatcaaatagaggtgctcacaaaaggtgctggacaaaggaggaggaagaattactaataagactggaggctcagttcgagggaaacaaaaatattaataagcttattgcagaacacataaccaccaaaacagctaagcagatcagtgacaaaaggcgattgctgtccagaaagccagcagaggagccacgtgaggagcctggaacgtgtcatcacaccaggagagcagctgcgagcctgagaacggagcctgagatgagtcatcacgcccaggcagaggacagagataatggacctgggagacgccctctgccaggcagggcagctgccggagggagaacaatggacgagataagacgccaccctgataagggcaacggacagcagagacccaccaagcaaaaatcagaagaacagctgcaggcttactataaaaagacactagaggaacgactttcagctggggcacttaacaccttcccccgagcattcaagcaggtaatggaaggccgggatataaagctagtaatcaatcagacagcgcaggactgcttcggatgcctggaatccataagccaaataagaacggcaacccgagataaaaaggacacggtgacccgggagaaacacccaaagaaaccttttcagaagtggatgaaggacagagcaatcaaaaaaggtaattatcttcggttccagcgtttattttatcttgatagagggaaactggctaaaatcattttagatgatattgaatgcttgtcttgtgacataccactcagtgaaatttattcggtttttaaaacaagatgggaaacaactggtagctttaaaagccttggggactttaaaacttacgggaaggctgacaacactgccttcagagaattaattacggctaaagaaattgagaaaaatgtgcaggaaatgagcaaaggctcggctcccggtccagacgggattactcttggggacgtcgtaaagatggatcccgagttttcccggaccatggagattttcaatttatggttaacaactggtaaaatcccggacatggtgagggggtgcagaaccgttttgattttcaagaagggaagaagagaagatcctggcaattacagacctatctctctgaccagcatccccggcaagatcctggaaaagtttatcaaggaaagcatctgcgataagctggccgagggcaagatcctgaatgatagccagcatggcttcatcgctggcagatcttgcctgaccaatctgatctccttctacgatcaggtcacccaccacctggataagcgggaagaggtggacatcgtgtacctggacttccagaaggccttcgacctggtgtctcacgacgtgctgatgagaaaacttgaggactgcggcctgaactgcgagaccgtgcggtgggtcggaaattggctgcaaggcagaacacagagagtgctggtgaacggcagcgtgtctagctggcgggaagtggccagcggcgtcccacagggaagcgtgctgggccctgtgctgttcaacatcttcatcaacgacctggatgtgggcgtgaagtccagcctggctaaatttgccgatgacaccaagctgtggggcagcgtggtgacactggaggaccggctgcagatccaggccgacctggaccggctggcctcttgggctgaccagaaccagatgaagttcaacgtggaaaagtgcaaggtgctgcacctgggcaccaataaccctcagcacacctacagactgggaggcacaaagctgacaagcaccatgaacgagcgagacctgggcgtgatcatcgaccactctatgaacatgagccaccaatgtgacgccgtggccagcagagcaaataacaccttggcctgtatcaacagatgcatctccagcaagaccaaggaagtgcagtttgacccgtggattggaatagcaaggtccggtctctccacaaaactagatttttggcttcagcggatcgatcaagcaccacttaaacctctgcagaaaactgatattctcaaaacatacaccatccctcggctgatctacatagctgaccactcagaagtgaaaactgcactactcgaaacccttgaccagaagatccggacagcggtcaaggaatggcttcacctacctccgtgcacctgcgatgccatcctgtactcgagcacgagagacggcggtttgggcatcaccaaattggcaggactgatccccagcgtgcaggcccgtagactgcatcggatcgcacagtcatctgacgatacgatgaaatgcttcatggaaaaagagaaaatggaacagctgcataagaaattgtggattcaagctggaggggacagagagaacataccctcgatttgggaagcaccaccgtcgagtgaaccaccaaacaacgtgagcacaaattcggaatgggaagcaccgacccagaaagataaatttccaaagccttgcaattggaggaaaaacgaattcaaaaaatggaccaaattggcatcccaaggccgcggaattgtaaattttgaaagagacaaaattagtaaccattggatccaatactacagacgcatacctcacaggaaactcctcactgcactacaactcagggccaacgtttaccccacgagagaatttctagccaggggtagacaagaccaatacatcaaggcgtgtaggcactgcgatgcggacattgaatcctgcgcccacatcatcggcaactgcccagtgacacaggacgcccgaatcaagaggcacaattacatctgcgaactgcttctcgaggaggcgaagaagaaggactgggtagtgttcaaggaaccgcacataagggattccaacaaggaactgtacaaacctgacctgatatttgtgaaggatgcccgtgcacttgtcgtggatgtgacagtacggtatgaagcagccaaatcatcgctggaggaagccgctgcagagaaagtgagaaagtacaaacacctggaaacggaagtaagacatctcacgaatgcaaaggacgttacttttgtgggctttcccctaggagcgcgggggaaatggcaccaagataactttaaacttttgactgagcttggcctctccaaatcgaggcaagtgaaaatggcagagactttttccacagtagcgctcttttcatctgtggacattgtacatatgtttgccagtagggccagaaaatctatggttatgtgataataggctgccttctgcggggcttgccttctggccatgcccttcttctctcccttgcacctgtacctcttggtctttgaataaagcctgagtaggaaggaccggtagacatgataagatacattgatgagtttggacaaaccacaactagaatgcagtgaaaaaaatgctttatttgtgaaatttgtgatgctattgctttatttgtaaccattataagctgcaataaacaagttaacaacaacaaaaaaaaaaaaaaaaaaaaaaaaaaaaaaacgttgactaaaaaaaaaaaaaaaaaaaaaaaaaaaaaaaaaaaaaaaaaaaaaaaaaaaaaaaaaaaaaaaaaaaaaa

SEQ ID NO: 10275 - DNA, 4703 bp, synthetic construct
  source 1..4703: mol_type = other DNA
ggtctagttacaactgggcatcgctgcagagatcgcacctcctcgtggtcccgctggtagcccttcgaagggtgactaagtcgatctctgccccaggtacggagccgttgggactcaccagtccaacgtaactcctgcctaaattcggtgaaacaaattcctcggtaaaaagccccatggcttcttgcccgaaacctggccccccggtttcagcaggggcaatgagtttggaaagtggactgaccacccactccgttctcgccatcgaacgtggtcccaattcgttggcaaattccggatcagactttgggggggggggtctggggctaccgttacgcctattgagggtatcggtcggcactcagacctcccgctccgactgggtagacctggtgtcctggagccacccaggacccacgtctaagtcccagcaggttgacctggtgtctttatttcctaaacaccgggttgacctgttatccaaaaacgaccaggtagacctggtggctcaatttttaccatctaaatttccccccaatttggcagaaaatgatttggctttgctggtgaacttagagttctacagatcggatttgcatgtgtatgagtgtgttcattttgctgcacattgggagggattaagtggtttgcctgaggtgtatgaacaacttgcaccacaaccgtgtgtgggagaaactttacattctagcctcccacgagacagtgaactgtttgtgcctgaagaggggagcagcgagaaggagagcgaggacgcgccaaaaacatctcctccgacgcctgggaaacatggtttggaacagactggggaggaaaaagtgatggtgactgttcctgacaaaaatccaccttgtccttgctgtggtacccgggtaaactctgtgttgaatctgattgaacatctgaaagtgtcacacgggaaaaggggggtttgttttcggtgtgcaaaatgtggaaaggaaaatagtaactatcacagtgttgtttgtcattttccaaaatgcaggggtccagagacggagaaagccccagctggggagtggatttgtgaggtatgcaacagagattttacaaccaaaattggcctgggacaacacaagagattggcacacccagcagtgagaaatcaggaaaggatcgttgcttcccaaccgaaagaaacatcaaatagaggtgctcacaaaaggtgctggacaaaggaggaggaagaattactaataagactggaggctcagttcgagggaaacaaaaatattaataagcttattgcagaacacataaccaccaaaacagctaagcagatcagtgacaaaaggcgattgctgtccagaaagccagcagaggagccacgtgaggagcctggaacgtgtcatcacaccaggagagcagctgcgagcctgagaacggagcctgagatgagtcatcacgcccaggcagaggacagagataatggacctgggagacgccctctgccaggcagggcagctgccggagggagaacaatggacgagataagacgccaccctgataagggcaacggacagcagagacccaccaagcaaaaatcagaagaacagctgcaggcttactataaaaagacactagaggaacgactttcagctggggcacttaacaccttcccccgagcattcaagcaggtaatggaaggccgggatataaagctagtaatcaatcagacagcgcaggactgcttcggatgcctggaatccataagccaaataagaacggcaacccgagataaaaaggacacggtgacccgggagaaacacccaaagaaaccttttcagaagtggatgaaggacagagcaatcaaaaaaggtaattatcttcggttccagcgtttattttatcttgatagagggaaactggctaaaatcattttagatgatattgaatgcttgtcttgtgacataccactcagtgaaatttattcggtttttaaaacaagatgggaaacaactggtagctttaaaagccttggggactttaaaacttacgggaaggctgacaacactgccttcagagaattaattacggctaaagaaattgagaaaaatgtgcaggaaatgagcaaaggctcggctcccggtccagacgggattactcttggggacgtcgtaaagatggatcccgagttttcccggaccatggagattttcaatttatggttaacaactggtaaaatcccggacatggtgagggggtgcagaaccgttttgattccaaaatcaacccagccggatcgtttgaaagacattaataactggagacctatcacgatcggttccatcttgctgagactgttctccaggattatcacagctaggatgaccaaagcgtgccccctgaacccaaggcaaagaggctttatcagagcggcgggatgctctgaaaacttaaaactcctgcaaactataattaggtcggccaaaagcgaacacagaccactgggtgttgtattcgtggacatcgccaaggcttttgacaccgtaagccaccagcacatcctgcatgtgttgcagcaaagaggcgtggatccccacatcatcggtctggtgagcaatatgtacaaggacatcagtacgttcgtgaccacaaagaaggacacacacacagacaaaatccagatccgggttggagtaaagcagggtgacccgctgtcgccccttttatttaacctggcaatggaccctctattatgcaagctggaagagagtggcaacggattccaccgaggaggccacaccatcacagcgatggcatttgcagacgatctggttttgctgagcgactcctgggaaaatatggagaagaatattgagatactggaggccttctgcgacctgaccggactcaaaacacaggggcaaaagtgccacggcttttacatcaagccgacaaaggactcttacaccgtgaataactgcgctgcctggactatctacggcacacccctgaacatgatcaaccccggcgactctgagaaatacctcggcctgcagtttgacccgtggattggaatagcaaggtccggtctctccacaaaactagatttttggcttcagcggatcgatcaagcaccacttaaacctctgcagaaaactgatattctcaaaacatacaccatccctcggctgatctacatagctgaccactcagaagtgaaaactgcactactcgaaacccttgaccagaagatccggacagcggtcaaggaatggcttcacctacctccgtgcacctgcgatgccatcctgtactcgagcacgagagacggcggtttgggcatcaccaaattggcaggactgatccccagcgtgcaggcccgtagactgcatcggatcgcacagtcatctgacgatacgatgaaatgcttcatggaaaaagagaaaatggaacagctgcataagaaattgtggattcaagctggaggggacagagagaacataccctcgatttgggaagcaccaccgtcgagtgaaccaccaaacaacgtgagcacaaattcggaatgggaagcaccgacccagaaagataaatttccaaagccttgcaattggaggaaaaacgaattcaaaaaatggaccaaattggcatcccaaggccgcggaattgtaaattttgaaagagacaaaattagtaaccattggatccaatactacagacgcatacctcacaggaaactcctcactgcactacaactcagggccaacgtttaccccacgagagaatttctagccaggggtagacaagaccaatacatcaaggcgtgtaggcactgcgatgcggacattgaatcctgcgcccacatcatcggcaactgcccagtgacacaggacgcccgaatcaagaggcacaattacatctgcgaactgcttctcgaggaggcgaagaagaaggactgggtagtgttcaaggaaccgcacataagggattccaacaaggaactgtacaaacctgacctgatatttgtgaaggatgcccgtgcacttgtcgtggatgtgacagtacggtatgaagcagccaaatcatcgctggaggaagccgctgcagagaaagtgagaaagtacaaacacctggaaacggaagtaagacatctcacgaatgcaaaggacgttacttttgtgggctttcccctaggagcgcgggggaaatggcaccaagataactttaaacttttgactgagcttggcctctccaaatcgaggcaagtgaaaatggcagagactttttccacagtagcgctcttttcatctgtggacattgtacatatgtttgccagtagggccagaaaatctatggttatgtgataataggctgccttctgcggggcttgccttctggccatgcccttcttctctcccttgcacctgtacctcttggtctttgaataaagcctgagtaggaaggaccggtagacatgataagatacattgatgagtttggacaaaccacaactagaatgcagtgaaaaaaatgctttatttgtgaaatttgtgatgctattgctttatttgtaaccattataagctgcaataaacaagttaacaacaacaaaaaaaaaaaaaaaaaaaaaaaaaaaaaaacgttgactaaaaaaaaaaaaaaaaaaaaaaaaaaaaaaaaaaaaaaaaaaaaaaaaaaaaaaaaaaaaaaaaaaaaaa

SEQ ID NO: 10276 - DNA, 5144 bp, synthetic construct
  source 1..5144: mol_type = other DNA
ggtctagttacaactgggcatcgctgcagagatcgcacctcctcgtggtcccgctggtagcccttcgaagggtgactaagtcgatctctgccccaggtacggagccgttgggactcaccagtccaacgtaactcctgcctaaattcggtgaaacaaattcctcggtaaaaagccccatggcttcttgcccgaaacctggccccccggtttcagcaggggcaatgagtttggaaagtggactgaccacccactccgttctcgccatcgaacgtggtcccaattcgttggcaaattccggatcagactttgggggggggggtctggggctaccgttacgcctattgagggtatcggtcggcactcagacctcccgctccgactgggtagacctggtgtcctggagccacccaggacccacgtctaagtcccagcaggttgacctggtgtctttatttcctaaacaccgggttgacctgttatccaaaaacgaccaggtagacctggtggctcaatttttaccatctaaatttccccccaatttggcagaaaatgatttggctttgctggtgaacttagagttctacagatcggatttgcatgtgtatgagtgtgttcattttgctgcacattgggagggattaagtggtttgcctgaggtgtatgaacaacttgcaccacaaccgtgtgtgggagaaactttacattctagcctcccacgagacagtgaactgtttgtgcctgaagaggggagcagcgagaaggagagcgaggacgcgccaaaaacatctcctccgacgcctgggaaacatggtttggaacagactggggaggaaaaagtgatggtgactgttcctgacaaaaatccaccttgtccttgctgtggtacccgggtaaactctgtgttgaatctgattgaacatctgaaagtgtcacacgggaaaaggggggtttgttttcggtgtgcaaaatgtggaaaggaaaatagtaactatcacagtgttgtttgtcattttccaaaatgcaggggtccagagacggagaaagccccagctggggagtggatttgtgaggtatgcaacagagattttacaaccaaaattggcctgggacaacacaagagattggcacacccagcagtgagaaatcaggaaaggatcgttgcttcccaaccgaaagaaacatcaaatagaggtgctcacaaaaggtgctggacaaaggaggaggaagaattactaataagactggaggctcagttcgagggaaacaaaaatattaataagcttattgcagaacacataaccaccaaaacagctaagcagatcagtgacaaaaggcgattgctgtccagaaagccagcagaggagccacgtgaggagcctggaacgtgtcatcacaccaggagagcagctgcgagcctgagaacggagcctgagatgagtcatcacgcccaggcagaggacagagataatggacctgggagacgccctctgccaggcagggcagctgccggagggagaacaatggacgagataagacgccaccctgataagggcaacggacagcagagacccaccaagcaaaaatcagaagaacagctgcaggcttactataaaaagacactagaggaacgactttcagctggggcacttaacaccttcccccgagcattcaagcaggtaatggaaggccgggatataaagctagtaatcaatcagacagcgcaggactgcttcggatgcctggaatccataagccaaataagaacggcaacccgagataaaaaggacacggtgacccgggagaaacacccaaagaaaccttttcagaagtggatgaaggacagagcaatcaaaaaaggtaattatcttcggttccagcgtttattttatcttgatagagggaaactggctaaaatcattttagatgatattgaatgcttgtcttgtgacataccactcagtgaaatttattcggtttttaaaacaagatgggaaacaactggtagctttaaaagccttggggactttaaaacttacgggaaggctgacaacactgccttcagagaattaattacggctaaagaaattgagaaaaatgtgcaggaaatgagcaaaggctcggctcccggtccagacgggattactcttggggacgtcgtaaagatggatcccgagttttcccggaccatggagattttcaatttatggttaacaactggtaaaatcccggacatggtgagggggtgcagaaccgttttgattgatcccattccctctcatctcttgcaagccatctctcctgcagtcataccaacactgactcacataattaacacatctcttgactctggtttattccccactacatttaagcaggctagggtaaccccactgctaaagaaacccaacctggaccatacgctacttgaaaactacagaccagtatccctgcttccattcatggccaagattctggagaaagtagtgttcaatcaagtcctggactttcttactcaaaacaatctcatggacaacaagcaatccggctttaagaaaggccactcaactgagactgccctgctctcggtcgtggaggatctcagactggctaaagcagactctaaatcatcagtcctcattttgctggacttgtcagctgcttttgacactgtcaaccaccagatcctgctatctacgcttgagtcactgggcgttgcgggcactgttatacaatggtttagatcttacctctctgacaggtcattcagggtgtcttggaggggagaggtgtccaagctacagcatctaaacactggggtacctcaaggctctgttcttgggccacttctcttctccatctacacatcatctctaggaccagtcatccagagacatggattctcctaccactgctatgctgatgacacccagctatacctctcttttcatcctgatgatccctcggttccagctcgtatctcagcctgcctgttggatatttcacactggatgaaagatcatcatcttcagctgaacctcgcaaaaacggaaatgcttgtagtttctgccaacccgactctacaccataacttttcaatccagatggatggggcaaccattactgcatccaaaatggtgaaaagccttggagtaacgattgatgaccaactaaacttctctgaccacatttctagaactgctcgatcgtgcagatttgcactctataacatcagaaagatccgacccttcttatctgaacatgcagctcaactccttgttcaagctcttgttctctccaaactggattactgcaactctctactagctggccttccagctaactctatcaagcctcttcaactgctccagaatgcagcagcacgagttgtgttcaatgaacctaaacgagcacatgtcactccgctgctagtccgtttgcactggctgccagttgctgctcgcatcaaattcaaaactctgcagtttgacccgtggattggaatagcaaggtccggtctctccacaaaactagatttttggcttcagcggatcgatcaagcaccacttaaacctctgcagaaaactgatattctcaaaacatacaccatccctcggctgatctacatagctgaccactcagaagtgaaaactgcactactcgaaacccttgaccagaagatccggacagcggtcaaggaatggcttcacctacctccgtgcacctgcgatgccatcctgtactcgagcacgagagacggcggtttgggcatcaccaaattggcaggactgatccccagcgtgcaggcccgtagactgcatcggatcgcacagtcatctgacgatacgatgaaatgcttcatggaaaaagagaaaatggaacagctgcataagaaattgtggattcaagctggaggggacagagagaacataccctcgatttgggaagcaccaccgtcgagtgaaccaccaaacaacgtgagcacaaattcggaatgggaagcaccgacccagaaagataaatttccaaagccttgcaattggaggaaaaacgaattcaaaaaatggaccaaattggcatcccaaggccgcggaattgtaaattttgaaagagacaaaattagtaaccattggatccaatactacagacgcatacctcacaggaaactcctcactgcactacaactcagggccaacgtttaccccacgagagaatttctagccaggggtagacaagaccaatacatcaaggcgtgtaggcactgcgatgcggacattgaatcctgcgcccacatcatcggcaactgcccagtgacacaggacgcccgaatcaagaggcacaattacatctgcgaactgcttctcgaggaggcgaagaagaaggactgggtagtgttcaaggaaccgcacataagggattccaacaaggaactgtacaaacctgacctgatatttgtgaaggatgcccgtgcacttgtcgtggatgtgacagtacggtatgaagcagccaaatcatcgctggaggaagccgctgcagagaaagtgagaaagtacaaacacctggaaacggaagtaagacatctcacgaatgcaaaggacgttacttttgtgggctttcccctaggagcgcgggggaaatggcaccaagataactttaaacttttgactgagcttggcctctccaaatcgaggcaagtgaaaatggcagagactttttccacagtagcgctcttttcatctgtggacattgtacatatgtttgccagtagggccagaaaatctatggttatgtgataataggctgccttctgcggggcttgccttctggccatgcccttcttctctcccttgcacctgtacctcttggtctttgaataaagcctgagtaggaaggaccggtagacatgataagatacattgatgagtttggacaaaccacaactagaatgcagtgaaaaaaatgctttatttgtgaaatttgtgatgctattgctttatttgtaaccattataagctgcaataaacaagttaacaacaacaaaaaaaaaaaaaaaaaaaaaaaaaaaaaaacgttgactaaaaaaaaaaaaaaaaaaaaaaaaaaaaaaaaaaaaaaaaaaaaaaaaaaaaaaaaaaaaaaaaaaaaaa

SEQ ID NO: 10277 - DNA, 5156 bp, synthetic construct
  source 1..5156: mol_type = other DNA
ggtctagttacaactgggcatcgctgcagagatcgcacctcctcgtggtcccgctggtagcccttcgaagggtgactaagtcgatctctgccccaggtacggagccgttgggactcaccagtccaacgtaactcctgcctaaattcggtgaaacaaattcctcggtaaaaagccccatggcttcttgcccgaaacctggccccccggtttcagcaggggcaatgagtttggaaagtggactgaccacccactccgttctcgccatcgaacgtggtcccaattcgttggcaaattccggatcagactttgggggggggggtctggggctaccgttacgcctattgagggtatcggtcggcactcagacctcccgctccgactgggtagacctggtgtcctggagccacccaggacccacgtctaagtcccagcaggttgacctggtgtctttatttcctaaacaccgggttgacctgttatccaaaaacgaccaggtagacctggtggctcaatttttaccatctaaatttccccccaatttggcagaaaatgatttggctttgctggtgaacttagagttctacagatcggatttgcatgtgtatgagtgtgttcattttgctgcacattgggagggattaagtggtttgcctgaggtgtatgaacaacttgcaccacaaccgtgtgtgggagaaactttacattctagcctcccacgagacagtgaactgtttgtgcctgaagaggggagcagcgagaaggagagcgaggacgcgccaaaaacatctcctccgacgcctgggaaacatggtttggaacagactggggaggaaaaagtgatggtgactgttcctgacaaaaatccaccttgtccttgctgtggtacccgggtaaactctgtgttgaatctgattgaacatctgaaagtgtcacacgggaaaaggggggtttgttttcggtgtgcaaaatgtggaaaggaaaatagtaactatcacagtgttgtttgtcattttccaaaatgcaggggtccagagacggagaaagccccagctggggagtggatttgtgaggtatgcaacagagattttacaaccaaaattggcctgggacaacacaagagattggcacacccagcagtgagaaatcaggaaaggatcgttgcttcccaaccgaaagaaacatcaaatagaggtgctcacaaaaggtgctggacaaaggaggaggaagaattactaataagactggaggctcagttcgagggaaacaaaaatattaataagcttattgcagaacacataaccaccaaaacagctaagcagatcagtgacaaaaggcgattgctgtccagaaagccagcagaggagccacgtgaggagcctggaacgtgtcatcacaccaggagagcagctgcgagcctgagaacggagcctgagatgagtcatcacgcccaggcagaggacagagataatggacctgggagacgccctctgccaggcagggcagctgccggagggagaacaatggacgagataagacgccaccctgataagggcaacggacagcagagacccaccaagcaaaaatcagaagaacagctgcaggcttactataaaaagacactagaggaacgactttcagctggggcacttaacaccttcccccgagcattcaagcaggtaatggaaggccgggatataaagctagtaatcaatcagacagcgcaggactgcttcggatgcctggaatccataagccaaataagaacggcaacccgagataaaaaggacacggtgacccgggagaaacacccaaagaaaccttttcagaagtggatgaaggacagagcaatcaaaaaaggtaattatcttcggttccagcgtttattttatcttgatagagggaaactggctaaaatcattttagatgatattgaatgcttgtcttgtgacataccactcagtgaaatttattcggtttttaaaacaagatgggaaacaactggtagctttaaaagccttggggactttaaaacttacgggaaggctgacaacactgccttcagagaattaattacggctaaagaaattgagaaaaatgtgcaggaaatgagcaaaggctcggctcccggtccagacgggattactcttggggacgtcgtaaagatggatcccgagttttcccggaccatggagattttcaatttatggttaacaactggtaaaatcccggacatggtgagggggtgcagaaccgttttgattgacacttcaaacctcatggagcagatcctttcatctgacaacctcaacagggcttacttgcaagtggttcgcaacaaaggggctgagggcgtggacggaatgaagtacacggagttgaaggagcatctcgcgaagaacggagagacaataaagggacaactcagaactgctgcttataagcctcaaccggcgagacgggtagagatacccaagcccgacggtggcgtgaggaacctcggcgtccctacagtcacggaccgcttcatccaacaagccatcgctcaagtcctcactccaatctacgaggagcaattccacgaccattcctacgggttccggccaaaccggtgcgcccaacaagctatacttacagctttgaacataatgaacgacggaaacgactggattgtcgacatagatctcgagaagttcttcgacacagtcaatcatgacaagttgatgactctcatcgggcgcaccattgcagacggcgacgtaatctccattgttcgaaagtacctcgtgtccggaatcatgatagacgacgagtacgaggactcaatcgtgggaaccccacaaggcggcaacttgtctccccttcttgcaaacatcatgcttaacgagttggataaggaaatggaagctgcaggccttaacttcgtcaggtacgcagacgactgtatcatcatggtgggatctgagatgtctgccaaccgggtcatgaggaacatctcaagatttattgaggagaagttggggcttaaggtgaatatgacgaagtctaaggtggaccggcccagcggacttaagtatctcggattcggcttttacttcgaccccagagctcatcaattcaaggccaagcctcacgcgaagagtgtcgcgaagtttaagaagagaatgaaggagctcacgtgcaggagttggggcgtgtctaactcctacaaggtcgagaagctcaatcaattgatccgtggctggattaattactttaagatcgggagtatgaaaacactctgtaaggaacttgactcacgcatcagatacaggctccggatgtgcatctggaagcaatggaaaactccacaaaaccaggagaagaacttggtaaagctcgggatcgaccgcaacacggccaggcgggtggcgtacactggcaagcgaatcgcctacgtctgtaacaagggagctgtgaacgtcgcgataagtaacaagaggctcgcttcattccagtttgacccgtggattggaatagcaaggtccggtctctccacaaaactagatttttggcttcagcggatcgatcaagcaccacttaaacctctgcagaaaactgatattctcaaaacatacaccatccctcggctgatctacatagctgaccactcagaagtgaaaactgcactactcgaaacccttgaccagaagatccggacagcggtcaaggaatggcttcacctacctccgtgcacctgcgatgccatcctgtactcgagcacgagagacggcggtttgggcatcaccaaattggcaggactgatccccagcgtgcaggcccgtagactgcatcggatcgcacagtcatctgacgatacgatgaaatgcttcatggaaaaagagaaaatggaacagctgcataagaaattgtggattcaagctggaggggacagagagaacataccctcgatttgggaagcaccaccgtcgagtgaaccaccaaacaacgtgagcacaaattcggaatgggaagcaccgacccagaaagataaatttccaaagccttgcaattggaggaaaaacgaattcaaaaaatggaccaaattggcatcccaaggccgcggaattgtaaattttgaaagagacaaaattagtaaccattggatccaatactacagacgcatacctcacaggaaactcctcactgcactacaactcagggccaacgtttaccccacgagagaatttctagccaggggtagacaagaccaatacatcaaggcgtgtaggcactgcgatgcggacattgaatcctgcgcccacatcatcggcaactgcccagtgacacaggacgcccgaatcaagaggcacaattacatctgcgaactgcttctcgaggaggcgaagaagaaggactgggtagtgttcaaggaaccgcacataagggattccaacaaggaactgtacaaacctgacctgatatttgtgaaggatgcccgtgcacttgtcgtggatgtgacagtacggtatgaagcagccaaatcatcgctggaggaagccgctgcagagaaagtgagaaagtacaaacacctggaaacggaagtaagacatctcacgaatgcaaaggacgttacttttgtgggctttcccctaggagcgcgggggaaatggcaccaagataactttaaacttttgactgagcttggcctctccaaatcgaggcaagtgaaaatggcagagactttttccacagtagcgctcttttcatctgtggacattgtacatatgtttgccagtagggccagaaaatctatggttatgtgataataggctgccttctgcggggcttgccttctggccatgcccttcttctctcccttgcacctgtacctcttggtctttgaataaagcctgagtaggaaggaccggtagacatgataagatacattgatgagtttggacaaaccacaactagaatgcagtgaaaaaaatgctttatttgtgaaatttgtgatgctattgctttatttgtaaccattataagctgcaataaacaagttaacaacaacaaaaaaaaaaaaaaaaaaaaaaaaaaaaaaacgttgactaaaaaaaaaaaaaaaaaaaaaaaaaaaaaaaaaaaaaaaaaaaaaaaaaaaaaaaaaaaaaaaaaaaaaa

SEQ ID NO: 10278 - DNA, 5195 bp, synthetic construct
  source 1..5195: mol_type = other DNA
ggtctagttacaactgggcatcgctgcagagatcgcacctcctcgtggtcccgctggtagcccttcgaagggtgactaagtcgatctctgccccaggtacggagccgttgggactcaccagtccaacgtaactcctgcctaaattcggtgaaacaaattcctcggtaaaaagccccatggcttcttgcccgaaacctggccccccggtttcagcaggggcaatgagtttggaaagtggactgaccacccactccgttctcgccatcgaacgtggtcccaattcgttggcaaattccggatcagactttgggggggggggtctggggctaccgttacgcctattgagggtatcggtcggcactcagacctcccgctccgactgggtagacctggtgtcctggagccacccaggacccacgtctaagtcccagcaggttgacctggtgtctttatttcctaaacaccgggttgacctgttatccaaaaacgaccaggtagacctggtggctcaatttttaccatctaaatttccccccaatttggcagaaaatgatttggctttgctggtgaacttagagttctacagatcggatttgcatgtgtatgagtgtgttcattttgctgcacattgggagggattaagtggtttgcctgaggtgtatgaacaacttgcaccacaaccgtgtgtgggagaaactttacattctagcctcccacgagacagtgaactgtttgtgcctgaagaggggagcagcgagaaggagagcgaggacgcgccaaaaacatctcctccgacgcctgggaaacatggtttggaacagactggggaggaaaaagtgatggtgactgttcctgacaaaaatccaccttgtccttgctgtggtacccgggtaaactctgtgttgaatctgattgaacatctgaaagtgtcacacgggaaaaggggggtttgttttcggtgtgcaaaatgtggaaaggaaaatagtaactatcacagtgttgtttgtcattttccaaaatgcaggggtccagagacggagaaagccccagctggggagtggatttgtgaggtatgcaacagagattttacaaccaaaattggcctgggacaacacaagagattggcacacccagcagtgagaaatcaggaaaggatcgttgcttcccaaccgaaagaaacatcaaatagaggtgctcacaaaaggtgctggacaaaggaggaggaagaattactaataagactggaggctcagttcgagggaaacaaaaatattaataagcttattgcagaacacataaccaccaaaacagctaagcagatcagtgacaaaaggcgattgctgtccagaaagccagcagaggagccacgtgaggagcctggaacgtgtcatcacaccaggagagcagctgcgagcctgagaacggagcctgagatgagtcatcacgcccaggcagaggacagagataatggacctgggagacgccctctgccaggcagggcagctgccggagggagaacaatggacgagataagacgccaccctgataagggcaacggacagcagagacccaccaagcaaaaatcagaagaacagctgcaggcttactataaaaagacactagaggaacgactttcagctggggcacttaacaccttcccccgagcattcaagcaggtaatggaaggccgggatataaagctagtaatcaatcagacagcgcaggactgcttcggatgcctggaatccataagccaaataagaacggcaacccgagataaaaaggacacggtgacccgggagaaacacccaaagaaaccttttcagaagtggatgaaggacagagcaatcaaaaaaggtaattatcttcggttccagcgtttattttatcttgatagagggaaactggctaaaatcattttagatgatattgaatgcttgtcttgtgacataccactcagtgaaatttattcggtttttaaaacaagatgggaaacaactggtagctttaaaagccttggggactttaaaacttacgggaaggctgacaacactgccttcagagaattaattacggctaaagaaattgagaaaaatgtgcaggaaatgagcaaaggctcggctcccggtccagacgggattactcttggggacgtcgtaaagatggatcccgagttttcccggaccatggagattttcaatttatggttaacaactggtaaaatcccggacatggtgagggggtgcagaaccgttttgattgcattgttggaaagaatcctcgcccgagataacctcataactgcacttaagcgcgtagaggctaatcaaggcgcccctgggatagatggggtgtcaactgaccaactgcgcgattacattcgagcacactggtcaaccatacacgcacagcttctcgctgggacatatcgaccagcaccagttcggagggtcgaaattccaaaaccgggaggaggcacaaggcagcttgggatccctaccgttgtcgaccgacttatacagcaggcaattctccaggagttgacgcctatttttgatcccgacttctctagctcatcattcggtttccgccctgggagaaatgcccacgacgctgttcgacaggcacaaggatacatccaagaaggatatcggtatgtcgtcgatatggatctcgagaagtttttcgatagagtgaatcacgatattttgatgagtagagtagcgcgcaaggtgaaggataaaagggtcctcaagttgattcgcgcgtatctccaagctggagtcatgatagaaggcgtcaaggtgcagacggaagaagggacaccacaaggcggtcctttgtctcctcttctcgccaatatcctccttgacgacttggacaaagaactggagaaacgagggctcaagttttgtcgatacgcggacgactgtaatatttacgtaaagagccttagggcagggcagcgagtgaagcaaagcatccaacgcttccttgagaaaactctgaaactcaaggttaatgaagagaagtccgcagtcgaccggccatggaagcgcgcgttcctcgggttctcatttacgcctgaaaggaaagcgcggattcgacttgccccacggagtatccaaagattgaagcagaggatacgccagctcacaaacccaaattggtccatatcaatgccagagcgcatacacagggtgaatcagtatgttatggggtggataggctactttaggctcgtcgaaactccaagtgtcttgcaaacgatagaaggatggataagacgaaggctgaggttgtgccaatggcttcaatggaaaagggtacggactaggattagggagcttcgcgcccttggtcttaaggaaacagccgtgatggaaatagcgaacacccgcaaaggcgcatggcgcactaccaaaacaccccagcttcaccaagcattgggaaagacctactggacggcgcaaggacttaaaagtcttactcaacggtactttgaactgcggcaaggtagcgaattcgagcagtttgacccgtggattggaatagcaaggtccggtctctccacaaaactagatttttggcttcagcggatcgatcaagcaccacttaaacctctgcagaaaactgatattctcaaaacatacaccatccctcggctgatctacatagctgaccactcagaagtgaaaactgcactactcgaaacccttgaccagaagatccggacagcggtcaaggaatggcttcacctacctccgtgcacctgcgatgccatcctgtactcgagcacgagagacggcggtttgggcatcaccaaattggcaggactgatccccagcgtgcaggcccgtagactgcatcggatcgcacagtcatctgacgatacgatgaaatgcttcatggaaaaagagaaaatggaacagctgcataagaaattgtggattcaagctggaggggacagagagaacataccctcgatttgggaagcaccaccgtcgagtgaaccaccaaacaacgtgagcacaaattcggaatgggaagcaccgacccagaaagataaatttccaaagccttgcaattggaggaaaaacgaattcaaaaaatggaccaaattggcatcccaaggccgcggaattgtaaattttgaaagagacaaaattagtaaccattggatccaatactacagacgcatacctcacaggaaactcctcactgcactacaactcagggccaacgtttaccccacgagagaatttctagccaggggtagacaagaccaatacatcaaggcgtgtaggcactgcgatgcggacattgaatcctgcgcccacatcatcggcaactgcccagtgacacaggacgcccgaatcaagaggcacaattacatctgcgaactgcttctcgaggaggcgaagaagaaggactgggtagtgttcaaggaaccgcacataagggattccaacaaggaactgtacaaacctgacctgatatttgtgaaggatgcccgtgcacttgtcgtggatgtgacagtacggtatgaagcagccaaatcatcgctggaggaagccgctgcagagaaagtgagaaagtacaaacacctggaaacggaagtaagacatctcacgaatgcaaaggacgttacttttgtgggctttcccctaggagcgcgggggaaatggcaccaagataactttaaacttttgactgagcttggcctctccaaatcgaggcaagtgaaaatggcagagactttttccacagtagcgctcttttcatctgtggacattgtacatatgtttgccagtagggccagaaaatctatggttatgtgataataggctgccttctgcggggcttgccttctggccatgcccttcttctctcccttgcacctgtacctcttggtctttgaataaagcctgagtaggaaggaccggtagacatgataagatacattgatgagtttggacaaaccacaactagaatgcagtgaaaaaaatgctttatttgtgaaatttgtgatgctattgctttatttgtaaccattataagctgcaataaacaagttaacaacaacaaaaaaaaaaaaaaaaaaaaaaaaaaaaaaacgttgactaaaaaaaaaaaaaaaaaaaaaaaaaaaaaaaaaaaaaaaaaaaaaaaaaaaaaaaaaaaaaaaaaaaaaa

SEQ ID NO: 10279 - DNA, 4703 bp, synthetic construct
  source 1..4703: mol_type = other DNA
ggtctagttacaactgggcatcgctgcagagatcgcacctcctcgtggtcccgctggtagcccttcgaagggtgactaagtcgatctctgccccaggtacggagccgttgggactcaccagtccaacgtaactcctgcctaaattcggtgaaacaaattcctcggtaaaaagccccatggcttcttgcccgaaacctggccccccggtttcagcaggggcaatgagtttggaaagtggactgaccacccactccgttctcgccatcgaacgtggtcccaattcgttggcaaattccggatcagactttgggggggggggtctggggctaccgttacgcctattgagggtatcggtcggcactcagacctcccgctccgactgggtagacctggtgtcctggagccacccaggacccacgtctaagtcccagcaggttgacctggtgtctttatttcctaaacaccgggttgacctgttatccaaaaacgaccaggtagacctggtggctcaatttttaccatctaaatttccccccaatttggcagaaaatgatttggctttgctggtgaacttagagttctacagatcggatttgcatgtgtatgagtgtgttcattttgctgcacattgggagggattaagtggtttgcctgaggtgtatgaacaacttgcaccacaaccgtgtgtgggagaaactttacattctagcctcccacgagacagtgaactgtttgtgcctgaagaggggagcagcgagaaggagagcgaggacgcgccaaaaacatctcctccgacgcctgggaaacatggtttggaacagactggggaggaaaaagtgatggtgactgttcctgacaaaaatccaccttgtccttgctgtggtacccgggtaaactctgtgttgaatctgattgaacatctgaaagtgtcacacgggaaaaggggggtttgttttcggtgtgcaaaatgtggaaaggaaaatagtaactatcacagtgttgtttgtcattttccaaaatgcaggggtccagagacggagaaagccccagctggggagtggatttgtgaggtatgcaacagagattttacaaccaaaattggcctgggacaacacaagagattggcacacccagcagtgagaaatcaggaaaggatcgttgcttcccaaccgaaagaaacatcaaatagaggtgctcacaaaaggtgctggacaaaggaggaggaagaattactaataagactggaggctcagttcgagggaaacaaaaatattaataagcttattgcagaacacataaccaccaaaacagctaagcagatcagtgacaaaaggcgattgctgtccagaaagccagcagaggagccacgtgaggagcctggaacgtgtcatcacaccaggagagcagctgcgagcctgagaacggagcctgagatgagtcatcacgcccaggcagaggacagagataatggacctgggagacgccctctgccaggcagggcagctgccggagggagaacaatggacgagataagacgccaccctgataagggcaacggacagcagagacccaccaagcaaaaatcagaagaacagctgcaggcttactataaaaagacactagaggaacgactttcagctggggcacttaacaccttcccccgagcattcaagcaggtaatggaaggccgggatataaagctagtaatcaatcagacagcgcaggactgcttcggatgcctggaatccataagccaaataagaacggcaacccgagataaaaaggacacggtgacccgggagaaacacccaaagaaaccttttcagaagtggatgaaggacagagcaatcaaaaaaggtaattatcttcggttccagcgtttattttatcttgatagagggaaactggctaaaatcattttagatgatattgaatgcttgtcttgtgacataccactcagtgaaatttattcggtttttaaaacaagatgggaaacaactggtagctttaaaagccttggggactttaaaacttacgggaaggctgacaacactgccttcagagaattaattacggctaaagaaattgagaaaaatgtgcaggaaatgagcaaaggctcggctcccggtccagacgggattactcttggggacgtcgtaaagatggatcccgagttttcccggaccatggagattttcaatttatggttaacaactggtaaaatcccggacatggtgagggggtgcagaaccgttttgattccaaaatcatcaaagccggatcgtttgaaagacattaataactggagacctatcacgatcggttccatcttgctgagactgttctccaggattgtaacagctaggctgagcaaagcgtgccccctgaacccaaggcaaagaggctttatcagagcggcgggatgctctgaaaacttaaaactcctgcaaactataatttggtcggccaaaagagaacacagaccactgggtgttgtattcgtggacatcgccaaggcttttgacaccgtaagccaccagcacatcattcatgctttgcagcaaagagaggtggatccccacatcgtcggtctggtgagcaatatgtacgagaacatcagtacgtatatcaccacaaagaggaacacacacacagacaaaatccagatccgggttggagtaaagcagggtgacccgatgtcgccccttttatttaacctggcaatggaccctctattatgcaagctggaagagagtggcaaaggataccaccgaggacagagcagcatcacagcgatggcatacgcagacgatctggttttgctgagcgactcctgggaaaatatgaatacaaatattagcatactggagaccttctgcaatctgaccggactcaaaacacaggggcaaaagtgccacggcttttacatcaagccgacaaaggactcttacaccatcaatgactgcgctgcctggactatcaacggcacacccctgaacatgatcgaccccggcgaatctgagaaatacctcggcctgcagtttgacccgtggattggaatagcaaggtccggtctctccacaaaactagatttttggcttcagcggatcgatcaagcaccacttaaacctctgcagaaaactgatattctcaaaacatacaccatccctcggctgatctacatagctgaccactcagaagtgaaaactgcactactcgaaacccttgaccagaagatccggacagcggtcaaggaatggcttcacctacctccgtgcacctgcgatgccatcctgtactcgagcacgagagacggcggtttgggcatcaccaaattggcaggactgatccccagcgtgcaggcccgtagactgcatcggatcgcacagtcatctgacgatacgatgaaatgcttcatggaaaaagagaaaatggaacagctgcataagaaattgtggattcaagctggaggggacagagagaacataccctcgatttgggaagcaccaccgtcgagtgaaccaccaaacaacgtgagcacaaattcggaatgggaagcaccgacccagaaagataaatttccaaagccttgcaattggaggaaaaacgaattcaaaaaatggaccaaattggcatcccaaggccgcggaattgtaaattttgaaagagacaaaattagtaaccattggatccaatactacagacgcatacctcacaggaaactcctcactgcactacaactcagggccaacgtttaccccacgagagaatttctagccaggggtagacaagaccaatacatcaaggcgtgtaggcactgcgatgcggacattgaatcctgcgcccacatcatcggcaactgcccagtgacacaggacgcccgaatcaagaggcacaattacatctgcgaactgcttctcgaggaggcgaagaagaaggactgggtagtgttcaaggaaccgcacataagggattccaacaaggaactgtacaaacctgacctgatatttgtgaaggatgcccgtgcacttgtcgtggatgtgacagtacggtatgaagcagccaaatcatcgctggaggaagccgctgcagagaaagtgagaaagtacaaacacctggaaacggaagtaagacatctcacgaatgcaaaggacgttacttttgtgggctttcccctaggagcgcgggggaaatggcaccaagataactttaaacttttgactgagcttggcctctccaaatcgaggcaagtgaaaatggcagagactttttccacagtagcgctcttttcatctgtggacattgtacatatgtttgccagtagggccagaaaatctatggttatgtgataataggctgccttctgcggggcttgccttctggccatgcccttcttctctcccttgcacctgtacctcttggtctttgaataaagcctgagtaggaaggaccggtagacatgataagatacattgatgagtttggacaaaccacaactagaatgcagtgaaaaaaatgctttatttgtgaaatttgtgatgctattgctttatttgtaaccattataagctgcaataaacaagttaacaacaacaaaaaaaaaaaaaaaaaaaaaaaaaaaaaaacgttgactaaaaaaaaaaaaaaaaaaaaaaaaaaaaaaaaaaaaaaaaaaaaaaaaaaaaaaaaaaaaaaaaaaaaaa

SEQ ID NO: 10280 - DNA, 4682 bp, synthetic construct
  source 1..4682: mol_type = other DNA
ggtctagttacaactgggcatcgctgcagagatcgcacctcctcgtggtcccgctggtagcccttcgaagggtgactaagtcgatctctgccccaggtacggagccgttgggactcaccagtccaacgtaactcctgcctaaattcggtgaaacaaattcctcggtaaaaagccccatggcttcttgcccgaaacctggccccccggtttcagcaggggcaatgagtttggaaagtggactgaccacccactccgttctcgccatcgaacgtggtcccaattcgttggcaaattccggatcagactttgggggggggggtctggggctaccgttacgcctattgagggtatcggtcggcactcagacctcccgctccgactgggtagacctggtgtcctggagccacccaggacccacgtctaagtcccagcaggttgacctggtgtctttatttcctaaacaccgggttgacctgttatccaaaaacgaccaggtagacctggtggctcaatttttaccatctaaatttccccccaatttggcagaaaatgatttggctttgctggtgaacttagagttctacagatcggatttgcatgtgtatgagtgtgttcattttgctgcacattgggagggattaagtggtttgcctgaggtgtatgaacaacttgcaccacaaccgtgtgtgggagaaactttacattctagcctcccacgagacagtgaactgtttgtgcctgaagaggggagcagcgagaaggagagcgaggacgcgccaaaaacatctcctccgacgcctgggaaacatggtttggaacagactggggaggaaaaagtgatggtgactgttcctgacaaaaatccaccttgtccttgctgtggtacccgggtaaactctgtgttgaatctgattgaacatctgaaagtgtcacacgggaaaaggggggtttgttttcggtgtgcaaaatgtggaaaggaaaatagtaactatcacagtgttgtttgtcattttccaaaatgcaggggtccagagacggagaaagccccagctggggagtggatttgtgaggtatgcaacagagattttacaaccaaaattggcctgggacaacacaagagattggcacacccagcagtgagaaatcaggaaaggatcgttgcttcccaaccgaaagaaacatcaaatagaggtgctcacaaaaggtgctggacaaaggaggaggaagaattactaataagactggaggctcagttcgagggaaacaaaaatattaataagcttattgcagaacacataaccaccaaaacagctaagcagatcagtgacaaaaggcgattgctgtccagaaagccagcagaggagccacgtgaggagcctggaacgtgtcatcacaccaggagagcagctgcgagcctgagaacggagcctgagatgagtcatcacgcccaggcagaggacagagataatggacctgggagacgccctctgccaggcagggcagctgccggagggagaacaatggacgagataagacgccaccctgataagggcaacggacagcagagacccaccaagcaaaaatcagaagaacagctgcaggcttactataaaaagacactagaggaacgactttcagctggggcacttaacaccttcccccgagcattcaagcaggtaatggaaggccgggatataaagctagtaatcaatcagacagcgcaggactgcttcggatgcctggaatccataagccaaataagaacggcaacccgagataaaaaggacacggtgacccgggagaaacacccaaagaaaccttttcagaagtggatgaaggacagagcaatcaaaaaaggtaattatcttcggttccagcgtttattttatcttgatagagggaaactggctaaaatcattttagatgatattgaatgcttgtcttgtgacataccactcagtgaaatttattcggtttttaaaacaagatgggaaacaactggtagctttaaaagccttggggactttaaaacttacgggaaggctgacaacactgccttcagagaattaattacggctaaagaaattgagaaaaatgtgcaggaaatgagcaaaggctcggctcccggtccagacgggattactcttggggacgtcgtaaagatggatcccgagttttcccggaccatggagattttcaatttatggttaacaactggtaaaatcccggacatggtgagggggtgcagaaccgttttgattccaaaatcatcaaagccggatcgtttgaaagacattaataactggagacctatcacgatcggttccatcttgctgagactgttctccaggattgtaacagctaggctgagcaaagcgtgccccctgaacccaaggcaaagaggctttatcagagcggcgggatgctctgaaaacttaaaactcctgcaaactataatttggtcggccaaaagagaacacagaccactgggtgttgtattcgtggacatcgccaaggcttttgacaccgtaagccaccagcacatcattcatgctttgcagcaaagagaggtggatccccacatcgtcggtctggtgagcaatatgtacgagaacatcagtacgtatatcaccacaaagaggaacacacacacagacaaaatccagatccgggttggagtaaagcagggtgacccgatgtcgccccttttatttaacctggcactggaagagagtggcaaaggataccaccgaggacagagcagcatcacagcgatggcatttgcagacgatctggttttgctgagcgactcctgggaaaatatgaatacaaatattagcatactggagaccttctgcaatctgaccggactcaaaacacaggggcaaaagtgccacggcttttacatcaagccgacaaaggactcttacaccatcaatgactgcgctgcctggactatcaacggcacacccctgaacatgatcgaccccggcgaatctgagaaatacctcggcctgcagtttgacccgtggattggaatagcaaggtccggtctctccacaaaactagatttttggcttcagcggatcgatcaagcaccacttaaacctctgcagaaaactgatattctcaaaacatacaccatccctcggctgatctacatagctgaccactcagaagtgaaaactgcactactcgaaacccttgaccagaagatccggacagcggtcaaggaatggcttcacctacctccgtgcacctgcgatgccatcctgtactcgagcacgagagacggcggtttgggcatcaccaaattggcaggactgatccccagcgtgcaggcccgtagactgcatcggatcgcacagtcatctgacgatacgatgaaatgcttcatggaaaaagagaaaatggaacagctgcataagaaattgtggattcaagctggaggggacagagagaacataccctcgatttgggaagcaccaccgtcgagtgaaccaccaaacaacgtgagcacaaattcggaatgggaagcaccgacccagaaagataaatttccaaagccttgcaattggaggaaaaacgaattcaaaaaatggaccaaattggcatcccaaggccgcggaattgtaaattttgaaagagacaaaattagtaaccattggatccaatactacagacgcatacctcacaggaaactcctcactgcactacaactcagggccaacgtttaccccacgagagaatttctagccaggggtagacaagaccaatacatcaaggcgtgtaggcactgcgatgcggacattgaatcctgcgcccacatcatcggcaactgcccagtgacacaggacgcccgaatcaagaggcacaattacatctgcgaactgcttctcgaggaggcgaagaagaaggactgggtagtgttcaaggaaccgcacataagggattccaacaaggaactgtacaaacctgacctgatatttgtgaaggatgcccgtgcacttgtcgtggatgtgacagtacggtatgaagcagccaaatcatcgctggaggaagccgctgcagagaaagtgagaaagtacaaacacctggaaacggaagtaagacatctcacgaatgcaaaggacgttacttttgtgggctttcccctaggagcgcgggggaaatggcaccaagataactttaaacttttgactgagcttggcctctccaaatcgaggcaagtgaaaatggcagagactttttccacagtagcgctcttttcatctgtggacattgtacatatgtttgccagtagggccagaaaatctatggttatgtgataataggctgccttctgcggggcttgccttctggccatgcccttcttctctcccttgcacctgtacctcttggtctttgaataaagcctgagtaggaaggaccggtagacatgataagatacattgatgagtttggacaaaccacaactagaatgcagtgaaaaaaatgctttatttgtgaaatttgtgatgctattgctttatttgtaaccattataagctgcaataaacaagttaacaacaacaaaaaaaaaaaaaaaaaaaaaaaaaaaaaaacgttgactaaaaaaaaaaaaaaaaaaaaaaaaaaaaaaaaaaaaaaaaaaaaaaaaaaaaaaaaaaaaaaaaaaaaaa

SEQ ID NO: 10281 - DNA, 4727 bp, synthetic construct
  source 1..4727: mol_type = other DNA
ggtctagttacaactgggcatcgctgcagagatcgcacctcctcgtggtcccgctggtagcccttcgaagggtgactaagtcgatctctgccccaggtacggagccgttgggactcaccagtccaacgtaactcctgcctaaattcggtgaaacaaattcctcggtaaaaagccccatggcttcttgcccgaaacctggccccccggtttcagcaggggcaatgagtttggaaagtggactgaccacccactccgttctcgccatcgaacgtggtcccaattcgttggcaaattccggatcagactttgggggggggggtctggggctaccgttacgcctattgagggtatcggtcggcactcagacctcccgctccgactgggtagacctggtgtcctggagccacccaggacccacgtctaagtcccagcaggttgacctggtgtctttatttcctaaacaccgggttgacctgttatccaaaaacgaccaggtagacctggtggctcaatttttaccatctaaatttccccccaatttggcagaaaatgatttggctttgctggtgaacttagagttctacagatcggatttgcatgtgtatgagtgtgttcattttgctgcacattgggagggattaagtggtttgcctgaggtgtatgaacaacttgcaccacaaccgtgtgtgggagaaactttacattctagcctcccacgagacagtgaactgtttgtgcctgaagaggggagcagcgagaaggagagcgaggacgcgccaaaaacatctcctccgacgcctgggaaacatggtttggaacagactggggaggaaaaagtgatggtgactgttcctgacaaaaatccaccttgtccttgctgtggtacccgggtaaactctgtgttgaatctgattgaacatctgaaagtgtcacacgggaaaaggggggtttgttttcggtgtgcaaaatgtggaaaggaaaatagtaactatcacagtgttgtttgtcattttccaaaatgcaggggtccagagacggagaaagccccagctggggagtggatttgtgaggtatgcaacagagattttacaaccaaaattggcctgggacaacacaagagattggcacacccagcagtgagaaatcaggaaaggatcgttgcttcccaaccgaaagaaacatcaaatagaggtgctcacaaaaggtgctggacaaaggaggaggaagaattactaataagactggaggctcagttcgagggaaacaaaaatattaataagcttattgcagaacacataaccaccaaaacagctaagcagatcagtgacaaaaggcgattgctgtccagaaagccagcagaggagccacgtgaggagcctggaacgtgtcatcacaccaggagagcagctgcgagcctgagaacggagcctgagatgagtcatcacgcccaggcagaggacagagataatggacctgggagacgccctctgccaggcagggcagctgccggagggagaacaatggacgagataagacgccaccctgataagggcaacggacagcagagacccaccaagcaaaaatcagaagaacagctgcaggcttactataaaaagacactagaggaacgactttcagctggggcacttaacaccttcccccgagcattcaagcaggtaatggaaggccgggatataaagctagtaatcaatcagacagcgcaggactgcttcggatgcctggaatccataagccaaataagaacggcaacccgagataaaaaggacacggtgacccgggagaaacacccaaagaaaccttttcagaagtggatgaaggacagagcaatcaaaaaaggtaattatcttcggttccagcgtttattttatcttgatagagggaaactggctaaaatcattttagatgatattgaatgcttgtcttgtgacataccactcagtgaaatttattcggtttttaaaacaagatgggaaacaactggtagctttaaaagccttggggactttaaaacttacgggaaggctgacaacactgccttcagagaattaattacggctaaagaaattgagaaaaatgtgcaggaaatgagcaaaggctcggctcccggtccagacgggattactcttggggacgtcgtaaagatggatcccgagttttcccggaccatggagattttcaatttatggttaacaactggtaaaatcccggacatggtgagggggtgcagaaccgttttgattccaaaatcatcaaagccggatcgtttgaaagacattaataactggagacctatcacgatcggttccatcttgctgagactgttctccaggattgtaacagctaggctgagcaaagcgtgccccctgaacccaaggcaaagaggctttatcagagcggcgggatgctctgaaaacttaaaactcctgcaaactataatttggtcggccaaaagagaacacagaccactgggtgttgtattcgtggacatcgccaaggcttttgacaccgtaagccaccagcacatcattcatgctttgcagcaaagagaggtggatccccacatcgtcggtctggtgagcaatatgtacgagaacatcagtacgtatatcaccacaaagaggaacacacacacagacaaaatccagatccgggttggagtaaagcagggtgacccgatgtcgccccttttatttaacctggcaatggaccctctattatgcaagctggaagagagtggcaaaggataccaccgaggacagagcagcatcacagcgatggcatttgcagacgatctggttttgctgagcgactcctgggaaaatatgaatacaaatattagcatactggagaccttctgcaatctgaccggactcaaaacacaggggcaaaagtgccacggcttttacatcaagccgacaaaggactcttacaccatcaatgactgcgctgcctggacttggctgactgaggccagaaaagagatcaacggcacacccctgaacatgatcgaccccggcgaatctgagaaatacctcggcctgcagtttgacccgtggattggaatagcaaggtccggtctctccacaaaactagatttttggcttcagcggatcgatcaagcaccacttaaacctctgcagaaaactgatattctcaaaacatacaccatccctcggctgatctacatagctgaccactcagaagtgaaaactgcactactcgaaacccttgaccagaagatccggacagcggtcaaggaatggcttcacctacctccgtgcacctgcgatgccatcctgtactcgagcacgagagacggcggtttgggcatcaccaaattggcaggactgatccccagcgtgcaggcccgtagactgcatcggatcgcacagtcatctgacgatacgatgaaatgcttcatggaaaaagagaaaatggaacagctgcataagaaattgtggattcaagctggaggggacagagagaacataccctcgatttgggaagcaccaccgtcgagtgaaccaccaaacaacgtgagcacaaattcggaatgggaagcaccgacccagaaagataaatttccaaagccttgcaattggaggaaaaacgaattcaaaaaatggaccaaattggcatcccaaggccgcggaattgtaaattttgaaagagacaaaattagtaaccattggatccaatactacagacgcatacctcacaggaaactcctcactgcactacaactcagggccaacgtttaccccacgagagaatttctagccaggggtagacaagaccaatacatcaaggcgtgtaggcactgcgatgcggacattgaatcctgcgcccacatcatcggcaactgcccagtgacacaggacgcccgaatcaagaggcacaattacatctgcgaactgcttctcgaggaggcgaagaagaaggactgggtagtgttcaaggaaccgcacataagggattccaacaaggaactgtacaaacctgacctgatatttgtgaaggatgcccgtgcacttgtcgtggatgtgacagtacggtatgaagcagccaaatcatcgctggaggaagccgctgcagagaaagtgagaaagtacaaacacctggaaacggaagtaagacatctcacgaatgcaaaggacgttacttttgtgggctttcccctaggagcgcgggggaaatggcaccaagataactttaaacttttgactgagcttggcctctccaaatcgaggcaagtgaaaatggcagagactttttccacagtagcgctcttttcatctgtggacattgtacatatgtttgccagtagggccagaaaatctatggttatgtgataataggctgccttctgcggggcttgccttctggccatgcccttcttctctcccttgcacctgtacctcttggtctttgaataaagcctgagtaggaaggaccggtagacatgataagatacattgatgagtttggacaaaccacaactagaatgcagtgaaaaaaatgctttatttgtgaaatttgtgatgctattgctttatttgtaaccattataagctgcaataaacaagttaacaacaacaaaaaaaaaaaaaaaaaaaaaaaaaaaaaaacgttgactaaaaaaaaaaaaaaaaaaaaaaaaaaaaaaaaaaaaaaaaaaaaaaaaaaaaaaaaaaaaaaaaaaaaaa

SEQ ID NO: 10282 - DNA, 4700 bp, synthetic construct
  source 1..4700: mol_type = other DNA
ggtctagttacaactgggcatcgctgcagagatcgcacctcctcgtggtcccgctggtagcccttcgaagggtgactaagtcgatctctgccccaggtacggagccgttgggactcaccagtccaacgtaactcctgcctaaattcggtgaaacaaattcctcggtaaaaagccccatggcttcttgcccgaaacctggccccccggtttcagcaggggcaatgagtttggaaagtggactgaccacccactccgttctcgccatcgaacgtggtcccaattcgttggcaaattccggatcagactttgggggggggggtctggggctaccgttacgcctattgagggtatcggtcggcactcagacctcccgctccgactgggtagacctggtgtcctggagccacccaggacccacgtctaagtcccagcaggttgacctggtgtctttatttcctaaacaccgggttgacctgttatccaaaaacgaccaggtagacctggtggctcaatttttaccatctaaatttccccccaatttggcagaaaatgatttggctttgctggtgaacttagagttctacagatcggatttgcatgtgtatgagtgtgttcattttgctgcacattgggagggattaagtggtttgcctgaggtgtatgaacaacttgcaccacaaccgtgtgtgggagaaactttacattctagcctcccacgagacagtgaactgtttgtgcctgaagaggggagcagcgagaaggagagcgaggacgcgccaaaaacatctcctccgacgcctgggaaacatggtttggaacagactggggaggaaaaagtgatggtgactgttcctgacaaaaatccaccttgtccttgctgtggtacccgggtaaactctgtgttgaatctgattgaacatctgaaagtgtcacacgggaaaaggggggtttgttttcggtgtgcaaaatgtggaaaggaaaatagtaactatcacagtgttgtttgtcattttccaaaatgcaggggtccagagacggagaaagccccagctggggagtggatttgtgaggtatgcaacagagattttacaaccaaaattggcctgggacaacacaagagattggcacacccagcagtgagaaatcaggaaaggatcgttgcttcccaaccgaaagaaacatcaaatagaggtgctcacaaaaggtgctggacaaaggaggaggaagaattactaataagactggaggctcagttcgagggaaacaaaaatattaataagcttattgcagaacacataaccaccaaaacagctaagcagatcagtgacaaaaggcgattgctgtccagaaagccagcagaggagccacgtgaggagcctggaacgtgtcatcacaccaggagagcagctgcgagcctgagaacggagcctgagatgagtcatcacgcccaggcagaggacagagataatggacctgggagacgccctctgccaggcagggcagctgccggagggagaacaatggacgagataagacgccaccctgataagggcaacggacagcagagacccaccaagcaaaaatcagaagaacagctgcaggcttactataaaaagacactagaggaacgactttcagctggggcacttaacaccttcccccgagcattcaagcaggtaatggaaggccgggatataaagctagtaatcaatcagacagcgcaggactgcttcggatgcctggaatccataagccaaataagaacggcaacccgagataaaaaggacacggtgacccgggagaaacacccaaagaaaccttttcagaagtggatgaaggacagagcaatcaaaaaaggtaattatcttcggttccagcgtttattttatcttgatagagggaaactggctaaaatcattttagatgatattgaatgcttgtcttgtgacataccactcagtgaaatttattcggtttttaaaacaagatgggaaacaactggtagctttaaaagccttggggactttaaaacttacgggaaggctgacaacactgccttcagagaattaattacggctaaagaaattgagaaaaatgtgcaggaaatgagcaaaggctcggctcccggtccagacgggattactcttggggacgtcgtaaagatggatcccgagttttcccggaccatggagattttcaatttatggttaacaactggtaaaatcccggacatggtgagggggtgcagaaccgttttgattccaaaatcatcaaagccggatcgtttgaaagacattaataactggagacctatcacgatcggttccatcttgctgagactgttctccaggattgtaacagctaggctgagcaaagcgtgccccctgaacccaaggcaaagaggctttatcagagcggcgggatgctctgaaaacttaaaactcctgcaaactataatttggtcggccaaaagagaacacagaccactgggtgttgtattcgtggacatcgccaaggcttttgacaccgtaagccaccagcacatcattcatgctttgcagcaaagagaggtggatccccacatcgtcggtctggtgagcaatatgtacgagaacatcagtacgtatatcaccacaaagaggaacacacacacagacaaaatccagatccgggttggagtaaagcagggtttcaaaaacagtcccgccctgtttaatgaggcactgaggagagacctagcagacttccggatccagcacccagacttgatcctgctacagtacgtggatgacttactgctggccgccacttctgagctagactgccaacaaggtactcgggccctgttacaaaccctagggaacctcgggtatcgggcctcggccaagaaagcccaaatttgccagaaacaggtcaagtatctggggtatcttctaaaagagggtcagagatggctgactgaggccagaaaagagactgtgatggggcagcctactccgaaaacccctcgacaactaaggaagttcctagggctgcagtttgacccgtggattggaatagcaaggtccggtctctccacaaaactagatttttggcttcagcggatcgatcaagcaccacttaaacctctgcagaaaactgatattctcaaaacatacaccatccctcggctgatctacatagctgaccactcagaagtgaaaactgcactactcgaaacccttgaccagaagatccggacagcggtcaaggaatggcttcacctacctccgtgcacctgcgatgccatcctgtactcgagcacgagagacggcggtttgggcatcaccaaattggcaggactgatccccagcgtgcaggcccgtagactgcatcggatcgcacagtcatctgacgatacgatgaaatgcttcatggaaaaagagaaaatggaacagctgcataagaaattgtggattcaagctggaggggacagagagaacataccctcgatttgggaagcaccaccgtcgagtgaaccaccaaacaacgtgagcacaaattcggaatgggaagcaccgacccagaaagataaatttccaaagccttgcaattggaggaaaaacgaattcaaaaaatggaccaaattggcatcccaaggccgcggaattgtaaattttgaaagagacaaaattagtaaccattggatccaatactacagacgcatacctcacaggaaactcctcactgcactacaactcagggccaacgtttaccccacgagagaatttctagccaggggtagacaagaccaatacatcaaggcgtgtaggcactgcgatgcggacattgaatcctgcgcccacatcatcggcaactgcccagtgacacaggacgcccgaatcaagaggcacaattacatctgcgaactgcttctcgaggaggcgaagaagaaggactgggtagtgttcaaggaaccgcacataagggattccaacaaggaactgtacaaacctgacctgatatttgtgaaggatgcccgtgcacttgtcgtggatgtgacagtacggtatgaagcagccaaatcatcgctggaggaagccgctgcagagaaagtgagaaagtacaaacacctggaaacggaagtaagacatctcacgaatgcaaaggacgttacttttgtgggctttcccctaggagcgcgggggaaatggcaccaagataactttaaacttttgactgagcttggcctctccaaatcgaggcaagtgaaaatggcagagactttttccacagtagcgctcttttcatctgtggacattgtacatatgtttgccagtagggccagaaaatctatggttatgtgataataggctgccttctgcggggcttgccttctggccatgcccttcttctctcccttgcacctgtacctcttggtctttgaataaagcctgagtaggaaggaccggtagacatgataagatacattgatgagtttggacaaaccacaactagaatgcagtgaaaaaaatgctttatttgtgaaatttgtgatgctattgctttatttgtaaccattataagctgcaataaacaagttaacaacaacaaaaaaaaaaaaaaaaaaaaaaaaaaaaaaacgttgactaaaaaaaaaaaaaaaaaaaaaaaaaaaaaaaaaaaaaaaaaaaaaaaaaaaaaaaaaaaaaaaaaaaaaa

SEQ ID NO: 10283 - DNA, 5999 bp, synthetic construct
  source 1..5999: mol_type = other DNA
ggtctagttacaactgggcatcgctgcagagatcgcacctcctcgtggtcccgctggtagcccttcgaagggtgactaagtcgatctctgccccaggtacggagccgttgggactcaccagtccaacgtaactcctgcctaaattcggtgaaacaaattcctcggtaaaaagccccatggcttcttgcccgaaacctggccccccggtttcagcaggggcaatgagtttggaaagtggactgaccacccactccgttctcgccatcgaacgtggtcccaattcgttggcaaattccggatcagactttgggggggggggtctggggctaccgttacgcctattgagggtatcggtcggcactcagacctcccgctccgactgggtagacctggtgtcctggagccacccaggacccacgtctaagtcccagcaggttgacctggtgtctttatttcctaaacaccgggttgacctgttatccaaaaacgaccaggtagacctggtggctcaatttttaccatctaaatttccccccaatttggcagaaaatgatttggctttgctggtgaacttagagttctacagatcggatttgcatgtgtatgagtgtgttcattttgctgcacattgggagggattaagtggtttgcctgaggtgtatgaacaacttgcaccacaaccgtgtgtgggagaaactttacattctagcctcccacgagacagtgaactgtttgtgcctgaagaggggagcagcgagaaggagagcgaggacgcgccaaaaacatctcctccgacgcctgggaaacatggtttggaacagactggggaggaaaaagtgatggtgactgttcctgacaaaaatccaccttgtccttgctgtggtacccgggtaaactctgtgttgaatctgattgaacatctgaaagtgtcacacgggaaaaggggggtttgttttcggtgtgcaaaatgtggaaaggaaaatagtaactatcacagtgttgtttgtcattttccaaaatgcaggggtccagagacggagaaagccccagctggggagtggatttgtgaggtatgcaacagagattttacaaccaaaattggcctgggacaacacaagagattggcacacccagcagtgagaaatcaggaaaggatcgttgcttcccaaccgaaagaaacatcaaatagaggtgctcacaaaaggtgctggacaaaggaggaggaagaattactaataagactggaggctcagttcgagggaaacaaaaatattaataagcttattgcagaacacataaccaccaaaacagctaagcagatcagtgacaaaaggcgattgctgtccagaaagccagcagaggagccacgtgaggagcctggaacgtgtcatcacaccaggagagcagctgcgagcctgagaacggagcctgagatgagtcatcacgcccaggcagaggacagagataatggacctgggagacgccctctgccaggcagggcagctgccggagggagaacaatggacgagataagacgccaccctgataagggcaacggacagcagagacccaccaagcaaaaatcagaagaacagctgcaggcttactataaaaagacactagaggaacgactttcagctggggcacttaacaccttcccccgagcattcaagcaggtaatggaaggccgggatataaagctagtaatcaatcagacagcgcaggactgcttcggatgcctggaatccataagccaaataagaacggcaacccgagataaaaaggacacggtgacccgggagaaacacccaaagaaaccttttcagaagtggatgaaggacagagcaatcaaaaaaggtaattatcttcggttccagcgtttattttatcttgatagagggaaactggctaaaatcattttagatgatattgaatgcttgtcttgtgacataccactcagtgaaatttattcggtttttaaaacaagatgggaaacaactggtagctttaaaagccttggggactttaaaacttacgggaaggctgacaacactgccttcagagaattaattacggctaaagaaattgagaaaaatgtgcaggaaatgagcaaaggctcggctcccggtccagacgggattactcttggggacgtcgtaaagatggatcccgagttttcccggaccatggagattttcaatttatggttaacaactggtaaaatcccggacatggtgagggggtgcagaaccgttttgattaccctaaatatagaagatgagtatcggctacatgagacctcaaaagagccagatgtttctctagggtccacatggctgtctgattttcctcaggcctgggcggaaaccgggggcatgggactggcagttcgccaagctcctctgatcatactgctgaaagcaacctctacccccgtgtccataaaacaataccccatgaggcaaaaggccagactggggatcaagccccacatacagagactgttggaccagggaatactggtaccctgccagtccccctggaacacgcccctgctacccgttaagaaaccagggactaatgattataggcctgtccaggatctgagagaagtcaacaagcgggtggaggacatccaccccaccgtgcccaacccttacaacctcttgagcgggctcccaccgtcccaccagtggtacactgtgcttgatttaaaggatgcctttttctgcctgagactccaccccaccagtcagcctctcttcgcctttgagtggagagatccagagatgggaatctcaggacaattgacctggaccagactcccacagggtttcaaaaacagtcccgccctgtttaatgaggcactgaggagagacctagcagacttccggatccagcacccagacttgatcctgctacagtacgtggatgacttactgctggccgccacttctgagctagactgccaacaaggtactcgggccctgttacaaaccctagggaacctcgggtatcgggcctcggccaagaaagcccaaatttgccagaaacaggtcaagtatctggggtatcttctaaaagagggtcagagatggctgactgaggccagaaaagagactgtgatggggcagcctactccgaaaacccctcgacaactaaggaagttcctagggaaggcaggcaactgtcgcctcttcatccctgggtttgcagaaatggcagcccccctgtaccctctcaccaaaccggggactctgtttaattggggcccagaccaacaaaaggcctatcaagaaatcaagcaagctcttctaactgccccagccctggggttgccagatttgactaagccctttgaactctttgtcgacgagaagcagggctacgccaaaggtgtcctaacgcaaaaactgggaccttggcgtcggccggtggcctacctgtccaaaaagctagacccagtagcagctgggtggcccccttgcctacggatggtagcagccattgccgtactgacaaaggatgcaggcaagctaaccatgggacagccactagtcattggcgccccccatgcagtagaggcactagtcaaacaaccccccgaccgctggctttccaaggcccggatgactcactatcaggccttgcttttggacacggaccgggtccagttcggaccggtggtagccctgaacccggctacgctgctcccactgcctgaggaagggctgcaacacaactgccttgatatcctggccgaagcccacggaacccgacccgacctaacggaccagccgctcccagacgccgaccacacctggtacacgggcggaagcagtctcttacaagagggacagcgtaaggcgggagctgcggtgaccaccgagaccgaggtaatctgggctaaagccctgccagccgggacatccgctcagcgggctgaactgatagcactcacccaggccctaaagatggcagaaggtaagaagctaaatgtttatactaacagccgttatgcttttgctactgcccatatccagggagaaatatacagaaggcgtgggtggctcacatcagaaggcaaagagatcaaaaataaagacgagatcttggccctactaaaagccctctttctgcccaaaagacttagcataatccattgtccaggacatcaaaagggacacagcgccgaggctagaggcaaccggatggctaaccaagcggcccgaaaggcagccatcacagagactccagacacctctaccctccccatagaaaattcatcaccctctggcggctcaaaaagaaccgccgacggcagcgaattcgagcagtttgacccgtggattggaatagcaaggtccggtctctccacaaaactagatttttggcttcagcggatcgatcaagcaccacttaaacctctgcagaaaactgatattctcaaaacatacaccatccctcggctgatctacatagctgaccactcagaagtgaaaactgcactactcgaaacccttgaccagaagatccggacagcggtcaaggaatggcttcacctacctccgtgcacctgcgatgccatcctgtactcgagcacgagagacggcggtttgggcatcaccaaattggcaggactgatccccagcgtgcaggcccgtagactgcatcggatcgcacagtcatctgacgatacgatgaaatgcttcatggaaaaagagaaaatggaacagctgcataagaaattgtggattcaagctggaggggacagagagaacataccctcgatttgggaagcaccaccgtcgagtgaaccaccaaacaacgtgagcacaaattcggaatgggaagcaccgacccagaaagataaatttccaaagccttgcaattggaggaaaaacgaattcaaaaaatggaccaaattggcatcccaaggccgcggaattgtaaattttgaaagagacaaaattagtaaccattggatccaatactacagacgcatacctcacaggaaactcctcactgcactacaactcagggccaacgtttaccccacgagagaatttctagccaggggtagacaagaccaatacatcaaggcgtgtaggcactgcgatgcggacattgaatcctgcgcccacatcatcggcaactgcccagtgacacaggacgcccgaatcaagaggcacaattacatctgcgaactgcttctcgaggaggcgaagaagaaggactgggtagtgttcaaggaaccgcacataagggattccaacaaggaactgtacaaacctgacctgatatttgtgaaggatgcccgtgcacttgtcgtggatgtgacagtacggtatgaagcagccaaatcatcgctggaggaagccgctgcagagaaagtgagaaagtacaaacacctggaaacggaagtaagacatctcacgaatgcaaaggacgttacttttgtgggctttcccctaggagcgcgggggaaatggcaccaagataactttaaacttttgactgagcttggcctctccaaatcgaggcaagtgaaaatggcagagactttttccacagtagcgctcttttcatctgtggacattgtacatatgtttgccagtagggccagaaaatctatggttatgtgataataggctgccttctgcggggcttgccttctggccatgcccttcttctctcccttgcacctgtacctcttggtctttgaataaagcctgagtaggaaggaccggtagacatgataagatacattgatgagtttggacaaaccacaactagaatgcagtgaaaaaaatgctttatttgtgaaatttgtgatgctattgctttatttgtaaccattataagctgcaataaacaagttaacaacaacaaaaaaaaaaaaaaaaaaaaaaaaaaaaaaacgttgactaaaaaaaaaaaaaaaaaaaaaaaaaaaaaaaaaaaaaaaaaaaaaaaaaaaaaaaaaaaaaaaaaaaaaa

SEQ ID NO: 10284 - DNA, 4703 bp, synthetic construct
  source 1..4703: mol_type = other DNA
ggtctagttacaactgggcatcgctgcagagatcgcacctcctcgtggtcccgctggtagcccttcgaagggtgactaagtcgatctctgccccaggtacggagccgttgggactcaccagtccaacgtaactcctgcctaaattcggtgaaacaaattcctcggtaaaaagccccatggcttcttgcccgaaacctggccccccggtttcagcaggggcaatgagtttggaaagtggactgaccacccactccgttctcgccatcgaacgtggtcccaattcgttggcaaattccggatcagactttgggggggggggtctggggctaccgttacgcctattgagggtatcggtcggcactcagacctcccgctccgactgggtagacctggtgtcctggagccacccaggacccacgtctaagtcccagcaggttgacctggtgtctttatttcctaaacaccgggttgacctgttatccaaaaacgaccaggtagacctggtggctcaatttttaccatctaaatttccccccaatttggcagaaaatgatttggctttgctggtgaacttagagttctacagatcggatttgcatgtgtatgagtgtgttcattttgctgcacattgggagggattaagtggtttgcctgaggtgtatgaacaacttgcaccacaaccgtgtgtgggagaaactttacattctagcctcccacgagacagtgaactgtttgtgcctgaagaggggagcagcgagaaggagagcgaggacgcgccaaaaacatctcctccgacgcctgggaaacatggtttggaacagactggggaggaaaaagtgatggtgactgttcctgacaaaaatccaccttgtccttgctgtggtacccgggtaaactctgtgttgaatctgattgaacatctgaaagtgtcacacgggaaaaggggggtttgttttcggtgtgcaaaatgtggaaaggaaaatagtaactatcacagtgttgtttgtcattttccaaaatgcaggggtccagagacggagaaagccccagctggggagtggatttgtgaggtatgcaacagagattttacaaccaaaattggcctgggacaacacaagagattggcacacccagcagtgagaaatcaggaaaggatcgttgcttcccaaccgaaagaaacatcaaatagaggtgctcacaaaaggtgctggacaaaggaggaggaagaattactaataagactggaggctcagttcgagggaaacaaaaatattaataagcttattgcagaacacataaccaccaaaacagctaagcagatcagtgacaaaaggcgattgctgtccagaaagccagcagaggagccacgtgaggagcctggaacgtgtcatcacaccaggagagcagctgcgagcctgagaacggagcctgagatgagtcatcacgcccaggcagaggacagagataatggacctgggagacgccctctgccaggcagggcagctgccggagggagaacaatggacgagataagacgccaccctgataagggcaacggacagcagagacccaccaagcaaaaatcagaagaacagctgcaggcttactataaaaagacactagaggaacgactttcagctggggcacttaacaccttcccccgagcattcaagcaggtaatggaaggccgggatataaagctagtaatcaatcagacagcgcaggactgcttcggatgcctggaatccataagccaaataagaacggcaacccgagataaaaaggacacggtgacccgggagaaacacccaaagaaaccttttcagaagtggatgaaggacagagcaatcaaaaaaggtaattatcttcggttccagcgtttattttatcttgatagagggaaactggctaaaatcattttagatgatattgaatgcttgtcttgtgacataccactcagtgaaatttattcggtttttaaaacaagatgggaaacaactggtagctttaaaagccttggggactttaaaacttacgggaaggctgacaacactgccttcagagaattaattacggctaaagaaattgagaaaaatgtgcaggaaatgagcaaaggctcggctcccggtccagacgggattactcttggggacgtcgtaaagatggatcccgagttttcccggaccatggagattttcaatttatggttaacaactggtaaaatcccggacatggtgagggggtgcagaaccgttttgattccaaaatcatcaaagccggatcgtttgaaagacattaataactggagacctatcacgatcggttccatcttgctgagactgttctccaggattgtaacagctaggctgagcaaagcgtgccccctgaacccaaggcaaagaggctttatcagagcggcgggatgctctgaaaacttaaaactcctgcaaactataatttggtcggccaaaagagaacacagaccactgggtgttgtattcgtggacatcgccaaggcttttgacaccgtaagccaccagcacatcattcatgctttgcagcaaagagaggtggatccccacatcgtcggtctggtgagcaatatgtacgagaacatcagtacgtatatcaccacaaagaggaacacacacacagacaaaatccagatccgggttggagtaaagcagggtgacccgatgtcgcccgccttatttaacctggcaatgaggcctctattatgcaagctggaagagagtggcaaaggataccaccgaggacagagcagcatcacagcgatggcatttgcagacgatctggttttgctgagcgactcctgggaaaatatgaatacaaatattagcatactggagaccttctgcaatctgaccggactcaaaacacaggggcaaaagtgccacggcttttacatcaagccgacaaaggactcttacaccatcaatgactgcgctgcctggactatcaacggcacacccctgaacatgatcgaccccggcgaatctgagaaatacctcggcctgcagtttgacccgtggattggaatagcaaggtccggtctctccacaaaactagatttttggcttcagcggatcgatcaagcaccacttaaacctctgcagaaaactgatattctcaaaacatacaccatccctcggctgatctacatagctgaccactcagaagtgaaaactgcactactcgaaacccttgaccagaagatccggacagcggtcaaggaatggcttcacctacctccgtgcacctgcgatgccatcctgtactcgagcacgagagacggcggtttgggcatcaccaaattggcaggactgatccccagcgtgcaggcccgtagactgcatcggatcgcacagtcatctgacgatacgatgaaatgcttcatggaaaaagagaaaatggaacagctgcataagaaattgtggattcaagctggaggggacagagagaacataccctcgatttgggaagcaccaccgtcgagtgaaccaccaaacaacgtgagcacaaattcggaatgggaagcaggcacccagaaagataaatttccaaagccttgcaattggaggaaaaacgaattcaaaaaatggaccaaattggcatcccaaggccgcggaattgtaaattttgaaagagacaaaattagtaaccattggatccaatactacagacgcataaaccacaggaaactcctcactgcactacaactccaggccaacgtttaccccacgagagaatttctagccaggggtagacaagaccaatacatcaaggcgtgtaggcactgcgatgcggacattgaatcctgcgcccacatcatcggcaactgcccagtgacacaggacgcccgaatcaagaggcacaattacatctgcgaactgcttctcgaggaggcgaagaagaaggactgggtagtgttcaaggaaccgcacataagggattccaacaaggaactgtacaaacctgacctgatatttgtgaaggatgcccgtgcacttgtcgtggatgtgacagtacggtatgaagcagccaaatcatcgctggaggaagccgctgcagagaaagtgagaaactacaaacacctggaaacggaagtaagacatctcacgaatgcaaaggacgttacttttgtgggctttcccctaggagcgcgggggaaatggcaccaagataactttaaacttttgactgagcttggcctctccaaatcgaggcaagtgaaaatggcagagactttttccacagtagcgctcttttcatctgtggacattgtacatatgtttgccagtagggccagaaaatctatggttatgtgataataggctgccttctgcggggcttgccttctggccatgcccttcttctctcccttgcacctgtacctcttggtctttgaataaagcctgagtaggaaggaccggtagacatgataagatacattgatgagtttggacaaaccacaactagaatgcagtgaaaaaaatgctttatttgtgaaatttgtgatgctattgctttatttgtaaccattataagctgcaataaacaagttaacaacaacaaaaaaaaaaaaaaaaaaaaaaaaaaaaaaacgttgactaaaaaaaaaaaaaaaaaaaaaaaaaaaaaaaaaaaaaaaaaaaaaaaaaaaaaaaaaaaaaaaaaaaaaa

SEQ ID NO: 10285 - DNA, 4730 bp, synthetic construct
  source 1..4730: mol_type = other DNA
ggtctagttacaactgggcatcgctgcagagatcgcacctcctcgtggtcccgctggtagcccttcgaagggtgactaagtcgatctctgccccaggtacggagccgttgggactcaccagtccaacgtaactcctgcctaaattcggtgaaacaaattcctcggtaaaaagccccatggcttcttgcccgaaacctggccccccggtttcagcaggggcaatgagtttggaaagtggactgaccacccactccgttctcgccatcgaacgtggtcccaattcgttggcaaattccggatcagactttgggggggggggtctggggctaccgttacgcctattgagggtatcggtcggcactcagacctcccgctccgactgggtagacctggtgtcctggagccacccaggacccacgtctaagtcccagcaggttgacctggtgtctttatttcctaaacaccgggttgacctgttatccaaaaacgaccaggtagacctggtggctcaatttttaccatctaaatttccccccaatttggcagaaaatgatttggctttgctggtgaacttagagttctacagatcggatttgcatgtgtatgagtgtgttcattttgctgcacattgggagggattaagtggtttgcctgaggtgtatgaacaacttgcaccacaaccgtgtgtgggagaaactttacattctagcctcccacgagacagtgaactgtttgtgcctgaagaggggagcagcgagaaggagagcgaggacgcgccaaaaacatctcctccgacgcctgggaaacatggtttggaacagactggggaggaaaaagtgatggtgactgttcctgacaaaaatccaccttgtccttgctgtggtacccgggtaaactctgtgttgaatctgattgaacatctgaaagtgtcacacgggaaaaggggggtttgttttcggtgtgcaaaatgtggaaaggaaaatagtaactatcacagtgttgtttgtcattttccaaaatgcaggggtccagagacggagaaagccccagctggggagtggatttgtgaggtatgcaacagagattttacaaccaaaattggcctgggacaacacaagagattggcacacccagcagtgagaaatcaggaaaggatcgttgcttcccaaccgaaagaaacatcaaatagaggtgctcacaaaaggtgctggacaaaggaggaggaagaattactaataagactggaggctcagttcgagggaaacaaaaatattaataagcttattgcagaacacataaccaccaaaacagctaagcagatcagtgacaaaaggcgattgctgtccagaaagccagcagaggagccacgtgaggagcctggaacgtgtcatcacaccaggagagcagctgcgagcctgagaacggagcctgagatgagtcatcacgcccaggcagaggacagagataatggacctgggagacgccctctgccaggcagggcagctgccggagggagaacaatggacgagataagacgccaccctgataagggcaacggacagcagagacccaccaagcaaaaatcagaagaacagctgcaggcttactataaaaagacactagaggaacgactttcagctggggcacttaacaccttcccccgagcattcaagcaggtaatggaaggccgggatataaagctagtaatcaatcagacagcgcaggactgcttcggatgcctggaatccataagccaaataagaacggcaacccgagataaaaaggacacggtgacccgggagaaacacccaaagaaaccttttcagaagtggatgaaggacagagcaatcaaaaaaggtaattatcttcggttccagcgtttattttatcttgatagagggaaactggctaaaatcattttagatgatattgaatgcttgtcttgtgacataccactcagtgaaatttattcggtttttaaaacaagatgggaaacaactggtagctttaaaagccttggggactttaaaacttacgggaaggctgacaacactgccttcagagaattaattacggctaaagaaattgagaaaaatgtgcaggaaatgagcaaaggctcggctcccggtccagacgggattactcttggggacgtcgtaaagatggatcccgagttttcccggaccatggagattttcaatttatggttaacaactggtaaaatcccggacatggtgagggggtgcagaaccgttttgattccaaaatcatcaaagccggatcgtttgaaagacattaataactggagacctatcacgatcggttccatcttgctgagactgttctccaggattgtaacagctaggctgagcaaagcgtgccccctgaacccaaggcaaagaggctttatcagagcggcgggatgctctgaaaacttaaaactcctgcaaactataatttggtcggccaaaagagaacacagaccactgggtgttgtattcgtggacatcgccaaggcttttgacaccgtaagccaccagcacatcattcatgctttgcagcaaagagaggtggatccccacatcgtcggtctggtgagcaatatgtacgagaacatcagtacgtatatcaccacaaagaggaacacacacacagacaaaatccagatccgggttggagtaaagcagggtgacccgatgtcgccccttttatttaacctggcaatggaccctctattatgcaagctggaagagagtggcaaaggataccaccgaggacagagcagcatcacagcgatggcatttgcagacgatctggttttgctgagcgactcctgggaaaatatgaatacaaatattagcatactggagaccttctgcaatctgaccggactcaaaacacaggggcaaaagtgccacggcttttacatcaagccgacaaaggactcttacaccatcaatgactgcgctgcctggactatcaacggcacacccctgaacatgatcgaccccggcgaatctgagaaatacctcggcctgaggaagaagaggaggcagaggaggaggcagtttgacccgtggattggaatagcaaggtccggtctctccacaaaactagatttttggcttcagcggatcgatcaagcaccacttaaacctctgcagaaaactgatattctcaaaacatacaccatccctcggctgatctacatagctgaccactcagaagtgaaaactgcactactcgaaacccttgaccagaagatccggacagcggtcaaggaatggcttcacctacctccgtgcacctgcgatgccatcctgtactcgagcacgagagacggcggtttgggcatcaccaaattggcaggactgatccccagcgtgcaggcccgtagactgcatcggatcgcacagtcatctgacgatacgatgaaatgcttcatggaaaaagagaaaatggaacagctgcataagaaattgtggattcaagctggaggggacagagagaacataccctcgatttgggaagcaccaccgtcgagtgaaccaccaaacaacgtgagcacaaattcggaatgggaagcaccgacccagaaagataaatttccaaagccttgcaattggaggaaaaacgaattcaaaaaatggaccaaattggcatcccaaggccgcggaattgtaaattttgaaagagacaaaattagtaaccattggatccaatactacagacgcatacctcacaggaaactcctcactgcactacaactcagggccaacgtttaccccacgagagaatttctagccaggggtagacaagaccaatacatcaaggcgtgtaggcactgcgatgcggacattgaatcctgcgcccacatcatcggcaactgcccagtgacacaggacgcccgaatcaagaggcacaattacatctgcgaactgcttctcgaggaggcgaagaagaaggactgggtagtgttcaaggaaccgcacataagggattccaacaaggaactgtacaaacctgacctgatatttgtgaaggatgcccgtgcacttgtcgtggatgtgacagtacggtatgaagcagccaaatcatcgctggaggaagccgctgcagagaaagtgagaaagtacaaacacctggaaacggaagtaagacatctcacgaatgcaaaggacgttacttttgtgggctttcccctaggagcgcgggggaaatggcaccaagataactttaaacttttgactgagcttggcctctccaaatcgaggcaagtgaaaatggcagagactttttccacagtagcgctcttttcatctgtggacattgtacatatgtttgccagtagggccagaaaatctatggttatgtgataataggctgccttctgcggggcttgccttctggccatgcccttcttctctcccttgcacctgtacctcttggtctttgaataaagcctgagtaggaaggaccggtagacatgataagatacattgatgagtttggacaaaccacaactagaatgcagtgaaaaaaatgctttatttgtgaaatttgtgatgctattgctttatttgtaaccattataagctgcaataaacaagttaacaacaacaaaaaaaaaaaaaaaaaaaaaaaaaaaaaaacgttgactaaaaaaaaaaaaaaaaaaaaaaaaaaaaaaaaaaaaaaaaaaaaaaaaaaaaaaaaaaaaaaaaaaaaaa

SEQ ID NO: 10286 - DNA, 4730 bp, synthetic construct
  source 1..4730: mol_type = other DNA
ggtctagttacaactgggcatcgctgcagagatcgcacctcctcgtggtcccgctggtagcccttcgaagggtgactaagtcgatctctgccccaggtacggagccgttgggactcaccagtccaacgtaactcctgcctaaattcggtgaaacaaattcctcggtaaaaagccccatggcttcttgcccgaaacctggccccccggtttcagcaggggcaatgagtttggaaagtggactgaccacccactccgttctcgccatcgaacgtggtcccaattcgttggcaaattccggatcagactttgggggggggggtctggggctaccgttacgcctattgagggtatcggtcggcactcagacctcccgctccgactgggtagacctggtgtcctggagccacccaggacccacgtctaagtcccagcaggttgacctggtgtctttatttcctaaacaccgggttgacctgttatccaaaaacgaccaggtagacctggtggctcaatttttaccatctaaatttccccccaatttggcagaaaatgatttggctttgctggtgaacttagagttctacagatcggatttgcatgtgtatgagtgtgttcattttgctgcacattgggagggattaagtggtttgcctgaggtgtatgaacaacttgcaccacaaccgtgtgtgggagaaactttacattctagcctcccacgagacagtgaactgtttgtgcctgaagaggggagcagcgagaaggagagcgaggacgcgccaaaaacatctcctccgacgcctgggaaacatggtttggaacagactggggaggaaaaagtgatggtgactgttcctgacaaaaatccaccttgtccttgctgtggtacccgggtaaactctgtgttgaatctgattgaacatctgaaagtgtcacacgggaaaaggggggtttgttttcggtgtgcaaaatgtggaaaggaaaatagtaactatcacagtgttgtttgtcattttccaaaatgcaggggtccagagacggagaaagccccagctggggagtggatttgtgaggtatgcaacagagattttacaaccaaaattggcctgggacaacacaagagattggcacacccagcagtgagaaatcaggaaaggatcgttgcttcccaaccgaaagaaacatcaaatagaggtgctcacaaaaggtgctggacaaaggaggaggaagaattactaataagactggaggctcagttcgagggaaacaaaaatattaataagcttattgcagaacacataaccaccaaaacagctaagcagatcagtgacaaaaggcgattgctgtccagaaagccagcagaggagccacgtgaggagcctggaacgtgtcatcacaccaggagagcagctgcgagcctgagaacggagcctgagatgagtcatcacgcccaggcagaggacagagataatggacctgggagacgccctctgccaggcagggcagctgccggagggagaacaatggacgagataagacgccaccctgataagggcaacggacagcagagacccaccaagcaaaaatcagaagaacagctgcaggcttactataaaaagacactagaggaacgactttcagctggggcacttaacaccttcccccgagcattcaagcaggtaatggaaggccgggatataaagctagtaatcaatcagacagcgcaggactgcttcggatgcctggaatccataagccaaataagaacggcaacccgagataaaaaggacacggtgacccgggagaaacacccaaagaaaccttttcagaagtggatgaaggacagagcaatcaaaaaaggtaattatcttcggttccagcgtttattttatcttgatagagggaaactggctaaaatcattttagatgatattgaatgcttgtcttgtgacataccactcagtgaaatttattcggtttttaaaacaagatgggaaacaactggtagctttaaaagccttggggactttaaaacttacgggaaggctgacaacactgccttcagagaattaattacggctaaagaaattgagaaaaatgtgcaggaaatgagcaaaggctcggctcccggtccagacgggattactcttggggacgtcgtaaagatggatcccgagttttcccggaccatggagattttcaatttatggttaacaactggtaaaatcccggacatggtgagggggtgcagaaccgttttgattccaaaatcatcaaagccggatcgtttgaaagacattaataactggagacctatcacgatcggttccatcttgctgagactgttctccaggattgtaacagctaggctgagcaaagcgtgccccctgaacccaaggcaaagaggctttatcagagcggcgggatgctctgaaaacttaaaactcctgcaaactataatttggtcggccaaaagagaacacagaccactgggtgttgtattcgtggacatcgccaaggcttttgacaccgtaagccaccagcacatcattcatgctttgcagcaaagagaggtggatccccacatcgtcggtctggtgagcaatatgtacgagaacatcagtacgtatatcaccacaaagaggaacacacacacagacaaaatccagatccgggttggagtaaagcagggtgacccgatgtcgccccttttatttaacctggcaatggaccctctattatgcaagctggaagagagtggcaaaggataccaccgaggacagagcagcatcacagcgatggcatttgcagacgatctggttttgctgagcgactcctgggaaaatatgaatacaaatattagcatactggagaccttctgcaatctgaccggactcaaaacacaggggcaaaagtgccacggcttttacatcaagccgacaaaggactcttacaccatcaatgactgcgctgcctggactatcaacggcacacccctgaacatgatcgaccccggcgaatctgagaaatacctcggcctgcagtttgacccgtggattggaatagcaaggtccggtctctccacaaaactagatttttggcttcagcggatcgatcaagcaccacttaaacctctgcagaaaactgatattctcaaaacatacaccatccctcggctgatctacatagctgaccactcagaagtgaaaactgcactactcgaaacccttgaccagaagatccggacagcggtcaaggaatggcttcacctacctccgtgcacctgcgatgccatcctgtactcgagcacgagagacggcggtttgggcatcaccaaattggcaggactgatccccagcgtgcaggcccgtagactgcatcggatcgcacagtcatctgacgatacgatgaaatgcttcatggaaaaagagaaaatggaacagctgcataagaaattgtggattcaagctggaggggacagagagaacataccctcgatttgggaagcaccaccgtcgagtgaaccaccaaacaacgtgagcacaaattcggaatgggaagcaccgacccagaaagataaatttccaaagccttgcaattggaggaaaaacgaattcaaaaaatggaccaaattggcatcccaaggccgcggaattgtaaattttgaaagagacaaaattagtaaccattggatccaatactacagacgcatacctcacaggaaactcctcactgcactacaactcagggccaacgtttaccccacgagagaatttctagccaggggtagacaagaccaatacatcaaggcgtgtaggcactgcgatgcggacattgaatcctgcgcccacatcatcggcaactgcccagtgacacaggacgcccgaatcaagaggcacaattacatctgcgaactgcttctcgaggaggcgaagaagaaggactgggtagtgttcaaggaaccgcacataagggattccaacaaggaactgtacaaacctgacctgatatttgtgaaggatgcccgtgcacttgtcgtggatgtgacagtacggtatgaagcagccaaatcatcgctggaggaagccgctgcagagaaagtgagaaagtacaaacacctggaaacggaagtaagacatctcacgaatgcaaaggacgttacttttgtgggctttcccctaggagcgcgggggaaatggcaccaagataactttaaacttttgactgagcttggcctctccaaatcgaggcaagtgaaaatggcagagactttttccacagtagcgctcttttcatctgtggacattgtacatatgtttgccagtagggccagaaaatctatggttatgaggaagaagaggaggcagaggaggaggtgataataggctgccttctgcggggcttgccttctggccatgcccttcttctctcccttgcacctgtacctcttggtctttgaataaagcctgagtaggaaggaccggtagacatgataagatacattgatgagtttggacaaaccacaactagaatgcagtgaaaaaaatgctttatttgtgaaatttgtgatgctattgctttatttgtaaccattataagctgcaataaacaagttaacaacaacaaaaaaaaaaaaaaaaaaaaaaaaaaaaaaacgttgactaaaaaaaaaaaaaaaaaaaaaaaaaaaaaaaaaaaaaaaaaaaaaaaaaaaaaaaaaaaaaaaaaaaaaa

SEQ ID NO: 10287-10617 - skipped (331 entries)

SEQ ID NO: 10618 - DNA, 4648 bp, synthetic construct
  source 1..4648: mol_type = other DNA
ggtctagttacaactgggcatcgctgcagagatcgcacctcctcgtggtcccgctggtagcccttcgaagggtgactaagtcgatctctgccccaggtacggagccgttgggactcaccagtccaacgtaactcctgcctaaattcggtgaaacaaattcctcggtaaaaagccccatggcccctaagaaaaagagaaaggtggtgaccgtgaagttcaagtacaagggcgaggaaaaggaagtggacatcagcaagatcaagaaggtctggcgggtgggcaagatgatcagctttacctacgacgataacggcaagacaggcagaggcgccgtgtccgagaaggacgcccctaaagagctgctgcagatgctggaaaaaagcggctctgagacacctggaacaagcgagagcgccaccccggaatcccctaagagaaaggtgtccagcgccgagggcgctgccaaggaagagcctaaacggagaagcgccagactgagcgccaagccccccgccaaggtggaagccaagcctaagaaggccgccgctaaggacaagagcagcgataagaaagtccagaccaagggcaagcggggcgccaaaggcaaacaggccgaggtggccaaccaggagacaaaggaagatctgcctgctgagaacggcgaaaccaagaccgaggaatctccagcttctgacgaggccggagagaaggaggccaaaagcgacagcggctctgagacacctggaacaagcgagagcgccaccccggaatccctgtttgtgcctgaagaggggagcagcgagaaggagagcgaggacgcgccaaaaacatctcctccgacgcctgggaaacatggtttggaacagactggggaggaaaaagtgatggtgactgttcctgacaaaaatccaccttgtccttgctgtggtacccgggtaaactctgtgttgaatctgattgaacatctgaaagtgtcacacgggaaaaggggggtttgttttcggtgtgcaaaatgtggaaaggaaaatagtaactatcacagtgttgtttgtcattttccaaaatgcaggggtccagagacggagaaagccccagctggggagtggatttgtgaggtatgcaacagagattttacaaccaaaattggcctgggacaacacaagagattggcacacccagcagtgagaaatcaggaaaggatcgttgcttcccaaccgaaagaaacatcaaatagaggtgctcacaaaaggtgctggacaaaggaggaggaagaattactaataagactggaggctcagttcgagggaaacaaaaatattaataagcttattgcagaacacataaccaccaaaacagctaagcagatcagtgacaaaaggcgattgctgtccagaaagccagcagaggagccacgtgaggagcctggaacgtgtcatcacaccaggagagcagctgcgagcctgagaacggagcctgagatgagtcatcacgcccaggcagaggacagagataatggacctgggagacgccctctgccaggcagggcagctgccggagggagaacaatggacgagataagacgccaccctgataagggcaacggacagcagagacccaccaagcaaaaatcagaagaacagctgcaggcttactataaaaagacactagaggaacgactttcagctggggcacttaacaccttcccccgagcattcaagcaggtaatggaaggccgggatataaagctagtaatcaatcagacagcgcaggactgcttcggatgcctggaatccataagccaaataagaacggcaacccgagataaaaaggacacggtgacccgggagaaacacccaaagaaaccttttcagaagtggatgaaggacagagcaatcaaaaaaggtaattatcttcggttccagcgtttattttatcttgatagagggaaactggctaaaatcattttagatgatattgaatgcttgtcttgtgacataccactcagtgaaatttattcggtttttaaaacaagatgggaaacaactggtagctttaaaagccttggggactttaaaacttacgggaaggctgacaacactgccttcagagaattaattacggctaaagaaattgagaaaaatgtgcaggaaatgagcaaaggctcggctcccggtccagacgggattactcttggggacgtcgtaaagatggatcccgagttttcccggaccatggagattttcaatttatggttaacaactggtaaaatcccggacatggtgagggggtgcagaaccgttttgattccaaaatcatcaaagccggatcgtttgaaagacattaataactggagacctatcacgatcggttccatcttgctgagactgttctccaggattgtaacagctaggctgagcaaagcgtgccccctgaacccaaggcaaagaggctttatcagagcggcgggatgctctgaaaacttaaaactcctgcaaactataatttggtcggccaaaagagaacacagaccactgggtgttgtattcgtggacatcgccaaggcttttgacaccgtaagccaccagcacatcattcatgctttgcagcaaagagaggtggatccccacatcgtcggtctggtgagcaatatgtacgagaacatcagtacgtatatcaccacaaagaggaacacacacacagacaaaatccagatccgggttggagtaaagcagggtgacccgatgtcgccccttttatttaacctggcaatggaccctctattatgcaagctggaagagagtggcaaaggataccaccgaggacagagcagcatcacagcgatggcatttgcagacgatctggttttgctgagcgactcctgggaaaatatgaatacaaatattagcatactggagaccttctgcaatctgaccggactcaaaacacaggggcaaaagtgccacggcttttacatcaagccgacaaaggactcttacaccatcaatgactgcgctgcctggactatcaacggcacacccctgaacatgatcgaccccggcgaatctgagaaatacctcggcctgcagtttgacccgtggattggaatagcaaggtccggtctctccacaaaactagatttttggcttcagcggatcgatcaagcaccacttaaacctctgcagaaaactgatattctcaaaacatacaccatccctcggctgatctacatagctgaccactcagaagtgaaaactgcactactcgaaacccttgaccagaagatccggacagcggtcaaggaatggcttcacctacctccgtgcacctgcgatgccatcctgtactcgagcacgagagacggcggtttgggcatcaccaaattggcaggactgatccccagcgtgcaggcccgtagactgcatcggatcgcacagtcatctgacgatacgatgaaatgcttcatggaaaaagagaaaatggaacagctgcataagaaattgtggattcaagctggaggggacagagagaacataccctcgatttgggaagcaccaccgtcgagtgaaccaccaaacaacgtgagcacaaattcggaatgggaagcaccgacccagaaagataaatttccaaagccttgcaattggaggaaaaacgaattcaaaaaatggaccaaattggcatcccaaggccgcggaattgtaaattttgaaagagacaaaattagtaaccattggatccaatactacagacgcatacctcacaggaaactcctcactgcactacaactcagggccaacgtttaccccacgagagaatttctagccaggggtagacaagaccaatacatcaaggcgtgtaggcactgcgatgcggacattgaatcctgcgcccacatcatcggcaactgcccagtgacacaggacgcccgaatcaagaggcacaattacatctgcgaactgcttctcgaggaggcgaagaagaaggactgggtagtgttcaaggaaccgcacataagggattccaacaaggaactgtacaaacctgacctgatatttgtgaaggatgcccgtgcacttgtcgtggatgtgacagtacggtatgaagcagccaaatcatcgctggaggaagccgctgcagagaaagtgagaaagtacaaacacctggaaacggaagtaagacatctcacgaatgcaaaggacgttacttttgtgggctttcccctaggagcgcgggggaaatggcaccaagataactttaaacttttgactgagcttggcctctccaaatcgaggcaagtgaaaatggcagagactttttccacagtagcgctcttttcatctgtggacattgtacatatgtttgccagtagggccagaaaatctatggttatgtaaaccggtagacatgataagatacattgatgagtttggacaaaccacaactagaatgcagtgaaaaaaatgctttatttgtgaaatttgtgatgctattgctttatttgtaaccattataagctgcaataaacaagttaacaacaacaaaaaaaaaaaaaaaaaaaaaaaaaaaaaaacgttgactaaaaaaaaaaaaaaaaaaaaaaaaaaaaaaaaaaaaaaaaaaaaaaaaaaaaaaaaaaaaaaaaaaaaaa

SEQ ID NO: 10619 - DNA, 5195 bp, synthetic construct
  source 1..5195: mol_type = other DNA
gaaataagagagaaaagaagagtaagaagaaatataagagaattcgccaccatggcccctaagaaaaagcggaaggtgaatatcagcggctctagctgcggcagccccaacagcgccgacaccagcagcgacttcaaggacctgtggaccaagctgaaggaatgccacgaccgggaagtgcagggactccaggtgaaggtcaccaaactcaagcaagaaagaatcctggacgcccagagactggaagaattcttcaccaagaaccagcagctgagagagcagcagaaagtgctgcacgagacaatcaaggttctggaagatagactgcgggccggcctgtgcgacagatgcgccgtgaccgaggaacacatgcgcaaaaagcagcaggagttcgagaacattagacagcaaaatctgaaattgatcacagagctgatgaacgagagaaacacactgcaggaggagaacaagaagctgagcgagcagctgcaacagaagatcgagaatgatcagcaacaccaggccgctgagctggaatgtgaagaggacgtgatccccgacagcccaatcacagctttcagcttttctggcgtgaacagactgaggcggaaggaaaacccccacgtgcggtacatcgagcagacccataccaagctggaacacagcgtgtgtgccaacgagatgagaaaggtgtccaagtcctccacccatccccagcacaaccctaacgaaaatgagatcctggtggctgatacctacgaccagtctcagagccctatggccaaggcccacggcaccagctcttatacccctgataagagctccttcaacctggccaccgtggtggccgagacactgggcctgggcgtgcaggaggaaagcgagacacagggcccaatgagccctctgggagatgagctgtaccactgcctggaaggcaaccacaagaaacagccttttgagtccggctccgagactcctggaacaagcgagagcgctacacctgagggcagccctaagagaaaggtgtccagcgccgagggcgctgccaaggaagagcctaaacggagaagcgccagactgagcgccaagccccccgccaaggtggaagccaagcctaagaaggccgccgctaaggacaagagcagcgataagaaagtccagaccaagggcaagcggggcgccaaaggcaaacaggccgaggtggccaaccaggagacaaaggaagatctgcctgctgagaacggcgaaaccaagaccgaggaatctccagcttctgacgaggccggagagaaggaggccaaaagcgacagcggctctgagacacctggaacaagcgagagcgccaccccggaatccctgtttgtgcctgaagaggggagcagcgagaaggagagcgaggacgcgccaaaaacatctcctccgacgcctgggaaacatggtttggaacagactggggaggaaaaagtgatggtgactgttcctgacaaaaatccaccttgtccttgctgtggtacccgggtaaactctgtgttgaatctgattgaacatctgaaagtgtcacacgggaaaaggggggtttgttttcggtgtgcaaaatgtggaaaggaaaatagtaactatcacagtgttgtttgtcattttaagaaatgcaggggtccagagacggagaaagccccagctggggagtggatttgtgaggtatgcaacagagattttacaaccaaaattggcctgggacaacacaagagattggcacacccagcagtgagaaatcaggaaaggatcgttgcttcccaaccgaaagaaacatcaaatagaggtgctcacaaaaggtgctggacaaaggaggaggaagaattactaataagactggaggctcagttcgagggaaacaaaaatattaataagcttattgcagaacacataaccaccaaaacagctaagcagatcagtgacaaaaggcgattgctgtccagaaagccagcagaggagccacgtatggagcctggaacgtgtcatcacaccaggagagcagctgcgagcctgagaacggagcctgagatgagtcatcacgcccaggcagaggacagagataatggacctgggagacgccctctgccaggcagggcagctgccggagggagaacaatggacgagataagacgccaccctgataagggcaacggacagcagagacccaccaagcaaaaatcagaagaacagctgcaggcttactataaaaagacactagaggaacgactttcagctggggcacttaacaccttcccccgagcattcaagcaggtaatggaaggccgggatataaagctagtaatcaatcagacagcgcaggactgcttcggatgcctggaatccataagccaaataagaacggcaacccgagataaaaaggacacggtgacccgggagaaacacccaaagaaaccttttcagaagtggatgaagaagagagcaatcaaaaaaggtaattatcttcggttccagcgtttattttatcttgatagagggaaactggctaaaatcattttagatgatattgaatgcttgtcttgtgacataccactcagtgaaatttattcggtttttaaaacaagatgggaaacaactggtagctttaaaagccttggggactttaaaacttacgggaaggctgacaacactgccttcagagaattaattacggctaaagaaattgagaaaaatgtgcaggaaatgagcaaaggctcggctcccggtccagacgggattactcttggggacgtcgtaaagatggatcccgagttttcccggaccatggagattttcaatttatggttaacaactggtaaaatcccggacatggtgagggggtgcagaaccgttttgattccaaaatcatcaaagccggatcgtttgaaagacattaataactggagacctatcacgatcggttccatcttgctgagactgttctccaggattgtaacagctaggctgagcaaagcgtgccccctgaacccaaggcaaagaggctttatcagagcggcgggatgctctgaaaacttaaaactcctgcaaactataatttggtcggccaaaagagaacacagaccactgggtgttgtattcgtggacatcgccaaggcttttgacaccgtaagccaccagcacatcattcatgctttgcagcaaagagaggtggatccccacatcgtcggtctggtgagcaatatgtacgagaacatcagtacgtatatcaccacaaagaggaacacacacacagacaaaatccagatccgggttggagtaaagcagggtgacccgatgtcgccccttttatttaacctggcaatggaccctctattatgcaagctggaagagagtggcaaaggataccaccgaggacagagcagcatcacagcgatggcatttgcagacgatctggttttgctgagcgactcctgggaaaatatgaatacaaatattagcatactggagaccttctgcaatctgaccggactcaaaacacaggggcaaaagtgccacggcttttacatcaagccgacaaagaagtcttacaccatcaatgactgcgctgcctggactatcaacggcacacccctgaacatgatcgaccccggcgaatctgagaaatacctcggcctgcagtttgacccgtggattggaatagcaaggtccggtctctccacaaaactagatttttggcttcagcggatcgatcaagcaccacttaaacctctgcagaaaactgatattctcaaaacatacaccatccctcggctgatctacatagctgaccactcagaagtgaaaagcgcactactcgaaacccttgaccagaagatccggacagcggtcaaggaatggcttcacctacctccgtgcacctgcgatgccatcctgtactcgagcacgagagacggcggtttgggcatcaccaaattggcaggactgatccccagcgtgcaggcccgtagactgcatcggatcgcacagtcatctgacgatacgatgaaatgcttcatggaaaaagagaaaatggaacagctgcataagaaattgtggattcaagctggaggggacagagagaacataccctcgatttgggaagcaccaccgtcgagtgaaccaccaaacaacgtgagcacaaattcggaatgggaagcaccgacccagaaagataaatttccaaagccttgcaattggaggaaaaacgaattcaaaaaatggaccaaattggcatcccaaggccgcggaattgtaaattttgaaagagacaaaattagtaaccattggatccaatactacagacgcatacctcacaggaaactcctcactgcactacaactcagggccaacgtttaccccacgagagaatttctagccaggggtagacaagaccaatacatcaaggcgtgtaggcactgcgatgcggacaacgaatcctgcgcccacatcatcggcaactgcccagtgacacaggacgcccgaatcaagaggcacaattacatctgcgaactgcttctcgaggaggcgaagaagaaggactgggtagtgttcaaggaaccgcacataagggattccaacaaggaactgtacaaacctgacctgatatttgtgaaggatgggcgtgcacttgtcgtggatgtgacagtacggtatgaagcagccaaatcatcgctggaggaagccgctgcagagaaagtgagaaagtacaaacacctggaaacggaagtaagacatctcacgaatgcaaaggacgttacttttgtgggctttcccctaggagcgcgggggaaatggcaccaagataactttaaacttttgactgagcttggcctctccaaatcgaggcaagtgaaaatggcagagactttttccacagtagcgctcttttcatctgtggacattgtacatatgtttgccagtagggccagaaaatctatggttatgtgataataggctgccttctgcggggcttgccttctggccatgcccttcttctctcccttgcacctgtacctcttggtctttgaataaagcctgagtaggaaggaccggtaaaaaaaaaaaaaaaaaaaaaaaaaaaaaaacgttgactaaaaaaaaaaaaaaaaaaaaaaaaaaaaaaaaaaaaaaaaaaaaaaaaaaaaaaaaaaaaaaaaaaaaaa

SEQ ID NO: 10620 - DNA, 5489 bp, synthetic construct
  source 1..5489: mol_type = other DNA
gaaataagagagaaaagaagagtaagaagaaatataagagaattcgccaccatggcccctaagaaaaagcggaaggtggtgaccgtgaagttcaagtacaagggcgaggaaaaggaagtggacatcagcaagatcaagaaggtctggcgggtgggcaagatgatcagctttacctacgacgataacggcaagacaggcagaggcgccgtgtccgagaaggacgcccctaaagagctgctgcagatgctggaaaaaagcggctctgagacacctggaacaagcgagagcgccaccccggaatccaatatcagcggctctagctgcggcagccccaacagcgccgacaccagcagcgacttcaaggacctgtggaccaagctgaaggaatgccacgaccgggaagtgcagggactccaggtgaaggtcaccaaactcaagcaagaaagaatcctggacgcccagagactggaagaattcttcaccaagaaccagcagctgagagagcagcagaaagtgctgcacgagacaatcaaggttctggaagatagactgcgggccggcctgtgcgacagatgcgccgtgaccgaggaacacatgcgcaaaaagcagcaggagttcgagaacattagacagcaaaatctgaaattgatcacagagctgatgaacgagagaaacacactgcaggaggagaacaagaagctgagcgagcagctgcaacagaagatcgagaatgatcagcaacaccaggccgctgagctggaatgtgaagaggacgtgatccccgacagcccaatcacagctttcagcttttctggcgtgaacagactgaggcggaaggaaaacccccacgtgcggtacatcgagcagacccataccaagctggaacacagcgtgtgtgccaacgagatgagaaaggtgtccaagtcctccacccatccccagcacaaccctaacgaaaatgagatcctggtggctgatacctacgaccagtctcagagccctatggccaaggcccacggcaccagctcttatacccctgataagagctccttcaacctggccaccgtggtggccgagacactgggcctgggcgtgcaggaggaaagcgagacacagggcccaatgagccctctgggagatgagctgtaccactgcctggaaggcaaccacaagaaacagccttttgagtccggctccgagactcctggaacaagcgagagcgctacacctgagggcagccctaagagaaaggtgtccagcgccgagggcgctgccaaggaagagcctaaacggagaagcgccagactgagcgccaagccccccgccaaggtggaagccaagcctaagaaggccgccgctaaggacaagagcagcgataagaaagtccagaccaagggcaagcggggcgccaaaggcaaacaggccgaggtggccaaccaggagacaaaggaagatctgcctgctgagaacggcgaaaccaagaccgaggaatctccagcttctgacgaggccggagagaaggaggccaaaagcgacagcggctctgagacacctggaacaagcgagagcgccaccccggaatcctatgaacaacttgcaccacaaccgtgtgtgggagaaactttacattctagcctcccacgagacagtgaactgtttgtgcctgaagaggggagcagcgagaaggagagcgaggacgcgccaaaaacatctcctccgacgcctgggaaacatggtttggaacagactggggaggaaaaagtgatggtgactgttcctgacaaaaatccaccttgtccttgctgtggtacccgggtaaactctgtgttgaatctgattgaacatctgaaagtgtcacacgggaaaaggggggtttgttttcggtgtgcaaaatgtggaaaggaaaatagtaactatcacagtgttgtttgtcattttaagaaatgcaggggtccagagacggagaaagccccagctggggagtggatttgtgaggtatgcaacagagattttacaaccaaaattggcctgggacaacacaagagattggcacacccagcagtgagaaatcaggaaaggatcgttgcttcccaaccgaaagaaacatcaaatagaggtgctcacaaaaggtgctggacaaaggaggaggaagaattactaataagactggaggctcagttcgagggaaacaaaaatattaataagcttattgcagaacacataaccaccaaaacagctaagcagatcagtgacaaaaggcgattgctgtccagaaagccagcagaggagccacgtgaggagcctggaacgtgtcatcacaccaggagagcagctgcgagcctgagaacggagcctgagatgagtcatcacgcccaggcagaggacagagataatggacctgggagacgccctctgccaggcagggcagctgccggagggagaacaatggacgagataagacgccaccctgataagggcaacggacagcagagacccaccaagcaaaaatcagaagaacagctgcaggcttactataaaaagacactagaggaacgactttcagctggggcacttaacaccttcccccgagcattcaagcaggtaatggaaggccgggatataaagctagtaatcaatcagacagcgcaggactgcttcggatgcctggaatccataagccaaataagaacggcaacccgagataaaaaggacacggtgacccgggagaaacacccaaagaaaccttttcagaagtggatgaagaagagagcaatcaaaaaaggtaattatcttcggttccagcgtttattttatcttgatagagggaaactggctaaaatcattttagatgatattgaatgcttgtcttgtgacataccactcagtgaaatttattcggtttttaaaacaagatgggaaacaactggtagctttaaaagccttggggactttaaaacttacgggaaggctgacaacactgccttcagagaattaattacggctaaagaaattgagaaaaatgtgcaggaaatgagcaaaggctcggctcccggtccagacgggattactcttggggacgtcgtaaagatggatcccgagttttcccggaccatggagattttcaatttatggttaacaactggtaaaatcccggacatggtgagggggtgcagaaccgttttgattccaaaatcatcaaagccggatcgtttgaaagacattaataactggagacctatcacgatcggttccatcttgctgagactgttctccaggattgtaacagctaggctgagcaaagcgtgccccctgaacccaaggcaaagaggctttatcagagcggcgggatgctctgaaaacttaaaactcctgcaaactataatttggtcggccaaaagagaacacagaccactgggtgttgtattcgtggacatcgccaaggcttttgacaccgtaagccaccagcacatcattcatgctttgcagcaaagagaggtggatccccacatcgtcggtctggtgagcaatatgtacgagaacatcagtacgtatatcaccacaaagaggaacacacacacagacaaaatccagatccgggttggagtaaagcagggtgacccgatgtcgccccttttatttaacctggcaatggaccctctattatgcaagctggaagagagtggcaaaggataccaccgaggacagagcagcatcacagcgatggcatttgcagacgatctggttttgctgagcgactcctgggaaaatatgaatacaaatattagcatactggagaccttctgcaatctgaccggactcaaaacacaggggcaaaagtgccacggcttttacatcaagccgacaaaggactcttacaccatcaatgactgcgctgcctggactatcaacggcacacccctgaacatgatcgaccccggcgaatctgagaaatacctcggcctgcagtttgacccgtggattggaatagcaaggtccggtctctccacaaaactagatttttggcttcagcggatcgatcaagcaccacttaaacctctgcagaaaactgatattctcaaaacatacaccatccctcggctgatctacatagctgaccactcagaagtgaaaagcgcactactcgaaacccttgaccagaagatccggacagcggtcaaggaatggcttcacctacctccgtgcacctgcgatgccatcctgtactcgagcacgagagacggcggtttgggcatcaccaaattggcaggactgatccccagcgtgcaggcccgtagactgcatcggatcgcacagtcatctgacgatacgatgaaatgcttcatggaaaaagagaaaatggaacagctgcataagaaattgtggattcaagctggaggggacagagagaacataccctcgatttgggaagcaccaccgtcgagtgaaccaccaaacaacgtgagcacaaattcggaatgggaagcaccgacccagaaagataaatttccaaagccttgcaattggaggaaaaacgaattcaaaaaatggaccaaattggcatcccaaggccgcggaattgtaaattttgaaagagacaaaattagtaaccattggatccaatactacagacgcatacctcacaggaaactcctcactgcactacaactcagggccaacgtttaccccacgagagaatttctagccaggggtagacaagaccaatacatcaaggcgtgtaggcactgcgatgcggacaacgaatcctgcgcccacatcatcggcaactgcccagtgacacaggacgcccgaatcaagaggcacaattacatctgcgaactgcttctcgaggaggcgaagaagaaggactgggtagtgttcaaggaaccgcacataagggattccaacaaggaactgtacaaacctgacctgatatttgtgaaggatgggcgtgcacttgtcgtggatgtgacagtacggtatgaagcagccaaatcatcgctggaggaagccgctgcagagaaagtgagaaagtacaaacacctggaaacggaagtaagacatctcacgaatgcaaaggacgttacttttgtgggctttcccctaggagcgcgggggaaatggcaccaagataactttaaacttttgactgagcttggcctctccaaatcgaggcaagtgaaaatggcagagactttttccacagtagcgctcttttcatctgtggacattgtacatatgtttgccagtagggccagaaaatctatggttatgtgataataggctgccttctgcggggcttgccttctggccatgcccttcttctctcccttgcacctgtacctcttggtctttgaataaagcctgagtaggaaggaccggtaaaaaaaaaaaaaaaaaaaaaaaaaaaaaaacgttgactaaaaaaaaaaaaaaaaaaaaaaaaaaaaaaaaaaaaaaaaaaaaaaaaaaaaaaaaaaaaaaaaaaaaaa

SEQ ID NO: 10621 - DNA, 5489 bp, synthetic construct
  source 1..5489: mol_type = other DNA
gaaataagagagaaaagaagagtaagaagaaatataagagaattcgccaccatggcccctaagaaaaagcggaaggtgaatatcagcggctctagctgcggcagccccaacagcgccgacaccagcagcgacttcaaggacctgtggaccaagctgaaggaatgccacgaccgggaagtgcagggactccaggtgaaggtcaccaaactcaagcaagaaagaatcctggacgcccagagactggaagaattcttcaccaagaaccagcagctgagagagcagcagaaagtgctgcacgagacaatcaaggttctggaagatagactgcgggccggcctgtgcgacagatgcgccgtgaccgaggaacacatgcgcaaaaagcagcaggagttcgagaacattagacagcaaaatctgaaattgatcacagagctgatgaacgagagaaacacactgcaggaggagaacaagaagctgagcgagcagctgcaacagaagatcgagaatgatcagcaacaccaggccgctgagctggaatgtgaagaggacgtgatccccgacagcccaatcacagctttcagcttttctggcgtgaacagactgaggcggaaggaaaacccccacgtgcggtacatcgagcagacccataccaagctggaacacagcgtgtgtgccaacgagatgagaaaggtgtccaagtcctccacccatccccagcacaaccctaacgaaaatgagatcctggtggctgatacctacgaccagtctcagagccctatggccaaggcccacggcaccagctcttatacccctgataagagctccttcaacctggccaccgtggtggccgagacactgggcctgggcgtgcaggaggaaagcgagacacagggcccaatgagccctctgggagatgagctgtaccactgcctggaaggcaaccacaagaaacagccttttgagtccggctccgagactcctggaacaagcgagagcgctacacctgagggcagcgtgaccgtgaagttcaagtacaagggcgaggaaaaggaagtggacatcagcaagatcaagaaggtctggcgggtgggcaagatgatcagctttacctacgacgataacggcaagacaggcagaggcgccgtgtccgagaaggacgcccctaaagagctgctgcagatgctggaaaaaagcggctctgagacacctggaacaagcgagagcgccaccccggaatcccctaagagaaaggtgtccagcgccgagggcgctgccaaggaagagcctaaacggagaagcgccagactgagcgccaagccccccgccaaggtggaagccaagcctaagaaggccgccgctaaggacaagagcagcgataagaaagtccagaccaagggcaagcggggcgccaaaggcaaacaggccgaggtggccaaccaggagacaaaggaagatctgcctgctgagaacggcgaaaccaagaccgaggaatctccagcttctgacgaggccggagagaaggaggccaaaagcgacagcggctctgagacacctggaacaagcgagagcgccaccccggaatcctatgaacaacttgcaccacaaccgtgtgtgggagaaactttacattctagcctcccacgagacagtgaactgtttgtgcctgaagaggggagcagcgagaaggagagcgaggacgcgccaaaaacatctcctccgacgcctgggaaacatggtttggaacagactggggaggaaaaagtgatggtgactgttcctgacaaaaatccaccttgtccttgctgtggtacccgggtaaactctgtgttgaatctgattgaacatctgaaagtgtcacacgggaaaaggggggtttgttttcggtgtgcaaaatgtggaaaggaaaatagtaactatcacagtgttgtttgtcattttaagaaatgcaggggtccagagacggagaaagccccagctggggagtggatttgtgaggtatgcaacagagattttacaaccaaaattggcctgggacaacacaagagattggcacacccagcagtgagaaatcaggaaaggatcgttgcttcccaaccgaaagaaacatcaaatagaggtgctcacaaaaggtgctggacaaaggaggaggaagaattactaataagactggaggctcagttcgagggaaacaaaaatattaataagcttattgcagaacacataaccaccaaaacagctaagcagatcagtgacaaaaggcgattgctgtccagaaagccagcagaggagccacgtgaggagcctggaacgtgtcatcacaccaggagagcagctgcgagcctgagaacggagcctgagatgagtcatcacgcccaggcagaggacagagataatggacctgggagacgccctctgccaggcagggcagctgccggagggagaacaatggacgagataagacgccaccctgataagggcaacggacagcagagacccaccaagcaaaaatcagaagaacagctgcaggcttactataaaaagacactagaggaacgactttcagctggggcacttaacaccttcccccgagcattcaagcaggtaatggaaggccgggatataaagctagtaatcaatcagacagcgcaggactgcttcggatgcctggaatccataagccaaataagaacggcaacccgagataaaaaggacacggtgacccgggagaaacacccaaagaaaccttttcagaagtggatgaagaagagagcaatcaaaaaaggtaattatcttcggttccagcgtttattttatcttgatagagggaaactggctaaaatcattttagatgatattgaatgcttgtcttgtgacataccactcagtgaaatttattcggtttttaaaacaagatgggaaacaactggtagctttaaaagccttggggactttaaaacttacgggaaggctgacaacactgccttcagagaattaattacggctaaagaaattgagaaaaatgtgcaggaaatgagcaaaggctcggctcccggtccagacgggattactcttggggacgtcgtaaagatggatcccgagttttcccggaccatggagattttcaatttatggttaacaactggtaaaatcccggacatggtgagggggtgcagaaccgttttgattccaaaatcatcaaagccggatcgtttgaaagacattaataactggagacctatcacgatcggttccatcttgctgagactgttctccaggattgtaacagctaggctgagcaaagcgtgccccctgaacccaaggcaaagaggctttatcagagcggcgggatgctctgaaaacttaaaactcctgcaaactataatttggtcggccaaaagagaacacagaccactgggtgttgtattcgtggacatcgccaaggcttttgacaccgtaagccaccagcacatcattcatgctttgcagcaaagagaggtggatccccacatcgtcggtctggtgagcaatatgtacgagaacatcagtacgtatatcaccacaaagaggaacacacacacagacaaaatccagatccgggttggagtaaagcagggtgacccgatgtcgccccttttatttaacctggcaatggaccctctattatgcaagctggaagagagtggcaaaggataccaccgaggacagagcagcatcacagcgatggcatttgcagacgatctggttttgctgagcgactcctgggaaaatatgaatacaaatattagcatactggagaccttctgcaatctgaccggactcaaaacacaggggcaaaagtgccacggcttttacatcaagccgacaaaggactcttacaccatcaatgactgcgctgcctggactatcaacggcacacccctgaacatgatcgaccccggcgaatctgagaaatacctcggcctgcagtttgacccgtggattggaatagcaaggtccggtctctccacaaaactagatttttggcttcagcggatcgatcaagcaccacttaaacctctgcagaaaactgatattctcaaaacatacaccatccctcggctgatctacatagctgaccactcagaagtgaaaagcgcactactcgaaacccttgaccagaagatccggacagcggtcaaggaatggcttcacctacctccgtgcacctgcgatgccatcctgtactcgagcacgagagacggcggtttgggcatcaccaaattggcaggactgatccccagcgtgcaggcccgtagactgcatcggatcgcacagtcatctgacgatacgatgaaatgcttcatggaaaaagagaaaatggaacagctgcataagaaattgtggattcaagctggaggggacagagagaacataccctcgatttgggaagcaccaccgtcgagtgaaccaccaaacaacgtgagcacaaattcggaatgggaagcaccgacccagaaagataaatttccaaagccttgcaattggaggaaaaacgaattcaaaaaatggaccaaattggcatcccaaggccgcggaattgtaaattttgaaagagacaaaattagtaaccattggatccaatactacagacgcatacctcacaggaaactcctcactgcactacaactcagggccaacgtttaccccacgagagaatttctagccaggggtagacaagaccaatacatcaaggcgtgtaggcactgcgatgcggacaacgaatcctgcgcccacatcatcggcaactgcccagtgacacaggacgcccgaatcaagaggcacaattacatctgcgaactgcttctcgaggaggcgaagaagaaggactgggtagtgttcaaggaaccgcacataagggattccaacaaggaactgtacaaacctgacctgatatttgtgaaggatgggcgtgcacttgtcgtggatgtgacagtacggtatgaagcagccaaatcatcgctggaggaagccgctgcagagaaagtgagaaagtacaaacacctggaaacggaagtaagacatctcacgaatgcaaaggacgttacttttgtgggctttcccctaggagcgcgggggaaatggcaccaagataactttaaacttttgactgagcttggcctctccaaatcgaggcaagtgaaaatggcagagactttttccacagtagcgctcttttcatctgtggacattgtacatatgtttgccagtagggccagaaaatctatggttatgtgataataggctgccttctgcggggcttgccttctggccatgcccttcttctctcccttgcacctgtacctcttggtctttgaataaagcctgagtaggaaggaccggtaaaaaaaaaaaaaaaaaaaaaaaaaaaaaaacgttgactaaaaaaaaaaaaaaaaaaaaaaaaaaaaaaaaaaaaaaaaaaaaaaaaaaaaaaaaaaaaaaaaaaaaaa

SEQ ID NO: 10622 - DNA, 5489 bp, synthetic construct
  source 1..5489: mol_type = other DNA
gaaataagagagaaaagaagagtaagaagaaatataagagaattcgccaccatggcccctaagaaaaagcggaaggtgaatatcagcggctctagctgcggcagccccaacagcgccgacaccagcagcgacttcaaggacctgtggaccaagctgaaggaatgccacgaccgggaagtgcagggactccaggtgaaggtcaccaaactcaagcaagaaagaatcctggacgcccagagactggaagaattcttcaccaagaaccagcagctgagagagcagcagaaagtgctgcacgagacaatcaaggttctggaagatagactgcgggccggcctgtgcgacagatgcgccgtgaccgaggaacacatgcgcaaaaagcagcaggagttcgagaacattagacagcaaaatctgaaattgatcacagagctgatgaacgagagaaacacactgcaggaggagaacaagaagctgagcgagcagctgcaacagaagatcgagaatgatcagcaacaccaggccgctgagctggaatgtgaagaggacgtgatccccgacagcccaatcacagctttcagcttttctggcgtgaacagactgaggcggaaggaaaacccccacgtgcggtacatcgagcagacccataccaagctggaacacagcgtgtgtgccaacgagatgagaaaggtgtccaagtcctccacccatccccagcacaaccctaacgaaaatgagatcctggtggctgatacctacgaccagtctcagagccctatggccaaggcccacggcaccagctcttatacccctgataagagctccttcaacctggccaccgtggtggccgagacactgggcctgggcgtgcaggaggaaagcgagacacagggcccaatgagccctctgggagatgagctgtaccactgcctggaaggcaaccacaagaaacagccttttgagtccggctccgagactcctggaacaagcgagagcgctacacctgagggcagccctaagagaaaggtgtccagcgccgagggcgctgccaaggaagagcctaaacggagaagcgccagactgagcgccaagccccccgccaaggtggaagccaagcctaagaaggccgccgctaaggacaagagcagcgataagaaagtccagaccaagggcaagcggggcgccaaaggcaaacaggccgaggtggccaaccaggagacaaaggaagatctgcctgctgagaacggcgaaaccaagaccgaggaatctccagcttctgacgaggccggagagaaggaggccaaaagcgacagcggctctgagacacctggaacaagcgagagcgccaccccggaatccgtgaccgtgaagttcaagtacaagggcgaggaaaaggaagtggacatcagcaagatcaagaaggtctggcgggtgggcaagatgatcagctttacctacgacgataacggcaagacaggcagaggcgccgtgtccgagaaggacgcccctaaagagctgctgcagatgctggaaaaaagcggctctgagacacctggaacaagcgagagcgccaccccggaatcctatgaacaacttgcaccacaaccgtgtgtgggagaaactttacattctagcctcccacgagacagtgaactgtttgtgcctgaagaggggagcagcgagaaggagagcgaggacgcgccaaaaacatctcctccgacgcctgggaaacatggtttggaacagactggggaggaaaaagtgatggtgactgttcctgacaaaaatccaccttgtccttgctgtggtacccgggtaaactctgtgttgaatctgattgaacatctgaaagtgtcacacgggaaaaggggggtttgttttcggtgtgcaaaatgtggaaaggaaaatagtaactatcacagtgttgtttgtcattttaagaaatgcaggggtccagagacggagaaagccccagctggggagtggatttgtgaggtatgcaacagagattttacaaccaaaattggcctgggacaacacaagagattggcacacccagcagtgagaaatcaggaaaggatcgttgcttcccaaccgaaagaaacatcaaatagaggtgctcacaaaaggtgctggacaaaggaggaggaagaattactaataagactggaggctcagttcgagggaaacaaaaatattaataagcttattgcagaacacataaccaccaaaacagctaagcagatcagtgacaaaaggcgattgctgtccagaaagccagcagaggagccacgtgaggagcctggaacgtgtcatcacaccaggagagcagctgcgagcctgagaacggagcctgagatgagtcatcacgcccaggcagaggacagagataatggacctgggagacgccctctgccaggcagggcagctgccggagggagaacaatggacgagataagacgccaccctgataagggcaacggacagcagagacccaccaagcaaaaatcagaagaacagctgcaggcttactataaaaagacactagaggaacgactttcagctggggcacttaacaccttcccccgagcattcaagcaggtaatggaaggccgggatataaagctagtaatcaatcagacagcgcaggactgcttcggatgcctggaatccataagccaaataagaacggcaacccgagataaaaaggacacggtgacccgggagaaacacccaaagaaaccttttcagaagtggatgaagaagagagcaatcaaaaaaggtaattatcttcggttccagcgtttattttatcttgatagagggaaactggctaaaatcattttagatgatattgaatgcttgtcttgtgacataccactcagtgaaatttattcggtttttaaaacaagatgggaaacaactggtagctttaaaagccttggggactttaaaacttacgggaaggctgacaacactgccttcagagaattaattacggctaaagaaattgagaaaaatgtgcaggaaatgagcaaaggctcggctcccggtccagacgggattactcttggggacgtcgtaaagatggatcccgagttttcccggaccatggagattttcaatttatggttaacaactggtaaaatcccggacatggtgagggggtgcagaaccgttttgattccaaaatcatcaaagccggatcgtttgaaagacattaataactggagacctatcacgatcggttccatcttgctgagactgttctccaggattgtaacagctaggctgagcaaagcgtgccccctgaacccaaggcaaagaggctttatcagagcggcgggatgctctgaaaacttaaaactcctgcaaactataatttggtcggccaaaagagaacacagaccactgggtgttgtattcgtggacatcgccaaggcttttgacaccgtaagccaccagcacatcattcatgctttgcagcaaagagaggtggatccccacatcgtcggtctggtgagcaatatgtacgagaacatcagtacgtatatcaccacaaagaggaacacacacacagacaaaatccagatccgggttggagtaaagcagggtgacccgatgtcgccccttttatttaacctggcaatggaccctctattatgcaagctggaagagagtggcaaaggataccaccgaggacagagcagcatcacagcgatggcatttgcagacgatctggttttgctgagcgactcctgggaaaatatgaatacaaatattagcatactggagaccttctgcaatctgaccggactcaaaacacaggggcaaaagtgccacggcttttacatcaagccgacaaaggactcttacaccatcaatgactgcgctgcctggactatcaacggcacacccctgaacatgatcgaccccggcgaatctgagaaatacctcggcctgcagtttgacccgtggattggaatagcaaggtccggtctctccacaaaactagatttttggcttcagcggatcgatcaagcaccacttaaacctctgcagaaaactgatattctcaaaacatacaccatccctcggctgatctacatagctgaccactcagaagtgaaaagcgcactactcgaaacccttgaccagaagatccggacagcggtcaaggaatggcttcacctacctccgtgcacctgcgatgccatcctgtactcgagcacgagagacggcggtttgggcatcaccaaattggcaggactgatccccagcgtgcaggcccgtagactgcatcggatcgcacagtcatctgacgatacgatgaaatgcttcatggaaaaagagaaaatggaacagctgcataagaaattgtggattcaagctggaggggacagagagaacataccctcgatttgggaagcaccaccgtcgagtgaaccaccaaacaacgtgagcacaaattcggaatgggaagcaccgacccagaaagataaatttccaaagccttgcaattggaggaaaaacgaattcaaaaaatggaccaaattggcatcccaaggccgcggaattgtaaattttgaaagagacaaaattagtaaccattggatccaatactacagacgcatacctcacaggaaactcctcactgcactacaactcagggccaacgtttaccccacgagagaatttctagccaggggtagacaagaccaatacatcaaggcgtgtaggcactgcgatgcggacaacgaatcctgcgcccacatcatcggcaactgcccagtgacacaggacgcccgaatcaagaggcacaattacatctgcgaactgcttctcgaggaggcgaagaagaaggactgggtagtgttcaaggaaccgcacataagggattccaacaaggaactgtacaaacctgacctgatatttgtgaaggatgggcgtgcacttgtcgtggatgtgacagtacggtatgaagcagccaaatcatcgctggaggaagccgctgcagagaaagtgagaaagtacaaacacctggaaacggaagtaagacatctcacgaatgcaaaggacgttacttttgtgggctttcccctaggagcgcgggggaaatggcaccaagataactttaaacttttgactgagcttggcctctccaaatcgaggcaagtgaaaatggcagagactttttccacagtagcgctcttttcatctgtggacattgtacatatgtttgccagtagggccagaaaatctatggttatgtgataataggctgccttctgcggggcttgccttctggccatgcccttcttctctcccttgcacctgtacctcttggtctttgaataaagcctgagtaggaaggaccggtaaaaaaaaaaaaaaaaaaaaaaaaaaaaaaacgttgactaaaaaaaaaaaaaaaaaaaaaaaaaaaaaaaaaaaaaaaaaaaaaaaaaaaaaaaaaaaaaaaaaaaaaa

SEQ ID NO: 10623 - DNA, 4484 bp, synthetic construct
  source 1..4484: mol_type = other DNA
gaaataagagagaaaagaagagtaagaagaaatataagagaattcgccaccatggcccctaagaaaaagagaaaggtggtgaccgtgaagttcaagtacaagggcgaggaaaaggaagtggacatcagcaagatcaagaaggtctggcgggtgggcaagatgatcagctttacctacgacgataacggcaagacaggcagaggcgccgtgtccgagaaggacgcccctaaagagctgctgcagatgctggaaaaaagcggctctgagacacctggaacaagcgagagcgccaccccggaatcccctaagagaaaggtgtccagcgccgagggcgctgccaaggaagagcctaaacggagaagcgccagactgagcgccaagccccccgccaaggtggaagccaagcctaagaaggccgccgctaaggacaagagcagcgataagaaagtccagaccaagggcaagcggggcgccaaaggcaaacaggccgaggtggccaaccaggagacaaaggaagatctgcctgctgagaacggcgaaaccaagaccgaggaatctccagcttctgacgaggccggagagaaggaggccaaaagcgacagcggctctgagacacctggaacaagcgagagcgccaccccggaatccctgtttgtgcctgaagaggggagcagcgagaaggagagcgaggacgcgccaaaaacatctcctccgacgcctgggaaacatggtttggaacagactggggaggaaaaagtgatggtgactgttcctgacaaaaatccaccttgtccttgctgtggtacccgggtaaactctgtgttgaatctgattgaacatctgaaagtgtcacacgggaaaaggggggtttgttttcggtgtgcaaaatgtggaaaggaaaatagtaactatcacagtgttgtttgtcattttaagaaatgcaggggtccagagacggagaaagccccagctggggagtggatttgtgaggtatgcaacagagattttacaaccaaaattggcctgggacaacacaagagattggcacacccagcagtgagaaatcaggaaaggatcgttgcttcccaaccgaaagaaacatcaaatagaggtgctcacaaaaggtgctggacaaaggaggaggaagaattactaataagactggaggctcagttcgagggaaacaaaaatattaataagcttattgcagaacacataaccaccaaaacagctaagcagatcagtgacaaaaggcgattgctgtccagaaagccagcagaggagccacgtgaggagcctggaacgtgtcatcacaccaggagagcagctgcgagcctgagaacggagcctgagatgagtcatcacgcccaggcagaggacagagataatggacctgggagacgccctctgccaggcagggcagctgccggagggagaacaatggacgagataagacgccaccctgataagggcaacggacagcagagacccaccaagcaaaaatcagaagaacagctgcaggcttactataaaaagacactagaggaacgactttcagctggggcacttaacaccttcccccgagcattcaagcaggtaatggaaggccgggatataaagctagtaatcaatcagacagcgcaggactacttcggatgcctggaatccataagccaaataagaacggcaacccgagataaaaaggacacggtgacccgggagaaacacccaaagaaaccttttcagaagtggatgaagaagagagcaatcaaaaaaggtaattatcttcggttccagcgtttattttatcttgatagagggaaactggctaaaatcattttagatgatattgaatgcttgtcttgtgacataccactcagtgaaatttattcggtttttaaaacaagatgggaaacaactggtagctttaaaagccttggggactttaaaacttacgggaaggctgacaacactgccttcagagaattaattacggctaaagaaattgagaaaaatgtgcaggaaatgagcaaaggctcggctcccggtccagacgggattactcttggggacgtcgtaaagatggatcccgagttttcccggaccatggagattttcaatttatggttaacaactggtaaaatcccggacatggtgagggggtgcagaaccgttttgattccaaaatcatcagacccggatcgtttgaaagacattaataactggagacctatcacgatcggttccatcttgctgagactgttctccaggattgtaacagctaggctgagcaaagcgtgccccctgaacccaaggcaaagaggctttatcagagcggcgggatgctctgaaaacttaaaactcctgcaaactataatttggtcggccaaaagagaacacagaccactgggtgttgtattcgtggacatcgccaaggcttttgacaccgtaagccaccagcacatcattcatgctttgcagcaaagagaggtggatccccacatcgtcggtctggtgagcaatatgtacgagaacatcagtacgtatatcaccacaaagaggaacacacacacagacaaaatccagatccgggttggagtaaagcagggtgacccgatgtcgccccttttatttaacctggcaatggaccctctattatgcaagctggaagagagtggcaaaggataccaccgaggacagagcagcatcacagcgatggcatttgcagacgatctggttttgctgagcgactcctgggaaaatatgaatacaaatattagcatactggagaccttctgcaatctgaccggactcaaaacacaggggcaaaagtgccacggcttttacatcaagccgacaaaggactcttacaccatcaatgactgcgctgcctggactatcaacggcacacccctgaacatgatcgaccccggcgaatctgagaaatacctcggcctgcagtttgacccgtggattggaatagcaaggtccggtctctccacaaaactagatttttggcttcagcggatcgatcaagcaccacttaaacctctgcagaaactggatattctcaaaacatacaccatccctcggctgatctacatagctgaccactcagaagtgaaaagcgcactactcgaaacccttgaccagaagatccggacagcggtcaaggaatggcttcacctacctccgtgcacctgcgatgccatcctgtactcgagcacgagagacggcggtttgggcatcaccaaattggcaggactgatccccagcgtgcaggcccgtagactgcatcggatcgcacagtcatctgacgatacgatgaaatgcttcatggaaaaagagaaaatggaacagctgcataagaaattgtggattcaagctggaggggacagagagaacataccctcgatttgggaagcaccaccgtcgagtgaaccaccaaacaacgtgagcacaaattcggaatgggaagcaccgacccagaaagataaatttccaaagccttgcaattggaggaaaaacgaattcaaaaaatggaccaaattggcatcccaaggccgcggaattgtaaattttgaaagagacaaaattagtaaccattggatccaatactacagacgcatacctcacaggaaactcctcactgcactacaactcagggccaacgtttaccccacgagagaatttctagccaggggtagacaagaccaatacatcaaggcgtgtaggcactgcgatgcggacaacgaatcctgcgcccacatcatcggcaactgcccagtgacacaggacgcccgaatcaagaggcacaattacatctgcgaactgcttctcgaggaggcgaagaagaaggactgggtagtgttcaaggaaccgcacataagggattccaacaaggaactgtacaaacctgacctgatatttgtgaaggatgggcgtgcacttgtcgtggatgtgacagtacggtatgaagcagccaaatcatcgctggaggaagccgctgcagagaaagtgagaaagtacaaacacctggaaacggaagtaagacatctcacgaatgcaaaggacgttacttttgtgggctttcccctaggagcgcgggggaaatggcaccaagataactttaaacttttgactgagcttggcctctccaaatcgaggcaagtgaaaatggcagagactttttccacagtagcgctcttttcatctgtggacattgtacatatgtttgccagtagggccagaaaatctatggttatgtgataataggctgccttctgcggggcttgccttctggccatgcccttcttctctcccttgcacctgtacctcttggtctttgaataaagcctgagtaggaaggaccggtaaaaaaaaaaaaaaaaaaaaaaaaaaaaaaacgttgactaaaaaaaaaaaaaaaaaaaaaaaaaaaaaaaaaaaaaaaaaaaaaaaaaaaaaaaaaaaaaaaaaaaaaa

SEQ ID NO: 10624 - DNA, 5144 bp, synthetic construct
  source 1..5144: mol_type = other DNA
gaaataagagagaaaagaagagtaagaagaaatataagagaattcgccaccatggcccctaagaaaaagagaaaggtggtgaccgtgaagttcaagtacaagggcgaggaaaaggaagtggacatcagcaagatcaagaaggtctggcgggtgggcaagatgatcagctttacctacgacgataacggcaagacaggcagaggcgccgtgtccgagaaggacgcccctaaagagctgctgcagatgctggaaaaaagcggctctgagacacctggaacaagcgagagcgccaccccggaatccaatatcagcggctctagctgcggcagccccaacagcgccgacaccagcagcgacttcaaggacctgtggaccaagctgaaggaatgccacgaccgggaagtgcagggactccaggtgaaggtcaccaaactcaagcaagaaagaatcctggacgcccagagactggaagaattcttcaccaagaaccagcagctgagagagcagcagaaagtgctgcacgagacaatcaaggttctggaagatagactgcgggccggcctgtgcgacagatgcgccgtgaccgaggaacacatgcgcaaaaagcagcaggagttcgagaacattagacagcaaaatctgaaattgatcacagagctgatgaacgagagaaacacactgcaggaggagaacaagaagctgagcgagcagctgcaacagaagatcgagaatgatcagcaacaccaggccgctgagctggaatgtgaagaggacgtgatccccgacagcccaatcacagctttcagcttttctggcgtgaacagactgaggcggaaggaaaacccccacgtgcggtacatcgagcagacccataccaagctggaacacagcgtgtgtgccaacgagatgagaaaggtgtccaagtcctccacccatccccagcacaaccctaacgaaaatgagatcctggtggctgatacctacgaccagtctcagagccctatggccaaggcccacggcaccagctcttatacccctgataagagctccttcaacctggccaccgtggtggccgagacactgggcctgggcgtgcaggaggaaagcgagacacagggcccaatgagccctctgggagatgagctgtaccactgcctggaaggcaaccacaagaaacagccttttgagtccggctccgagactcctggaacaagcgagagcgctacacctgagggcagctatgaacaacttgcaccacaaccgtgtgtgggagaaactttacattctagcctcccacgagacagtgaactgtttgtgcctgaagaggggagcagcgagaaggagagcgaggacgcgccaaaaacatctcctccgacgcctgggaaacatggtttggaacagactggggaggaaaaagtgatggtgactgttcctgacaaaaatccaccttgtccttgctgtggtacccgggtaaactctgtgttgaatctgattgaacatctgaaagtgtcacacgggaaaaggggggtttgttttcggtgtgcaaaatgtggaaaggaaaatagtaactatcacagtgttgtttgtcattttaagaaatgcaggggtccagagacggagaaagccccagctggggagtggatttgtgaggtatgcaacagagattttacaaccaaaattggcctgggacaacacaagagattggcacacccagcagtgagaaatcaggaaaggatcgttgcttcccaaccgaaagaaacatcaaatagaggtgctcacaaaaggtgctggacaaaggaggaggaagaattactaataagactggaggctcagttcgagggaaacaaaaatattaataagcttattgcagaacacataaccaccaaaacagctaagcagatcagtgacaaaaggcgattgctgtccagaaagccagcagaggagccacgtgaggagcctggaacgtgtcatcacaccaggagagcagctgcgagcctgagaacggagcctgagatgagtcatcacgcccaggcagaggacagagataatggacctgggagacgccctctgccaggcagggcagctgccggagggagaacaatggacgagataagacgccaccctgataagggcaacggacagcagagacccaccaagcaaaaatcagaagaacagctgcaggcttactataaaaagacactagaggaacgactttcagctggggcacttaacaccttcccccgagcattcaagcaggtaatggaaggccgggatataaagctagtaatcaatcagacagcgcaggactacttcggatgcctggaatccataagccaaataagaacggcaacccgagataaaaaggacacggtgacccgggagaaacacccaaagaaaccttttcagaagtggatgaagaagagagcaatcaaaaaaggtaattatcttcggttccagcgtttattttatcttgatagagggaaactggctaaaatcattttagatgatattgaatgcttgtcttgtgacataccactcagtgaaatttattcggtttttaaaacaagatgggaaacaactggtagctttaaaagccttggggactttaaaacttacgggaaggctgacaacactgccttcagagaattaattacggctaaagaaattgagaaaaatgtgcaggaaatgagcaaaggctcggctcccggtccagacgggattactcttggggacgtcgtaaagatggatcccgagttttcccggaccatggagattttcaatttatggttaacaactggtaaaatcccggacatggtgagggggtgcagaaccgttttgattccaaaatcatcagacccggatcgtttgaaagacattaataactggagacctatcacgatcggttccatcttgctgagactgttctccaggattgtaacagctaggctgagcaaagcgtgccccctgaacccaaggcaaagaggctttatcagagcggcgggatgctctgaaaacttaaaactcctgcaaactataatttggtcggccaaaagagaacacagaccactgggtgttgtattcgtggacatcgccaaggcttttgacaccgtaagccaccagcacatcattcatgctttgcagcaaagagaggtggatccccacatcgtcggtctggtgagcaatatgtacgagaacatcagtacgtatatcaccacaaagaggaacacacacacagacaaaatccagatccgggttggagtaaagcagggtgacccgatgtcgccccttttatttaacctggcaatggaccctctattatgcaagctggaagagagtggcaaaggataccaccgaggacagagcagcatcacagcgatggcatttgcagacgatctggttttgctgagcgactcctgggaaaatatgaatacaaatattagcatactggagaccttctgcaatctgaccggactcaaaacacaggggcaaaagtgccacggcttttacatcaagccgacaaaggactcttacaccatcaatgactgcgctgcctggactatcaacggcacacccctgaacatgatcgaccccggcgaatctgagaaatacctcggcctgcagtttgacccgtggattggaatagcaaggtccggtctctccacaaaactagatttttggcttcagcggatcgatcaagcaccacttaaacctctgcagaaactggatattctcaaaacatacaccatccctcggctgatctacatagctgaccactcagaagtgaaaagcgcactactcgaaacccttgaccagaagatccggacagcggtcaaggaatggcttcacctacctccgtgcacctgcgatgccatcctgtactcgagcacgagagacggcggtttgggcatcaccaaattggcaggactgatccccagcgtgcaggcccgtagactgcatcggatcgcacagtcatctgacgatacgatgaaatgcttcatggaaaaagagaaaatggaacagctgcataagaaattgtggattcaagctggaggggacagagagaacataccctcgatttgggaagcaccaccgtcgagtgaaccaccaaacaacgtgagcacaaattcggaatgggaagcaccgacccagaaagataaatttccaaagccttgcaattggaggaaaaacgaattcaaaaaatggaccaaattggcatcccaaggccgcggaattgtaaattttgaaagagacaaaattagtaaccattggatccaatactacagacgcatacctcacaggaaactcctcactgcactacaactcagggccaacgtttaccccacgagagaatttctagccaggggtagacaagaccaatacatcaaggcgtgtaggcactgcgatgcggacaacgaatcctgcgcccacatcatcggcaactgcccagtgacacaggacgcccgaatcaagaggcacaattacatctgcgaactgcttctcgaggaggcgaagaagaaggactgggtagtgttcaaggaaccgcacataagggattccaacaaggaactgtacaaacctgacctgatatttgtgaaggatgggcgtgcacttgtcgtggatgtgacagtacggtatgaagcagccaaatcatcgctggaggaagccgctgcagagaaagtgagaaagtacaaacacctggaaacggaagtaagacatctcacgaatgcaaaggacgttacttttgtgggctttcccctaggagcgcgggggaaatggcaccaagataactttaaacttttgactgagcttggcctctccaaatcgaggcaagtgaaaatggcagagactttttccacagtagcgctcttttcatctgtggacattgtacatatgtttgccagtagggccagaaaatctatggttatgtgataataggctgccttctgcggggcttgccttctggccatgcccttcttctctcccttgcacctgtacctcttggtctttgaataaagcctgagtaggaaggaccggtaaaaaaaaaaaaaaaaaaaaaaaaaaaaaaacgttgactaaaaaaaaaaaaaaaaaaaaaaaaaaaaaaaaaaaaaaaaaaaaaaaaaaaaaaaaaaaaaaaaaaaaaa

SEQ ID NO: 10625 - DNA, 4460 bp, synthetic construct
  source 1..4460: mol_type = other DNA
gaaataagagagaaaagaagagtaagaagaaatataagagaattcgccaccatgcctaagagaaaggtgtccagcgccgagggcgctgccaaggaagagcctaaacggagaagcgccagactgagcgccaagccccccgccaaggtggaagccaagcctaagaaggccgccgctaaggacaagagcagcgataagaaagtccagaccaagggcaagcggggcgccaaaggcaaacaggccgaggtggccaaccaggagacaaaggaagatctgcctgctgagaacggcgaaaccaagaccgaggaatctccagcttctgacgaggccggagagaaggaggccaaaagcgacagcggctctgagacacctggaacaagcgagagcgccaccccggaatccgtgaccgtgaagttcaagtacaagggcgaggaaaaggaagtggacatcagcaagatcaagaaggtctggcgggtgggcaagatgatcagctttacctacgacgataacggcaagacaggcagaggcgccgtgtccgagaaggacgcccctaaagagctgctgcagatgctggaaaaaagcggctctgagacacctggaacaagcgagagcgccaccccggaatccctgtttgtgcctgaagaggggagcagcgagaaggagagcgaggacgcgccaaaaacatctcctccgacgcctgggaaacatggtttggaacagactggggaggaaaaagtgatggtgactgttcctgacaaaaatccaccttgtccttgctgtggtacccgggtaaactctgtgttgaatctgattgaacatctgaaagtgtcacacgggaaaaggggggtttgttttcggtgtgcaaaatgtggaaaggaaaatagtaactatcacagtgttgtttgtcattttaagaaatgcaggggtccagagacggagaaagccccagctggggagtggatttgtgaggtatgcaacagagattttacaaccaaaattggcctgggacaacacaagagattggcacacccagcagtgagaaatcaggaaaggatcgttgcttcccaaccgaaagaaacatcaaatagaggtgctcacaaaaggtgctggacaaaggaggaggaagaattactaataagactggaggctcagttcgagggaaacaaaaatattaataagcttattgcagaacacataaccaccaaaacagctaagcagatcagtgacaaaaggcgattgctgtccagaaagccagcagaggagccacgtgaggagcctggaacgtgtcatcacaccaggagagcagctgcgagcctgagaacggagcctgagatgagtcatcacgcccaggcagaggacagagataatggacctgggagacgccctctgccaggcagggcagctgccggagggagaacaatggacgagataagacgccaccctgataagggcaacggacagcagagacccaccaagcaaaaatcagaagaacagctgcaggcttactataaaaagacactagaggaacgactttcagctggggcacttaacaccttcccccgagcattcaagcaggtaatggaaggccgggatataaagctagtaatcaatcagacagcgcaggactgcttcggatgcctggaatccataagccaaataagaacggcaacccgagataaaaaggacacggtgacccgggagaaacacccaaagaaaccttttcagaagtggatgaagaagagagcaatcaaaaaaggtaattatcttcggttccagcgtttattttatcttgatagagggaaactggctaaaatcattttagatgatattgaatgcttgtcttgtgacataccactcagtgaaatttattcggtttttaaaacaagatgggaaacaactggtagctttaaaagccttggggactttaaaacttacgggaaggctgacaacactgccttcagagaattaattacggctaaagaaattgagaaaaatgtgcaggaaatgagcaaaggctcggctcccggtccagacgggattactcttggggacgtcgtaaagatggatcccgagttttcccggaccatggagattttcaatttatggttaacaactggtaaaatcccggacatggtgagggggtgcagaaccgttttgattccaaaatcatcagacccggatcgtttgaaagacattaataactggagacctatcacgatcggttccatcttgctgagactgttctccaggattgtaacagctaggctgagcaaagcgtgccccctgaacccaaggcaaagaggctttatcagagcggcgggatgctctgaaaacttaaaactcctgcaaactataatttggtcggccaaaagagaacacagaccactgggtgttgtattcgtggacatcgccaaggcttttgacaccgtaagccaccagcacatcattcatgctttgcagcaaagagaggtggatccccacatcgtcggtctggtgagcaatatgtacgagaacatcagtacgtatatcaccacaaagaggaacacacacacagacaaaatccagatccgggttggagtaaagcagggtgacccgatgtcgccccttttatttaacctggcaatggaccctctattatgcaagctggaagagagtggcaaaggataccaccgaggacagagcagcatcacagcgatggcatttgcagacgatctggttttgctgagcgactcctgggaaaatatgaatacaaatattagcatactggagaccttctgcaatctgaccggactcaaaacacaggggcaaaagtgccacggcttttacatcaagccgacaaaggactcttacaccatcaatgactgcgctgcctggactatcaacggcacacccctgaacatgatcgaccccggcgaatctgagaaatacctcggcctgcagtttgacccgtggattggaatagcaaggtccggtctctccacaaaactagatttttggcttcagcggatcgatcaagcaccacttaaacctctgcagaaaactgatattctcaaaacatacaccatccctcggctgatctacatagctgaccactcagaagtgaaaagcgcactactcgaaacccttgaccagaagatccggacagcggtcaaggaatggcttcacctacctccgtgcacctgcgatgccatcctgtactcgagcacgagagacggcggtttgggcatcaccaaattggcaggactgatccccagcgtgcaggcccgtagactgcatcggatcgcacagtcatctgacgatacgatgaaatgcttcatggaaaaagagaaaatggaacagctgcataagaaattgtggattcaagctggaggggacagagagaacataccctcgatttgggaagcaccaccgtcgagtgaaccaccaaacaacgtgagcacaaattcggaatgggaagcaccgacccagaaagataaatttccaaagccttgcaattggaggaaaaacgaattcaaaaaatggaccaaattggcatcccaaggccgcggaattgtaaattttgaaagagacaaaattagtaaccattggatccaatactacagacgcatacctcacaggaaactcctcactgcactacaactcagggccaacgtttaccccacgagagaatttctagccaggggtagacaagaccaatacatcaaggcgtgtaggcactgcgatgcggacaacgaatcctgcgcccacatcatcggcaactgcccagtgacacaggacgcccgaatcaagaggcacaattacatctgcgaactgcttctcgaggaggcgaagaagaaggactgggtagtgttcaaggaaccgcacataagggattccaacaaggaactgtacaaacctgacctgatatttgtgaaggatgggcgtgcacttgtcgtggatgtgacagtacggtatgaagcagccaaatcatcgctggaggaagccgctgcagagaaagtgagaaagtacaaacacctggaaacggaagtaagacatctcacgaatgcaaaggacgttacttttgtgggctttcccctaggagcgcgggggaaatggcaccaagataactttaaacttttgactgagcttggcctctccaaatcgaggcaagtgaaaatggcagagactttttccacagtagcgctcttttcatctgtggacattgtacatatgtttgccagtagggccagaaaatctatggttatgtgataataggctgccttctgcggggcttgccttctggccatgcccttcttctctcccttgcacctgtacctcttggtctttgaataaagcctgagtaggaaggaccggtaaaaaaaaaaaaaaaaaaaaaaaaaaaaaaacgttgactaaaaaaaaaaaaaaaaaaaaaaaaaaaaaaaaaaaaaaaaaaaaaaaaaaaaaaaaaaaaaaaaaaaaaa

SEQ ID NO: 10626 - DNA, 5144 bp, synthetic construct
  source 1..5144: mol_type = other DNA
gaaataagagagaaaagaagagtaagaagaaatataagagaattcgccaccatggcccctaagaaaaagagaaaggtggtgaccgtgaagttcaagtacaagggcgaggaaaaggaagtggacatcagcaagatcaagaaggtctggcgggtgggcaagatgatcagctttacctacgacgataacggcaagacaggcagaggcgccgtgtccgagaaggacgcccctaaagagctgctgcagatgctggaaaaaagcggctctgagacacctggaacaagcgagagcgccaccccggaatccaatatcagcggctctagctgcggcagccccaacagcgccgacaccagcagcgacttcaaggacctgtggaccaagctgaaggaatgccacgaccgggaagtgcagggactccaggtgaaggtcaccaaactcaagcaagaaagaatcctggacgcccagagactggaagaattcttcaccaagaaccagcagctgagagagcagcagaaagtgctgcacgagacaatcaaggttctggaagatagactgcgggccggcctgtgcgacagatgcgccgtgaccgaggaacacatgcgcaaaaagcagcaggagttcgagaacattagacagcaaaatctgaaattgatcacagagctgatgaacgagagaaacacactgcaggaggagaacaagaagctgagcgagcagctgcaacagaagatcgagaatgatcagcaacaccaggccgctgagctggaatgtgaagaggacgtgatccccgacagcccaatcacagctttcagcttttctggcgtgaacagactgaggcggaaggaaaacccccacgtgcggtacatcgagcagacccataccaagctggaacacagcgtgtgtgccaacgagatgagaaaggtgtccaagtcctccacccatccccagcacaaccctaacgaaaatgagatcctggtggctgatacctacgaccagtctcagagccctatggccaaggcccacggcaccagctcttatacccctgataagagctccttcaacctggccaccgtggtggccgagacactgggcctgggcgtgcaggaggaaagcgagacacagggcccaatgagccctctgggagatgagctgtaccactgcctggaaggcaaccacaagaaacagccttttgagtccggctccgagactcctggaacaagcgagagcgctacacctgagggcagctatgaacaacttgcaccacaaccgtgtgtgggagaaactttacattctagcctcccacgagacagtgaactgtttgtgcctgaagaggggagcagcgagaaggagagcgaggacgcgccaaaaacatctcctccgacgcctgggaaacatggtttggaacagactggggaggaaaaagtgatggtgactgttcctgacaaaaatccaccttgtccttgctgtggtacccgggtaaactctgtgttgaatctgattgaacatctgaaagtgtcacacgggaaaaggggggtttgttttcggtgtgcaaaatgtggaaaggaaaatagtaactatcacagtgttgtttgtcattttaagaaatgcaggggtccagagacggagaaagccccagctggggagtggatttgtgaggtatgcaacagagattttacaaccaaaattggcctgggacaacacaagagattggcacacccagcagtgagaaatcaggaaaggatcgttgcttcccaaccgaaagaaacatcaaatagaggtgctcacaaaaggtgctggacaaaggaggaggaagaattactaataagactggaggctcagttcgagggaaacaaaaatattaataagcttattgcagaacacataaccaccaaaacagctaagcagatcagtgacaaaaggcgattgctgtccagaaagccagcagaggagccacgtgaggagcctggaacgtgtcatcacaccaggagagcagctgcgagcctgagaacggagcctgagatgagtcatcacgcccaggcagaggacagagataatggacctgggagacgccctctgccaggcagggcagctgccggagggagaacaatggacgagataagacgccaccctgataagggcaacggacagcagagacccaccaagcaaaaatcagaagaacagctgcaggcttactataaaaagacactagaggaacgactttcagctggggcacttaacaccttcccccgagcattcaagcaggtaatggaaggccgggatataaagctagtaatcaatcagacagcgcaggactacttcggatgcctggaatccataagccaaataagaacggcaacccgagataaaaaggacacggtgacccgggagaaacacccaaagaaaccttttcagaagtggatgaagaagagagcaatcaaaaaaggtaattatcttcggttccagcgtttattttatcttgatagagggaaactggctaaaatcattttagatgatattgaatgcttgtcttgtgacataccactcagtgaaatttattcggtttttaaaacaagatgggaaacaactggtagctttaaaagccttggggactttaaaacttacgggaaggctgacaacactgccttcagagaattaattacggctaaagaaattgagaaaaatgtgcaggaaatgagcaaaggctcggctcccggtccagacgggattactcttggggacgtcgtaaagatggatcccgagttttcccggaccatggagattttcaatttatggttaacaactggtaaaatcccggacatggtgagggggtgcagaaccgttttgattccaaaatcatcagacccggatcgtttgaaagacattaataactggagacctatcacgatcggttccatcttgctgagactgttctccaggattgtaacagctaggctgagcaaagcgtgccccctgaacccaaggcaaagaggctttatcagagcggcgggatgctctgaaaacttaaaactcctgcaaactataatttggtcggccaaaagagaacacagaccactgggtgttgtattcgtggacatcgccaaggcttttgacaccgtaagccaccagcacatcattcatgctttgcagcaaagagaggtggatccccacatcgtcggtctggtgagcaatatgtacgagaacatcagtacgtatatcaccacaaagaggaacacacacacagacaaaatccagatccgggttggagtaaagcagggtgacccgatgtcgccccttttatttaacctggcaatggaccctctattatgcaagctggaagagagtggcaaaggataccaccgaggacagagcagcatcacagcgatggcatttgcagacgatctggttttgctgagcgactcctgggaaaatatgaatacaaatattagcatactggagaccttctgcaatctgaccggactcaaaacacaggggcaaaagtgccacggcttttacatcaagccgacaaaggactcttacaccatcaatgactgcgctgcctggactatcaacggcacacccctgaacatgatcgaccccggcgaatctgagaaatacctcggcctgcagtttgacccgtggattggaatagcaaggtccggtctctccacaaaactagatttttggcttcagcggatcgatcaagcaccacttaaacctctgcagaaaactgatattctcaaaacatacaccatccctcggctgatctacatagctgaccactcagaagtgaaaagcgcactactcgaaacccttgaccagaagatccggacagcggtcaaggaatggcttcacctacctccgtgcacctgcgatgccatcctgtactcgagcacgagagacggcggtttgggcatcaccaaattggcaggactgatccccagcgtgcaggcccgtagactgcatcggatcgcacagtcatctgacgatacgatgaaatgcttcatggaaaaagagaaaatggaacagctgcataagaaattgtggattcaagctggaggggacagagagaacataccctcgatttgggaagcaccaccgtcgagtgaaccaccaaacaacgtgagcacaaattcggaatgggaagcaccgacccagaaagataaatttccaaagccttgcaattggaggaaaaacgaattcaaaaaatggaccaaattggcatcccaaggccgcggaattgtaaattttgaaagagacaaaattagtaaccattggatccaatactacagacgcatacctcacaggaaactcctcactgcactacaactcagggccaacgtttaccccacgagagaatttctagccaggggtagacaagaccaatacatcaaggcgtgtaggcactgcgatgcggacaacgaatcctgcgcccacatcatcggcaactgcccagtgacacaggacgcccgaatcaagaggcacaattacatctgcgaactgcttctcgaggaggcgaagaagaaggactgggtagtgttcaaggaaccgcacataagggattccaacaaggaactgtacaaacctgacctgatatttgtgaaggatgggcgtgcacttgtcgtggatgtgacagtacggtatgaagcagccaaatcatcgctggaggaagccgctgcagagaaagtgagaaagtacaaacacctggaaacggaagtaagacatctcacgaatgcaaaggacgttacttttgtgggctttcccctaggagcgcgggggaaatggcaccaagataactttaaacttttgactgagcttggcctctccaaatcgaggcaagtgaaaatggcagagactttttccacagtagcgctcttttcatctgtggacattgtacatatgtttgccagtagggccagaaaatctatggttatgtgataataggctgccttctgcggggcttgccttctggccatgcccttcttctctcccttgcacctgtacctcttggtctttgaataaagcctgagtaggaaggaccggtaaaaaaaaaaaaaaaaaaaaaaaaaaaaaaacgttgactaaaaaaaaaaaaaaaaaaaaaaaaaaaaaaaaaaaaaaaaaaaaaaaaaaaaaaaaaaaaaaaaaaaaaa

SEQ ID NO: 10627 - DNA, 4484 bp, synthetic construct
  source 1..4484: mol_type = other DNA
gaaataagagagaaaagaagagtaagaagaaatataagagaattcgccaccatggcccctaagaaaaagagaaaggtggtgaccgtgaagttcaagtacaagggcgaggaaaaggaagtggacatcagcaagatcaagaaggtctggcgggtgggcaagatgatcagctttacctacgacgataacggcaagacaggcagaggcgccgtgtccgagaaggacgcccctaaagagctgctgcagatgctggaaaaaagcggctctgagacacctggaacaagcgagagcgccaccccggaatcccctaagagaaaggtgtccagcgccgagggcgctgccaaggaagagcctaaacggagaagcgccagactgagcgccaagccccccgccaaggtggaagccaagcctaagaaggccgccgctaaggacaagagcagcgataagaaagtccagaccaagggcaagcggggcgccaaaggcaaacaggccgaggtggccaaccaggagacaaaggaagatctgcctgctgagaacggcgaaaccaagaccgaggaatctccagcttctgacgaggccggagagaaggaggccaaaagcgacagcggctctgagacacctggaacaagcgagagcgccaccccggaatccctgtttgtgcctgaagaggggagcagcgagaaggagagcgaggacgcgccaaaaacatctcctccgacgcctgggaaacatggtttggaacagactggggaggaaaaagtgatggtgactgttcctgacaaaaatccaccttgtccttgctgtggtacccgggtaaactctgtgttgaatctgattgaacatctgaaagtgtcacacgggaaaaggggggtttgttttcggtgtgcaaaatgtggaaaggaaaatagtaactatcacagtgttgtttgtcattttaagaaatgcaggggtccagagacggagaaagccccagctggggagtggatttgtgaggtatgcaacagagattttacaaccaaaattggcctgggacaacacaagagattggcacacccagcagtgagaaatcaggaaaggatcgttgcttcccaaccgaaagaaacatcaaatagaggtgctcacaaaaggtgctggacaaaggaggaggaagaattactaataagactggaggctcagttcgagggaaacaaaaatattaataagcttattgcagaacacataaccaccaaaacagctaagcagatcagtgacaaaaggcgattgctgtccagaaagccagcagaggagccacgtgaggagcctggaacgtgtcatcacaccaggagagcagctgcgagcctgagaacggagcctgagatgagtcatcacgcccaggcagaggacagagataatggacctgggagacgccctctgccaggcagggcagctgccggagggagaacaatggacgagataagacgccaccctgataagggcaacggacagcagagacccaccaagcaaaaatcagaagaacagctgcaggcttactataaaaagacactagaggaacgactttcagctggggcacttaacaccttcccccgagcattcaagcaggtaatggaaggccgggatataaagctagtaatcaatcagacagcgcaggactgcttcggatgcctggaatccataagccaaataagaacggcaacccgagataaaaaggacacggtgacccgggagaaacacccaaagaaaccttttcagaagtggatgaagaagagagcaatcaaaaaaggtaattatcttcggttccagcgtttattttatcttgatagagggaaactggctaaaatcattttagatgatattgaatgcttgtcttgtgacataccactcagtgaaatttattcggtttttaaaacaagatgggaaacaactggtagctttaaaagccttggggactttaaaacttacgggaaggctgacaacactgccttcagagaattaattacggctaaagaaattgagaaaaatgtgcaggaaatgagcaaaggctcggctcccggtccagacgggattactcttggggacgtcgtaaagatggatcccgagttttcccggaccatggagattttcaatttatggttaacaactggtaaaatcccggacatggtgagggggtgcagaaccgttttgattccaaaatcatcagacccggatcgtttgaaagacattaataactggagacctatcacgatcggttccatcttgctgagactgttctccaggattgtaacagctaggctgagcaaagcgtgccccctgaacccaaggcaaagaggctttatcagagcggcgggatgctctgaaaacttaaaactcctgcaaactataatttggtcggccaaaagagaacacagaccactgggtgttgtattcgtggacatcgccaaggcttttgacaccgtaagccaccagcacatcattcatgctttgcagcaaagagaggtggatccccacatcgtcggtctggtgagcaatatgtacgagaacatcagtacgtatatcaccacaaagaggaacacacacacagacaaaatccagatccgggttggagtaaagcagggtgacccgatgtcgccccttttatttaacctggcaatggaccctctattatgcaagctggaagagagtggcaaaggataccaccgaggacagagcagcatcacagcgatggcatttgcagacgatctggttttgctgagcgactcctgggaaaatatgaatacaaatattagcatactggagaccttctgcaatctgaccggactcaaaacacaggggcaaaagtgccacggcttttacatcaagccgacaaaggactcttacaccatcaatgactgcgctgcctggactatcaacggcacacccctgaacatgatcgaccccggcgaatctgagaaatacctcggcctgcagtttgacccgtggattggaatagcaaggtccggtctctccacaaaactagatttttggcttcagcggatcgatcaagcaccacttaaacctctgcagaaaactgatattctcaaaacatacaccatccctcggctgatctacatagctgaccactcagaagtgaaaagcgcactactcgaaacccttgaccagaagatccggacagcggtcaaggaatggcttcacctacctccgtgcacctgcgatgccatcctgtactcgagcacgagagacggcggtttgggcatcaccaaattggcaggactgatccccagcgtgcaggcccgtagactgcatcggatcgcacagtcatctgacgatacgatgaaatgcttcatggaaaaagagaaaatggaacagctgcataagaaattgtggattcaagctggaggggacagagagaacataccctcgatttgggaagcaccaccgtcgagtgaaccaccaaacaacgtgagcacaaattcggaatgggaagcaccgacccagaaagataaatttccaaagccttgcaattggaggaaaaacgaattcaaaaaatggaccaaattggcatcccaaggccgcggaattgtaaattttgaaagagacaaaattagtaaccattggatccaatactacagacgcatacctcacaggaaactcctcactgcactacaactcagggccaacgtttaccccacgagagaatttctagccaggggtagacaagaccaatacatcaaggcgtgtaggcactgcgatgcggacaacgaatcctgcgcccacatcatcggcaactgcccagtgacacaggacgcccgaatcaagaggcacaattacatctgcgaactgcttctcgaggaggcgaagaagaaggactgggtagtgttcaaggaaccgcacataagggattccaacaaggaactgtacaaacctgacctgatatttgtgaaggatgggcgtgcacttgtcgtggatgtgacagtacggtatgaagcagccaaatcatcgctggaggaagccgctgcagagaaagtgagaaagtacaaacacctggaaacggaagtaagacatctcacgaatgcaaaggacgttacttttgtgggctttcccctaggagcgcgggggaaatggcaccaagataactttaaacttttgactgagcttggcctctccaaatcgaggcaagtgaaaatggcagagactttttccacagtagcgctcttttcatctgtggacattgtacatatgtttgccagtagggccagaaaatctatggttatgtgataataggctgccttctgcggggcttgccttctggccatgcccttcttctctcccttgcacctgtacctcttggtctttgaataaagcctgagtaggaaggaccggtaaaaaaaaaaaaaaaaaaaaaaaaaaaaaaacgttgactaaaaaaaaaaaaaaaaaaaaaaaaaaaaaaaaaaaaaaaaaaaaaaaaaaaaaaaaaaaaaaaaaaaaaa

SEQ ID NO: 10628 - DNA, 5144 bp, synthetic construct
  source 1..5144: mol_type = other DNA
gaaataagagagaaaagaagagtaagaagaaatataagagaattcgccaccatggcccctaagaaaaagcggaaggtgaatatcagcggctctagctgcggcagccccaacagcgccgacaccagcagcgacttcaaggacctgtggaccaagctgaaggaatgccacgaccgggaagtgcagggactccaggtgaaggtcaccaaactcaagcaagaaagaatcctggacgcccagagactggaagaattcttcaccaagaaccagcagctgagagagcagcagaaagtgctgcacgagacaatcaaggttctggaagatagactgcgggccggcctgtgcgacagatgcgccgtgaccgaggaacacatgcgcaaaaagcagcaggagttcgagaacattagacagcaaaatctgaaattgatcacagagctgatgaacgagagaaacacactgcaggaggagaacaagaagctgagcgagcagctgcaacagaagatcgagaatgatcagcaacaccaggccgctgagctggaatgtgaagaggacgtgatccccgacagcccaatcacagctttcagcttttctggcgtgaacagactgaggcggaaggaaaacccccacgtgcggtacatcgagcagacccataccaagctggaacacagcgtgtgtgccaacgagatgagaaaggtgtccaagtcctccacccatccccagcacaaccctaacgaaaatgagatcctggtggctgatacctacgaccagtctcagagccctatggccaaggcccacggcaccagctcttatacccctgataagagctccttcaacctggccaccgtggtggccgagacactgggcctgggcgtgcaggaggaaagcgagacacagggcccaatgagccctctgggagatgagctgtaccactgcctggaaggcaaccacaagaaacagccttttgagtccggctccgagactcctggaacaagcgagagcgctacacctgagggcagcgtgaccgtgaagttcaagtacaagggcgaggaaaaggaagtggacatcagcaagatcaagaaggtctggcgggtgggcaagatgatcagctttacctacgacgataacggcaagacaggcagaggcgccgtgtccgagaaggacgcccctaaagagctgctgcagatgctggaaaaaagcggctctgagacacctggaacaagcgagagcgccaccccggaatcctatgaacaacttgcaccacaaccgtgtgtgggagaaactttacattctagcctcccacgagacagtgaactgtttgtgcctgaagaggggagcagcgagaaggagagcgaggacgcgccaaaaacatctcctccgacgcctgggaaacatggtttggaacagactggggaggaaaaagtgatggtgactgttcctgacaaaaatccaccttgtccttgctgtggtacccgggtaaactctgtgttgaatctgattgaacatctgaaagtgtcacacgggaaaaggggggtttgttttcggtgtgcaaaatgtggaaaggaaaatagtaactatcacagtgttgtttgtcattttaagaaatgcaggggtccagagacggagaaagccccagctggggagtggatttgtgaggtatgcaacagagattttacaaccaaaattggcctgggacaacacaagagattggcacacccagcagtgagaaatcaggaaaggatcgttgcttcccaaccgaaagaaacatcaaatagaggtgctcacaaaaggtgctggacaaaggaggaggaagaattactaataagactggaggctcagttcgagggaaacaaaaatattaataagcttattgcagaacacataaccaccaaaacagctaagcagatcagtgacaaaaggcgattgctgtccagaaagccagcagaggagccacgtgaggagcctggaacgtgtcatcacaccaggagagcagctgcgagcctgagaacggagcctgagatgagtcatcacgcccaggcagaggacagagataatggacctgggagacgccctctgccaggcagggcagctgccggagggagaacaatggacgagataagacgccaccctgataagggcaacggacagcagagacccaccaagcaaaaatcagaagaacagctgcaggcttactataaaaagacactagaggaacgactttcagctggggcacttaacaccttcccccgagcattcaagcaggtaatggaaggccgggatataaagctagtaatcaatcagacagcgcaggactgcttcggatgcctggaatccataagccaaataagaacggcaacccgagataaaaaggacacggtgacccgggagaaacacccaaagaaaccttttcagaagtggatgaagaagagagcaatcaaaaaaggtaattatcttcggttccagcgtttattttatcttgatagagggaaactggctaaaatcattttagatgatattgaatgcttgtcttgtgacataccactcagtgaaatttattcggtttttaaaacaagatgggaaacaactggtagctttaaaagccttggggactttaaaacttacgggaaggctgacaacactgccttcagagaattaattacggctaaagaaattgagaaaaatgtgcaggaaatgagcaaaggctcggctcccggtccagacgggattactcttggggacgtcgtaaagatggatcccgagttttcccggaccatggagattttcaatttatggttaacaactggtaaaatcccggacatggtgagggggtgcagaaccgttttgattccaaaatcatcaaagccggatcgtttgaaagacattaataactggagacctatcacgatcggttccatcttgctgagactgttctccaggattgtaacagctaggctgagcaaagcgtgccccctgaacccaaggcaaagaggctttatcagagcggcgggatgctctgaaaacttaaaactcctgcaaactataatttggtcggccaaaagagaacacagaccactgggtgttgtattcgtggacatcgccaaggcttttgacaccgtaagccaccagcacatcattcatgctttgcagcaaagagaggtggatccccacatcgtcggtctggtgagcaatatgtacgagaacatcagtacgtatatcaccacaaagaggaacacacacacagacaaaatccagatccgggttggagtaaagcagggtgacccgatgtcgccccttttatttaacctggcaatggaccctctattatgcaagctggaagagagtggcaaaggataccaccgaggacagagcagcatcacagcgatggcatttgcagacgatctggttttgctgagcgactcctgggaaaatatgaatacaaatattagcatactggagaccttctgcaatctgaccggactcaaaacacaggggcaaaagtgccacggcttttacatcaagccgacaaagaagtcttacaccatcaatgactgcgctgcctggactatcaacggcacacccctgaacatgatcgaccccggcgaatctgagaaatacctcggcctgcagtttgacccgtggattggaatagcaaggtccggtctctccacaaaactagatttttggcttcagcggatcgatcaagcaccacttaaacctctgcagaaaactgatattctcaaaacatacaccatccctcggctgatctacatagctgaccactcagaagtgaaaagcgcactactcgaaacccttgaccagaagatccggacagcggtcaaggaatggcttcacctacctccgtgcacctgcgatgccatcctgtactcgagcacgagagacggcggtttgggcatcaccaaattggcaggactgatccccagcgtgcaggcccgtagactgcatcggatcgcacagtcatctgacgatacgatgaaatgcttcatggaaaaagagaaaatggaacagctgcataagaaattgtggattcaagctggaggggacagagagaacataccctcgatttgggaagcaccaccgtcgagtgaaccaccaaacaacgtgagcacaaattcggaatgggaagcaccgacccagaaagataaatttccaaagccttgcaattggaggaaaaacgaattcaaaaaatggaccaaattggcatcccaaggccgcggaattgtaaattttgaaagagacaaaattagtaaccattggatccaatactacagacgcatacctcacaggaaactcctcactgcactacaactcagggccaacgtttaccccacgagagaatttctagccaggggtagacaagaccaatacatcaaggcgtgtaggcactgcgatgcggacaacgaatcctgcgcccacatcatcggcaactgcccagtgacacaggacgcccgaatcaagaggcacaattacatctgcgaactgcttctcgaggaggcgaagaagaaggactgggtagtgttcaaggaaccgcacataagggattccaacaaggaactgtacaaacctgacctgatatttgtgaaggatgggcgtgcacttgtcgtggatgtgacagtacggtatgaagcagccaaatcatcgctggaggaagccgctgcagagaaagtgagaaagtacaaacacctggaaacggaagtaagacatctcacgaatgcaaaggacgttacttttgtgggctttcccctaggagcgcgggggaaatggcaccaagataactttaaacttttgactgagcttggcctctccaaatcgaggcaagtgaaaatggcagagactttttccacagtagcgctcttttcatctgtggacattgtacatatgtttgccagtagggccagaaaatctatggttatgtgataataggctgccttctgcggggcttgccttctggccatgcccttcttctctcccttgcacctgtacctcttggtctttgaataaagcctgagtaggaaggaccggtaaaaaaaaaaaaaaaaaaaaaaaaaaaaaaacgttgactaaaaaaaaaaaaaaaaaaaaaaaaaaaaaaaaaaaaaaaaaaaaaaaaaaaaaaaaaaaaaaaaaaaaaa

SEQ ID NO: 10629 - DNA, 5144 bp, synthetic construct
  source 1..5144: mol_type = other DNA
gaaataagagagaaaagaagagtaagaagaaatataagagaattcgccaccatggcccctaagaaaaagcggaaggtggtgaccgtgaagttcaagtacaagggcgaggaaaaggaagtggacatcagcaagatcaagaaggtctggcgggtgggcaagatgatcagctttacctacgacgataacggcaagacaggcagaggcgccgtgtccgagaaggacgcccctaaagagctgctgcagatgctggaaaaaagcggctctgagacacctggaacaagcgagagcgccaccccggaatccaatatcagcggctctagctgcggcagccccaacagcgccgacaccagcagcgacttcaaggacctgtggaccaagctgaaggaatgccacgaccgggaagtgcagggactccaggtgaaggtcaccaaactcaagcaagaaagaatcctggacgcccagagactggaagaattcttcaccaagaaccagcagctgagagagcagcagaaagtgctgcacgagacaatcaaggttctggaagatagactgcgggccggcctgtgcgacagatgcgccgtgaccgaggaacacatgcgcaaaaagcagcaggagttcgagaacattagacagcaaaatctgaaattgatcacagagctgatgaacgagagaaacacactgcaggaggagaacaagaagctgagcgagcagctgcaacagaagatcgagaatgatcagcaacaccaggccgctgagctggaatgtgaagaggacgtgatccccgacagcccaatcacagctttcagcttttctggcgtgaacagactgaggcggaaggaaaacccccacgtgcggtacatcgagcagacccataccaagctggaacacagcgtgtgtgccaacgagatgagaaaggtgtccaagtcctccacccatccccagcacaaccctaacgaaaatgagatcctggtggctgatacctacgaccagtctcagagccctatggccaaggcccacggcaccagctcttatacccctgataagagctccttcaacctggccaccgtggtggccgagacactgggcctgggcgtgcaggaggaaagcgagacacagggcccaatgagccctctgggagatgagctgtaccactgcctggaaggcaaccacaagaaacagccttttgagtccggctccgagactcctggaacaagcgagagcgctacacctgagggcagctatgaacaacttgcaccacaaccgtgtgtgggagaaactttacattctagcctcccacgagacagtgaactgtttgtgcctgaagaggggagcagcgagaaggagagcgaggacgcgccaaaaacatctcctccgacgcctgggaaacatggtttggaacagactggggaggaaaaagtgatggtgactgttcctgacaaaaatccaccttgtccttgctgtggtacccgggtaaactctgtgttgaatctgattgaacatctgaaagtgtcacacgggaaaaggggggtttgttttcggtgtgcaaaatgtggaaaggaaaatagtaactatcacagtgttgtttgtcattttaagaaatgcaggggtccagagacggagaaagccccagctggggagtggatttgtgaggtatgcaacagagattttacaaccaaaattggcctgggacaacacaagagattggcacacccagcagtgagaaatcaggaaaggatcgttgcttcccaaccgaaagaaacatcaaatagaggtgctcacaaaaggtgctggacaaaggaggaggaagaattactaataagactggaggctcagttcgagggaaacaaaaatattaataagcttattgcagaacacataaccaccaaaacagctaagcagatcagtgacaaaaggcgattgctgtccagaaagccagcagaggagccacgtgaggagcctggaacgtgtcatcacaccaggagagcagctgcgagcctgagaacggagcctgagatgagtcatcacgcccaggcagaggacagagataatggacctgggagacgccctctgccaggcagggcagctgccggagggagaacaatggacgagataagacgccaccctgataagggcaacggacagcagagacccaccaagcaaaaatcagaagaacagctgcaggcttactataaaaagacactagaggaacgactttcagctggggcacttaacaccttcccccgagcattcaagcaggtaatggaaggccgggatataaagctagtaatcaatcagacagcgcaggactgcttcggatgcctggaatccataagccaaataagaacggcaacccgagataaaaaggacacggtgacccgggagaaacacccaaagaaaccttttcagaagtggatgaagaagagagcaatcaaaaaaggtaattatcttcggttccagcgtttattttatcttgatagagggaaactggctaaaatcattttagatgatattgaatgcttgtcttgtgacatccctcttagcgagatctacagcgttttcaagaccagatgggagaccaccggcagcttcaagagcctgggcgacttcaagacatacggcaaggccgacaacaccgccttcagagagctcatcaccgccaaggagatcgagaagaatgtgcaggagatgagcaagggctccgcgccagggcccgatggaattacattaggcgatgtggtgaagatggaccccgagttcagcagaaccatggagatcttcaacctgtggctcaccaccgggaagatccccgacatggttagaggctgcagaaccgttctcatccccaagagcagcaagcccgacagactgaaggacatcaacaactggagacccatcaccatcggcagcatcctgctgagactgttctccagaatcgtgaccgccagactgtccaaggcctgccctctgaaccctagacagagaggcttcatcagagctgccggctgcagcgagaacctgaagcttctgcagaccatcatctggagcgccaagagagagcacagacccctgggcgttgtgttcgtggacatcgccaaggctttcgacactgtgagccaccagcacatcatccacgccctgcaacagcgagaggtcgaccctcacatcgtgggccttgtgagcaacatgtacgagaacatcagcacctacatcaccaccaagagaaacacccacaccgacaagatccagatacgtgtgggcgtcaagcagggcgaccctatgagccctcttctgttcaacctcgccatggaccctctgctgtgcaagctggaggagtctggcaagggataccacagaggccagagctcgattactgccatggccttcgccgacgacctggtgcttctgagcgattcttgggagaacatgaacaccaacatctccatcctcgagaccttctgcaacctcaccggcctgaaaacccagggccaaaagtgccacggcttctacatcaagcccaccaaggacagctacaccatcaacgactgcgctgcctggaccatcaatggcacccctctcaacatgatcgaccccggcgagagcgagaagtacctgggcttacagttcgacccttggatcggcatcgccagaagcggccttagcacaaagttggacttctggctccagagaatcgaccaggcccccctgaagcctcttcagaaaaccgacatcctgaaaacctacacaatccccagactcatctacatcgccgaccacagcgaggtcaagagcgcactactcgaaacccttgaccagaagatccggacagcggtcaaggaatggcttcacctacctccgtgcacctgcgatgccatcctgtactcgagcacgagagacggcggtttgggcatcaccaaattggcaggactgatccccagcgtgcaggcccgtagactgcatcggatcgcacagtcatctgacgatacgatgaaatgcttcatggaaaaagagaaaatggaacagctgcataagaaattgtggattcaagctggaggggacagagagaacataccctcgatttgggaagcaccaccgtcgagtgaaccaccaaacaacgtgagcacaaattcggaatgggaagcaccgacccagaaagataaatttccaaagccttgcaattggaggaaaaacgaattcaaaaaatggaccaaattggcatcccaaggccgcggaattgtaaattttgaaagagacaaaattagtaaccattggatccaatactacagacgcatacctcacaggaaactcctcactgcactacaactcagggccaacgtttaccccacgagagaatttctagccaggggtagacaagaccaatacatcaaggcgtgtaggcactgcgatgcggacaacgaatcctgcgcccacatcatcggcaactgcccagtgacacaggacgcccgaatcaagaggcacaattacatctgcgaactgcttctcgaggaggcgaagaagaaggactgggtagtgttcaaggaaccgcacataagggattccaacaaggaactgtacaaacctgacctgatatttgtgaaggatgggcgtgcacttgtcgtggatgtgacagtacggtatgaagcagccaaatcatcgctggaggaagccgctgcagagaaagtgagaaagtacaaacacctggaaacggaagtaagacatctcacgaatgcaaaggacgttacttttgtgggctttcccctaggagcgcgggggaaatggcaccaagataactttaaacttttgactgagcttggcctctccaaatcgaggcaagtgaaaatggcagagactttttccacagtagcgctcttttcatctgtggacattgtacatatgtttgccagtagggccagaaaatctatggttatgtgataataggctgccttctgcggggcttgccttctggccatgcccttcttctctcccttgcacctgtacctcttggtctttgaataaagcctgagtaggaaggaccggtaaaaaaaaaaaaaaaaaaaaaaaaaaaaaaacgttgactaaaaaaaaaaaaaaaaaaaaaaaaaaaaaaaaaaaaaaaaaaaaaaaaaaaaaaaaaaaaaaaaaaaaaa

SEQ ID NO: 10630 - DNA, 4460 bp, synthetic construct
  source 1..4460: mol_type = other DNA
gaaataagagagaaaagaagagtaagaagaaatataagagaattcgccaccatgcctaagagaaaggtgtccagcgccgagggcgctgccaaggaagagcctaaacggagaagcgccagactgagcgccaagccccccgccaaggtggaagccaagcctaagaaggccgccgctaaggacaagagcagcgataagaaagtccagaccaagggcaagcggggcgccaaaggcaaacaggccgaggtggccaaccaggagacaaaggaagatctgcctgctgagaacggcgaaaccaagaccgaggaatctccagcttctgacgaggccggagagaaggaggccaaaagcgacagcggctctgagacacctggaacaagcgagagcgccaccccggaatccgtgaccgtgaagttcaagtacaagggcgaggaaaaggaagtggacatcagcaagatcaagaaggtctggcgggtgggcaagatgatcagctttacctacgacgataacggcaagacaggcagaggcgccgtgtccgagaaggacgcccctaaagagctgctgcagatgctggaaaaaagcggctctgagacacctggaacaagcgagagcgccaccccggaatccctgtttgtgcctgaagaggggagcagcgagaaggagagcgaggacgcgccaaaaacatctcctccgacgcctgggaaacatggtttggaacagactggggaggaaaaagtgatggtgactgttcctgacaaaaatccaccttgtccttgctgtggtacccgggtaaactctgtgttgaatctgattgaacatctgaaagtgtcacacgggaaaaggggggtttgttttcggtgtgcaaaatgtggaaaggaaaatagtaactatcacagtgttgtttgtcattttaagaaatgcaggggtccagagacggagaaagccccagctggggagtggatttgtgaggtatgcaacagagattttacaaccaaaattggcctgggacaacacaagagattggcacacccagcagtgagaaatcaggaaaggatcgttgcttcccaaccgaaagaaacatcaaatagaggtgctcacaaaaggtgctggacaaaggaggaggaagaattactaataagactggaggctcagttcgagggaaacaaaaatattaataagcttattgcagaacacataaccaccaaaacagctaagcagatcagtgacaaaaggcgattgctgtccagaaagccagcagaggagccacgtgaggagcctggaacgtgtcatcacaccaggagagcagctgcgagcctgagaacggagcctgagatgagtcatcacgcccaggcagaggacagagataatggacctgggagacgccctctgccaggcagggcagctgccggagggagaacaatggacgagataagacgccaccctgataagggcaacggacagcagagacccaccaagcaaaaatcagaagaacagctgcaggcttactataaaaagacactagaggaacgactttcagctggggcacttaacaccttcccccgagcattcaagcaggtaatggaaggccgggatataaagctagtaatcaatcagacagcgcaggactgcttcggatgcctggaatccataagccaaataagaacggcaacccgagataaaaaggacacggtgacccgggagaaacacccaaagaaaccttttcagaagtggatgaagaagagagcaatcaaaaaaggtaattatcttcggttccagcgtttattttatcttgatagagggaaactggctaaaatcattttagatgatattgaatgcttgtcttgtgacataccactcagtgaaatttattcggtttttaaaacaagatgggaaacaactggtagctttaaaagccttggggactttaaaacttacgggaaggctgacaacactgccttcagagaattaattacggctaaagaaattgagaaaaatgtgcaggaaatgagcaaaggctcggctcccggtccagacgggattactcttggggacgtcgtaaagatggatcccgagttttcccggaccatggagattttcaatttatggttaacaactggtaaaatcccggacatggtgagggggtgcagaaccgttttgattccaaaatcatcaaagccggatcgtttgaaagacattaataactggagacctatcacgatcggttccatcttgctgagactgttctccaggattgtaacagctaggctgagcaaagcgtgccccctgaacccaaggcaaagaggctttatcagagcggcgggatgctctgaaaacttaaaactcctgcaaactataatttggtcggccaaaagagaacacagaccactgggtgttgtattcgtggacatcgccaaggcttttgacaccgtaagccaccagcacatcattcatgctttgcagcaaagagaggtggatccccacatcgtcggtctggtgagcaatatgtacgagaacatcagtacgtatatcaccacaaagaggaacacacacacagacaaaatccagatccgggttggagtaaagcagggtgacccgatgtcgccccttttatttaacctggcaatggaccctctattatgcaagctggaagagagtggcaaaggataccaccgaggacagagcagcatcacagcgatggcatttgcagacgatctggttttgctgagcgactcctgggaaaatatgaatacaaatattagcatactggagaccttctgcaatctgaccggactcaaaacacaggggcaaaagtgccacggcttttacatcaagccgacaaagaagtcttacaccatcaatgactgcgctgcctggactatcaacggcacacccctgaacatgatcgaccccggcgaatctgagaaatacctcggcctgcagtttgacccgtggattggaatagcaaggtccggtctctccacaaaactagatttttggcttcagcggatcgatcaagcaccacttaaacctctgcagaaaactgatattctcaaaacatacaccatccctcggctgatctacatagctgaccactcagaagtgaaaagcgcactactcgaaacccttgaccagaagatccggacagcggtcaaggaatggcttcacctacctccgtgcacctgcgatgccatcctgtactcgagcacgagagacggcggtttgggcatcaccaaattggcaggactgatccccagcgtgcaggcccgtagactgcatcggatcgcacagtcatctgacgatacgatgaaatgcttcatggaaaaagagaaaatggaacagctgcataagaaattgtggattcaagctggaggggacagagagaacataccctcgatttgggaagcaccaccgtcgagtgaaccaccaaacaacgtgagcacaaattcggaatgggaagcaccgacccagaaagataaatttccaaagccttgcaattggaggaaaaacgaattcaaaaaatggaccaaattggcatcccaaggccgcggaattgtaaattttgaaagagacaaaattagtaaccattggatccaatactacagacgcatacctcacaggaaactcctcactgcactacaactcagggccaacgtttaccccacgagagaatttctagccaggggtagacaagaccaatacatcaaggcgtgtaggcactgcgatgcggacaacgaatcctgcgcccacatcatcggcaactgcccagtgacacaggacgcccgaatcaagaggcacaattacatctgcgaactgcttctcgaggaggcgaagaagaaggactgggtagtgttcaaggaaccgcacataagggattccaacaaggaactgtacaaacctgacctgatatttgtgaaggatgggcgtgcacttgtcgtggatgtgacagtacggtatgaagcagccaaatcatcgctggaggaagccgctgcagagaaagtgagaaagtacaaacacctggaaacggaagtaagacatctcacgaatgcaaaggacgttacttttgtgggctttcccctaggagcgcgggggaaatggcaccaagataactttaaacttttgactgagcttggcctctccaaatcgaggcaagtgaaaatggcagagactttttccacagtagcgctcttttcatctgtggacattgtacatatgtttgccagtagggccagaaaatctatggttatgtgataataggctgccttctgcggggcttgccttctggccatgcccttcttctctcccttgcacctgtacctcttggtctttgaataaagcctgagtaggaaggaccggtaaaaaaaaaaaaaaaaaaaaaaaaaaaaaaacgttgactaaaaaaaaaaaaaaaaaaaaaaaaaaaaaaaaaaaaaaaaaaaaaaaaaaaaaaaaaaaaaaaaaaaaaa

SEQ ID NO: 10631 - DNA, 5144 bp, synthetic construct
  source 1..5144: mol_type = other DNA
gaaataagagagaaaagaagagtaagaagaaatataagagaattcgccaccatggcccctaagaaaaagcggaaggtgaatatcagcggctctagctgcggcagccccaacagcgccgacaccagcagcgacttcaaggacctgtggaccaagctgaaggaatgccacgaccgggaagtgcagggactccaggtgaaggtcaccaaactcaagcaagaaagaatcctggacgcccagagactggaagaattcttcaccaagaaccagcagctgagagagcagcagaaagtgctgcacgagacaatcaaggttctggaagatagactgcgggccggcctgtgcgacagatgcgccgtgaccgaggaacacatgcgcaaaaagcagcaggagttcgagaacattagacagcaaaatctgaaattgatcacagagctgatgaacgagagaaacacactgcaggaggagaacaagaagctgagcgagcagctgcaacagaagatcgagaatgatcagcaacaccaggccgctgagctggaatgtgaagaggacgtgatccccgacagcccaatcacagctttcagcttttctggcgtgaacagactgaggcggaaggaaaacccccacgtgcggtacatcgagcagacccataccaagctggaacacagcgtgtgtgccaacgagatgagaaaggtgtccaagtcctccacccatccccagcacaaccctaacgaaaatgagatcctggtggctgatacctacgaccagtctcagagccctatggccaaggcccacggcaccagctcttatacccctgataagagctccttcaacctggccaccgtggtggccgagacactgggcctgggcgtgcaggaggaaagcgagacacagggcccaatgagccctctgggagatgagctgtaccactgcctggaaggcaaccacaagaaacagccttttgagtccggctccgagactcctggaacaagcgagagcgctacacctgagggcagcgtgaccgtgaagttcaagtacaagggcgaggaaaaggaagtggacatcagcaagatcaagaaggtctggcgggtgggcaagatgatcagctttacctacgacgataacggcaagacaggcagaggcgccgtgtccgagaaggacgcccctaaagagctgctgcagatgctggaaaaaagcggctctgagacacctggaacaagcgagagcgccaccccggaatcctatgaacaacttgcaccacaaccgtgtgtgggagaaactttacattctagcctcccacgagacagtgaactgtttgtgcctgaagaggggagcagcgagaaggagagcgaggacgcgccaaaaacatctcctccgacgcctgggaaacatggtttggaacagactggggaggaaaaagtgatggtgactgttcctgacaaaaatccaccttgtccttgctgtggtacccgggtaaactctgtgttgaatctgattgaacatctgaaagtgtcacacgggaaaaggggggtttgttttcggtgtgcaaaatgtggaaaggaaaatagtaactatcacagtgttgtttgtcattttaagaaatgcaggggtccagagacggagaaagccccagctggggagtggatttgtgaggtatgcaacagagattttacaaccaaaattggcctgggacaacacaagagattggcacacccagcagtgagaaatcaggaaaggatcgttgcttcccaaccgaaagaaacatcaaatagaggtgctcacaaaaggtgctggacaaaggaggaggaagaattactaataagactggaggctcagttcgagggaaacaaaaatattaataagcttattgcagaacacataaccaccaaaacagctaagcagatcagtgacaaaaggcgattgctgtccagaaagccagcagaggagccacgtgaggagcctggaacgtgtcatcacaccaggagagcagctgcgagcctgagaacggagcctgagatgagtcatcacgcccaggcagaggacagagataatggacctgggagacgccctctgccaggcagggcagctgccggagggagaacaatggacgagataagacgccaccctgataagggcaacggacagcagagacccaccaagcaaaaatcagaagaacagctgcaggcttactataaaaagacactagaggaacgactttcagctggggcacttaacaccttcccccgagcattcaagcaggtaatggaaggccgggatataaagctagtaatcaatcagacagcgcaggactgcttcggatgcctggaatccataagccaaataagaacggcaacccgagataaaaaggacacggtgacccgggagaaacacccaaagaaaccttttcagaagtggatgaagaagagagcaatcaaaaaaggtaattatcttcggttccagcgtttattttatcttgatagagggaaactggctaaaatcattttagatgatattgaatgcttgtcttgtgacataccactcagtgaaatttattcggtttttaaaacaagatgggaaacaactggtagctttaaaagccttggggactttaaaacttacgggaaggctgacaacactgccttcagagaattaattacggctaaagaaattgagaaaaatgtgcaggaaatgagcaaaggctcggctcccggtccagacgggattactcttggggacgtcgtaaagatggatcccgagttttcccggaccatggagattttcaatttatggttaacaactggtaaaatcccggacatggtgagggggtgcagaaccgttttgattccaaaatcatcagacccggatcgtttgaaagacattaataactggagacctatcacgatcggttccatcttgctgagactgttctccaggattgtaacagctaggctgagcaaagcgtgccccctgaacccaaggcaaagaggctttatcagagcggcgggatgctctgaaaacttaaaactcctgcaaactataatttggtcggccaaaagagaacacagaccactgggtgttgtattcgtggacatcgccaaggcttttgacaccgtaagccaccagcacatcattcatgctttgcagcaaagagaggtggatccccacatcgtcggtctggtgagcaatatgtacgagaacatcagtacgtatatcaccacaaagaggaacacacacacagacaaaatccagatccgggttggagtaaagcagggtgacccgatgtcgccccttttatttaacctggcaatggaccctctattatgcaagctggaagagagtggcaaaggataccaccgaggacagagcagcatcacagcgatggcatttgcagacgatctggttttgctgagcgactcctgggaaaatatgaatacaaatattagcatactggagaccttctgcaatctgaccggactcaaaacacaggggcaaaagtgccacggcttttacatcaagccgacaaaggactcttacaccatcaatgactgcgctgcctggactatcaacggcacacccctgaacatgatcgaccccggcgaatctgagaaatacctcggcctgcagtttgacccgtggattggaatagcaaggtccggtctctccacaaaactagatttttggcttcagcggatcgatcaagcaccacttaaacctctgcagaaaactgatattctcaaaacatacaccatccctcggctgatctacatagctgaccactcagaagtgaaaagcgcactactcgaaacccttgaccagaagatccggacagcggtcaaggaatggcttcacctacctccgtgcacctgcgatgccatcctgtactcgagcacgagagacggcggtttgggcatcaccaaattggcaggactgatccccagcgtgcaggcccgtagactgcatcggatcgcacagtcatctgacgatacgatgaaatgcttcatggaaaaagagaaaatggaacagctgcataagaaattgtggattcaagctggaggggacagagagaacataccctcgatttgggaagcaccaccgtcgagtgaaccaccaaacaacgtgagcacaaattcggaatgggaagcaccgacccagaaagataaatttccaaagccttgcaattggaggaaaaacgaattcaaaaaatggaccaaattggcatcccaaggccgcggaattgtaaattttgaaagagacaaaattagtaaccattggatccaatactacagacgcatacctcacaggaaactcctcactgcactacaactcagggccaacgtttaccccacgagagaatttctagccaggggtagacaagaccaatacatcaaggcgtgtaggcactgcgatgcggacaacgaatcctgcgcccacatcatcggcaactgcccagtgacacaggacgcccgaatcaagaggcacaattacatctgcgaactgcttctcgaggaggcgaagaagaaggactgggtagtgttcaaggaaccgcacataagggattccaacaaggaactgtacaaacctgacctgatatttgtgaaggatgggcgtgcacttgtcgtggatgtgacagtacggtatgaagcagccaaatcatcgctggaggaagccgctgcagagaaagtgagaaagtacaaacacctggaaacggaagtaagacatctcacgaatgcaaaggacgttacttttgtgggctttcccctaggagcgcgggggaaatggcaccaagataactttaaacttttgactgagcttggcctctccaaatcgaggcaagtgaaaatggcagagactttttccacagtagcgctcttttcatctgtggacattgtacatatgtttgccagtagggccagaaaatctatggttatgtgataataggctgccttctgcggggcttgccttctggccatgcccttcttctctcccttgcacctgtacctcttggtctttgaataaagcctgagtaggaaggaccggtaaaaaaaaaaaaaaaaaaaaaaaaaaaaaaacgttgactaaaaaaaaaaaaaaaaaaaaaaaaaaaaaaaaaaaaaaaaaaaaaaaaaaaaaaaaaaaaaaaaaaaaaa

SEQ ID NO: 10632 - DNA, 5144 bp, synthetic construct
  source 1..5144: mol_type = other DNA
gaaataagagagaaaagaagagtaagaagaaatataagagaattcgccaccatggcccctaagaaaaagcggaaggtgaatatcagcggctctagctgcggcagccccaacagcgccgacaccagcagcgacttcaaggacctgtggaccaagctgaaggaatgccacgaccgggaagtgcagggactccaggtgaaggtcaccaaactcaagcaagaaagaatcctggacgcccagagactggaagaattcttcaccaagaaccagcagctgagagagcagcagaaagtgctgcacgagacaatcaaggttctggaagatagactgcgggccggcctgtgcgacagatgcgccgtgaccgaggaacacatgcgcaaaaagcagcaggagttcgagaacattagacagcaaaatctgaaattgatcacagagctgatgaacgagagaaacacactgcaggaggagaacaagaagctgagcgagcagctgcaacagaagatcgagaatgatcagcaacaccaggccgctgagctggaatgtgaagaggacgtgatccccgacagcccaatcacagctttcagcttttctggcgtgaacagactgaggcggaaggaaaacccccacgtgcggtacatcgagcagacccataccaagctggaacacagcgtgtgtgccaacgagatgagaaaggtgtccaagtcctccacccatccccagcacaaccctaacgaaaatgagatcctggtggctgatacctacgaccagtctcagagccctatggccaaggcccacggcaccagctcttatacccctgataagagctccttcaacctggccaccgtggtggccgagacactgggcctgggcgtgcaggaggaaagcgagacacagggcccaatgagccctctgggagatgagctgtaccactgcctggaaggcaaccacaagaaacagccttttgagtccggctccgagactcctggaacaagcgagagcgctacacctgagggcagcgtgaccgtgaagttcaagtacaagggcgaggaaaaggaagtggacatcagcaagatcaagaaggtctggcgggtgggcaagatgatcagctttacctacgacgataacggcaagacaggcagaggcgccgtgtccgagaaggacgcccctaaagagctgctgcagatgctggaaaaaagcggctctgagacacctggaacaagcgagagcgccaccccggaatcctatgaacaacttgcaccacaaccgtgtgtgggagaaactttacattctagcctcccacgagacagtgaactgtttgtgcctgaagaggggagcagcgagaaggagagcgaggacgcgccaaaaacatctcctccgacgcctgggaaacatggtttggaacagactggggaggaaaaagtgatggtgactgttcctgacaaaaatccaccttgtccttgctgtggtacccgggtaaactctgtgttgaatctgattgaacatctgaaagtgtcacacgggaaaaggggggtttgttttcggtgtgcaaaatgtggaaaggaaaatagtaactatcacagtgttgtttgtcattttaagaaatgcaggggtccagagacggagaaagccccagctggggagtggatttgtgaggtatgcaacagagattttacaaccaaaattggcctgggacaacacaagagattggcacacccagcagtgagaaatcaggaaaggatcgttgcttcccaaccgaaagaaacatcaaatagaggtgctcacaaaaggtgctggacaaaggaggaggaagaattactaataagactggaggctcagttcgagggaaacaaaaatattaataagcttattgcagaacacataaccaccaaaacagctaagcagatcagtgacaaaaggcgattgctgtccagaaagccagcagaggagccacgtgaggagcctggaacgtgtcatcacaccaggagagcagctgcgagcctgagaacggagcctgagatgagtcatcacgcccaggcagaggacagagataatggacctgggagacgccctctgccaggcagggcagctgccggagggagaacaatggacgagataagacgccaccctgataagggcaacggacagcagagacccaccaagcaaaaatcagaagaacagctgcaggcttactataaaaagacactagaggaacgactttcagctggggcacttaacaccttcccccgagcattcaagcaggtaatggaaggccgggatataaagctagtaatcaatcagacagcgcaggactgcttcggatgcctggaatccataagccaaataagaacggcaacccgagataaaaaggacacggtgacccgggagaaacacccaaagaaaccttttcagaagtggatgaagaagagagcaatcaaaaaaggtaattatcttcggttccagcgtttattttatcttgatagagggaaactggctaaaatcattttagatgatattgaatgcttgtcttgtgacataccactcagtgaaatttattcggtttttaaaacaagatgggaaacaactggtagctttaaaagccttggggactttaaaacttacgggaaggctgacaacactgccttcagagaattaattacggctaaagaaattgagaaaaatgtgcaggaaatgagcaaaggctcggctcccggtccagacgggattactcttggggacgtcgtaaagatggatcccgagttttcccggaccatggagattttcaatttatggttaacaactggtaaaatcccggacatggtgagggggtgcagaaccgttttgattccaaaatcatcaaagccggatcgtttgaaagacattaataactggagacctatcacgatcggttccatcttgctgagactgttctccaggattgtaacagctaggctgagcaaagcgtgccccctgaacccaaggcaaagaggctttatcagagcggcgggatgctctgaaaacttaaaactcctgcaaactataatttggtcggccaaaagagaacacagaccactgggtgttgtattcgtggacatcgccaaggcttttgacaccgtaagccaccagcacatcattcatgctttgcagcaaagagaggtggatccccacatcgtcggtctggtgagcaatatgtacgagaacatcagtacgtatatcaccacaaagaggaacacacacacagacaaaatccagatccgggttggagtaaagcagggtgacccgatgtcgccccttttatttaacctggcaatggaccctctattatgcaagctggaagagagtggcaaaggataccaccgaggacagagcagcatcacagcgatggcatttgcagacgatctggttttgctgagcgactcctgggaaaatatgaatacaaatattagcatactggagaccttctgcaatctgaccggactcaaaacacaggggcaaaagtgccacggcttttacatcaagccgacaaaggactcttacaccatcaatgactgcgctgcctggactatcaacggcacacccctgaacatgatcgaccccggcgaatctgagaaatacctcggcctgcagtttgacccgtggattggaatagcaaggtccggtctctccacaaaactagatttttggcttcagcggatcgatcaagcaccacttaaacctctgcagaaaactgatattctcaaaacatacaccatccctcggctgatctacatagctgaccactcagaagtgaaaagcgcactactcgaaacccttgaccagaagatccggacagcggtcaaggaatggcttcacctacctccgtgcacctgcgatgccatcctgtactcgagcacgagagacggcggtttgggcatcaccaaattggcaggactgatccccagcgtgcaggcccgtagactgcatcggatcgcacagtcatctgacgatacgatgaaatgcttcatggaaaaagagaaaatggaacagctgcataagaaattgtggattcaagctggaggggacagagagaacataccctcgatttgggaagcaccaccgtcgagtgaaccaccaaacaacgtgagcacaaattcggaatgggaagcaccgacccagaaagataaatttccaaagccttgcaattggaggaaaaacgaattcaaaaaatggaccaaattggcatcccaaggccgcggaattgtaaattttgaaagagacaaaattagtaaccattggatccaatactacagacgcatacctcacaggaaactcctcactgcactacaactcagggccaacgtttaccccacgagagaatttctagccaggggtagacaagaccaatacatcaaggcgtgtaggcactgcgatgcggacaacgaatcctgcgcccacatcatcggcaactgcccagtgacacaggacgcccgaatcaagaggcacaattacatctgcgaactgcttctcgaggaggcgaagaagaaggactgggtagtgttcaaggaaccgcacataagggattccaacaaggaactgtacaaacctgacctgatatttgtgaaggatgggcgtgcacttgtcgtggatgtgacagtacggtatgaagcagccaaatcatcgctggaggaagccgctgcagagaaagtgagaaagtacaaacacctggaaacggaagtaagacatctcacgaatgcaaaggacgttacttttgtgggctttcccctaggagcgcgggggaaatggcaccaagataactttaaacttttgactgagcttggcctctccaaatcgaggcaagtgaaaatggcagagactttttccacagtagcgctcttttcatctgtggacattgtacatatgtttgccagtagggccagaaaatctatggttatgtgataataggctgccttctgcggggcttgccttctggccatgcccttcttctctcccttgcacctgtacctcttggtctttgaataaagcctgagtaggaaggaccggtaaaaaaaaaaaaaaaaaaaaaaaaaaaaaaacgttgactaaaaaaaaaaaaaaaaaaaaaaaaaaaaaaaaaaaaaaaaaaaaaaaaaaaaaaaaaaaaaaaaaaaaaa

SEQ ID NO: 10633 - DNA, 4484 bp, synthetic construct
  source 1..4484: mol_type = other DNA
gaaataagagagaaaagaagagtaagaagaaatataagagaattcgccaccatggcccctaagaaaaagagaaaggtggtgaccgtgaagttcaagtacaagggcgaggaaaaggaagtggacatcagcaagatcaagaaggtctggcgggtgggcaagatgatcagctttacctacgacgataacggcaagacaggcagaggcgccgtgtccgagaaggacgcccctaaagagctgctgcagatgctggaaaaaagcggctctgagacacctggaacaagcgagagcgccaccccggaatcccctaagagaaaggtgtccagcgccgagggcgctgccaaggaagagcctaaacggagaagcgccagactgagcgccaagccccccgccaaggtggaagccaagcctaagaaggccgccgctaaggacaagagcagcgataagaaagtccagaccaagggcaagcggggcgccaaaggcaaacaggccgaggtggccaaccaggagacaaaggaagatctgcctgctgagaacggcgaaaccaagaccgaggaatctccagcttctgacgaggccggagagaaggaggccaaaagcgacagcggctctgagacacctggaacaagcgagagcgccaccccggaatccctgtttgtgcctgaagaggggagcagcgagaaggagagcgaggacgcgccaaaaacatctcctccgacgcctgggaaacatggtttggaacagactggggaggaaaaagtgatggtgactgttcctgacaaaaatccaccttgtccttgctgtggtacccgggtaaactctgtgttgaatctgattgaacatctgaaagtgtcacacgggaaaaggggggtttgttttcggtgtgcaaaatgtggaaaggaaaatagtaactatcacagtgttgtttgtcattttaagaaatgcaggggtccagagacggagaaagccccagctggggagtggatttgtgaggtatgcaacagagattttacaaccaaaattggcctgggacaacacaagagattggcacacccagcagtgagaaatcaggaaaggatcgttgcttcccaaccgaaagaaacatcaaatagaggtgctcacaaaaggtgctggacaaaggaggaggaagaattactaataagactggaggctcagttcgagggaaacaaaaatattaataagcttattgcagaacacataaccaccaaaacagctaagcagatcagtgacaaaaggcgattgctgtccagaaagccagcagaggagccacgtgaggagcctggaacgtgtcatcacaccaggagagcagctgcgagcctgagaacggagcctgagatgagtcatcacgcccaggcagaggacagagataatggacctgggagacgccctctgccaggcagggcagctgccggagggagaacaatggacgagataagacgccaccctgataagggcaacggacagcagagacccaccaagcaaaaatcagaagaacagctgcaggcttactataaaaagacactagaggaacgactttcagctggggcacttaacaccttcccccgagcattcaagcaggtaatggaaggccgggatataaagctagtaatcaatcagacagcgcaggactgcttcggatgcctggaatccataagccaaataagaacggcaacccgagataaaaaggacacggtgacccgggagaaacacccaaagaaaccttttcagaagtggatgaagaagagagcaatcaaaaaaggtaattatcttcggttccagcgtttattttatcttgatagagggaaactggctaaaatcattttagatgatattgaatgcttgtcttgtgacataccactcagtgaaatttattcggtttttaaaacaagatgggaaacaactggtagctttaaaagccttggggactttaaaacttacgggaaggctgacaacactgccttcagagaattaattacggctaaagaaattgagaaaaatgtgcaggaaatgagcaaaggctcggctcccggtccagacgggattactcttggggacgtcgtaaagatggatcccgagttttcccggaccatggagattttcaatttatggttaacaactggtaaaatcccggacatggtgagggggtgcagaaccgttttgattccaaaatcatcaaagccggatcgtttgaaagacattaataactggagacctatcacgatcggttccatcttgctgagactgttctccaggattgtaacagctaggctgagcaaagcgtgccccctgaacccaaggcaaagaggctttatcagagcggcgggatgctctgaaaacttaaaactcctgcaaactataatttggtcggccaaaagagaacacagaccactgggtgttgtattcgtggacatcgccaaggcttttgacaccgtaagccaccagcacatcattcatgctttgcagcaaagagaggtggatccccacatcgtcggtctggtgagcaatatgtacgagaacatcagtacgtatatcaccacaaagaggaacacacacacagacaaaatccagatccgggttggagtaaagcagggtgacccgatgtcgccccttttatttaacctggcaatggaccctctattatgcaagctggaagagagtggcaaaggataccaccgaggacagagcagcatcacagcgatggcatttgcagacgatctggttttgctgagcgactcctgggaaaatatgaatacaaatattagcatactggagaccttctgcaatctgaccggactcaaaacacaggggcaaaagtgccacggcttttacatcaagccgacaaaggactcttacaccatcaatgactgcgctgcctggactatcaacggcacacccctgaacatgatcgaccccggcgaatctgagaaatacctcggcctgcagtttgacccgtggattggaatagcaaggtccggtctctccacaaaactagatttttggcttcagcggatcgatcaagcaccacttaaacctctgcagaaaactgatattctcaaaacatacaccatccctcggctgatctacatagctgaccactcagaagtgaaaagcgcactactcgaaacccttgaccagaagatccggacagcggtcaaggaatggcttcacctacctccgtgcacctgcgatgccatcctgtactcgagcacgagagacggcggtttgggcatcaccaaattggcaggactgatccccagcgtgcaggcccgtagactgcatcggatcgcacagtcatctgacgatacgatgaaatgcttcatggaaaaagagaaaatggaacagctgcataagaaattgtggattcaagctggaggggacagagagaacataccctcgatttgggaagcaccaccgtcgagtgaaccaccaaacaacgtgagcacaaattcggaatgggaagcaccgacccagaaagataaatttccaaagccttgcaattggaggaaaaacgaattcaaaaaatggaccaaattggcatcccaaggccgcggaattgtaaattttgaaagagacaaaattagtaaccattggatccaatactacagacgcatacctcacaggaaactcctcactgcactacaactcagggccaacgtttaccccacgagagaatttctagccaggggtagacaagaccaatacatcaaggcgtgtaggcactgcgatgcggacaacgaatcctgcgcccacatcatcggcaactgcccagtgacacaggacgcccgaatcaagaggcacaattacatctgcgaactgcttctcgaggaggcgaagaagaaggactgggtagtgttcaaggaaccgcacataagggattccaacaaggaactgtacaaacctgacctgatatttgtgaaggatgggcgtgcacttgtcgtggatgtgacagtacggtatgaagcagccaaatcatcgctggaggaagccgctgcagagaaagtgagaaagtacaaacacctggaaacggaagtaagacatctcacgaatgcaaaggacgttacttttgtgggctttcccctaggagcgcgggggaaatggcaccaagataactttaaacttttgactgagcttggcctctccaaatcgaggcaagtgaaaatggcagagactttttccacagtagcgctcttttcatctgtggacattgtacatatgtttgccagtagggccagaaaatctatggttatgtgataataggctgccttctgcggggcttgccttctggccatgcccttcttctctcccttgcacctgtacctcttggtctttgaataaagcctgagtaggaaggaccggtaaaaaaaaaaaaaaaaaaaaaaaaaaaaaaacgttgactaaaaaaaaaaaaaaaaaaaaaaaaaaaaaaaaaaaaaaaaaaaaaaaaaaaaaaaaaaaaaaaaaaaaaa

SEQ ID NO: 10634 - DNA, 4460 bp, synthetic construct
  source 1..4460: mol_type = other DNA
gaaataagagagaaaagaagagtaagaagaaatataagagaattcgccaccatgcctaagagaaaggtgtccagcgccgagggcgctgccaaggaagagcctaaacggagaagcgccagactgagcgccaagccccccgccaaggtggaagccaagcctaagaaggccgccgctaaggacaagagcagcgataagaaagtccagaccaagggcaagcggggcgccaaaggcaaacaggccgaggtggccaaccaggagacaaaggaagatctgcctgctgagaacggcgaaaccaagaccgaggaatctccagcttctgacgaggccggagagaaggaggccaaaagcgacagcggctctgagacacctggaacaagcgagagcgccaccccggaatccgtgaccgtgaagttcaagtacaagggcgaggaaaaggaagtggacatcagcaagatcaagaaggtctggcgggtgggcaagatgatcagctttacctacgacgataacggcaagacaggcagaggcgccgtgtccgagaaggacgcccctaaagagctgctgcagatgctggaaaaaagcggctctgagacacctggaacaagcgagagcgccaccccggaatccctgtttgtgcctgaagaggggagcagcgagaaggagagcgaggacgcgccaaaaacatctcctccgacgcctgggaaacatggtttggaacagactggggaggaaaaagtgatggtgactgttcctgacaaaaatccaccttgtccttgctgtggtacccgggtaaactctgtgttgaatctgattgaacatctgaaagtgtcacacgggaaaaggggggtttgttttcggtgtgcaaaatgtggaaaggaaaatagtaactatcacagtgttgtttgtcattttaagaaatgcaggggtccagagacggagaaagccccagctggggagtggatttgtgaggtatgcaacagagattttacaaccaaaattggcctgggacaacacaagagattggcacacccagcagtgagaaatcaggaaaggatcgttgcttcccaaccgaaagaaacatcaaatagaggtgctcacaaaaggtgctggacaaaggaggaggaagaattactaataagactggaggctcagttcgagggaaacaaaaatattaataagcttattgcagaacacataaccaccaaaacagctaagcagatcagtgacaaaaggcgattgctgtccagaaagccagcagaggagccacgtgaggagcctggaacgtgtcatcacaccaggagagcagctgcgagcctgagaacggagcctgagatgagtcatcacgcccaggcagaggacagagataatggacctgggagacgccctctgccaggcagggcagctgccggagggagaacaatggacgagataagacgccaccctgataagggcaacggacagcagagacccaccaagcaaaaatcagaagaacagctgcaggcttactataaaaagacactagaggaacgactttcagctggggcacttaacaccttcccccgagcattcaagcaggtaatggaaggccgggatataaagctagtaatcaatcagacagcgcaggactgcttcggatgcctggaatccataagccaaataagaacggcaacccgagataaaaaggacacggtgacccgggagaaacacccaaagaaaccttttcagaagtggatgaagaagagagcaatcaaaaaaggtaattatcttcggttccagcgtttattttatcttgatagagggaaactggctaaaatcattttagatgatattgaatgcttgtcttgtgacataccactcagtgaaatttattcggtttttaaaacaagatgggaaacaactggtagctttaaaagccttggggactttaaaacttacgggaaggctgacaacactgccttcagagaattaattacggctaaagaaattgagaaaaatgtgcaggaaatgagcaaaggctcggctcccggtccagacgggattactcttggggacgtcgtaaagatggatcccgagttttcccggaccatggagattttcaatttatggttaacaactggtaaaatcccggacatggtgagggggtgcagaaccgttttgattccaaaatcatcaaagccggatcgtttgaaagacattaataactggagacctatcacgatcggttccatcttgctgagactgttctccaggattgtaacagctaggctgagcaaagcgtgccccctgaacccaaggcaaagaggctttatcagagcggcgggatgctctgaaaacttaaaactcctgcaaactataatttggtcggccaaaagagaacacagaccactgggtgttgtattcgtggacatcgccaaggcttttgacaccgtaagccaccagcacatcattcatgctttgcagcaaagagaggtggatccccacatcgtcggtctggtgagcaatatgtacgagaacatcagtacgtatatcaccacaaagaggaacacacacacagacaaaatccagatccgggttggagtaaagcagggtgacccgatgtcgccccttttatttaacctggcaatggaccctctattatgcaagctggaagagagtggcaaaggataccaccgaggacagagcagcatcacagcgatggcatttgcagacgatctggttttgctgagcgactcctgggaaaatatgaatacaaatattagcatactggagaccttctgcaatctgaccggactcaaaacacaggggcaaaagtgccacggcttttacatcaagccgacaaaggactcttacaccatcaatgactgcgctgcctggactatcaacggcacacccctgaacatgatcgaccccggcgaatctgagaaatacctcggcctgcagtttgacccgtggattggaatagcaaggtccggtctctccacaaaactagatttttggcttcagcggatcgatcaagcaccacttaaacctctgcagaaaactgatattctcaaaacatacaccatccctcggctgatctacatagctgaccactcagaagtgaaaagcgcactactcgaaacccttgaccagaagatccggacagcggtcaaggaatggcttcacctacctccgtgcacctgcgatgccatcctgtactcgagcacgagagacggcggtttgggcatcaccaaattggcaggactgatccccagcgtgcaggcccgtagactgcatcggatcgcacagtcatctgacgatacgatgaaatgcttcatggaaaaagagaaaatggaacagctgcataagaaattgtggattcaagctggaggggacagagagaacataccctcgatttgggaagcaccaccgtcgagtgaaccaccaaacaacgtgagcacaaattcggaatgggaagcaccgacccagaaagataaatttccaaagccttgcaattggaggaaaaacgaattcaaaaaatggaccaaattggcatcccaaggccgcggaattgtaaattttgaaagagacaaaattagtaaccattggatccaatactacagacgcatacctcacaggaaactcctcactgcactacaactcagggccaacgtttaccccacgagagaatttctagccaggggtagacaagaccaatacatcaaggcgtgtaggcactgcgatgcggacaacgaatcctgcgcccacatcatcggcaactgcccagtgacacaggacgcccgaatcaagaggcacaattacatctgcgaactgcttctcgaggaggcgaagaagaaggactgggtagtgttcaaggaaccgcacataagggattccaacaaggaactgtacaaacctgacctgatatttgtgaaggatgggcgtgcacttgtcgtggatgtgacagtacggtatgaagcagccaaatcatcgctggaggaagccgctgcagagaaagtgagaaagtacaaacacctggaaacggaagtaagacatctcacgaatgcaaaggacgttacttttgtgggctttcccctaggagcgcgggggaaatggcaccaagataactttaaacttttgactgagcttggcctctccaaatcgaggcaagtgaaaatggcagagactttttccacagtagcgctcttttcatctgtggacattgtacatatgtttgccagtagggccagaaaatctatggttatgtgataataggctgccttctgcggggcttgccttctggccatgcccttcttctctcccttgcacctgtacctcttggtctttgaataaagcctgagtaggaaggaccggtaaaaaaaaaaaaaaaaaaaaaaaaaaaaaaacgttgactaaaaaaaaaaaaaaaaaaaaaaaaaaaaaaaaaaaaaaaaaaaaaaaaaaaaaaaaaaaaaaaaaaaaaa

SEQ ID NO: 10635 - DNA, 5308 bp, synthetic construct
  source 1..5308: mol_type = other DNA
ggtctagttacaactgggcatcgctgcagagatcgcacctcctcgtggtcccgctggtagcccttcgaagggtgactaagtcgatctctgccccaggtacggagccgttgggactcaccagtccaacgtaactcctgcctaaattcggtgaaacaaattcctcggtaaaaagccccatggcccctaagaaaaagagaaaggtggtgaccgtgaagttcaagtacaagggcgaggaaaaggaagtggacatcagcaagatcaagaaggtctggcgggtgggcaagatgatcagctttacctacgacgataacggcaagacaggcagaggcgccgtgtccgagaaggacgcccctaaagagctgctgcagatgctggaaaaaagcggctctgagacacctggaacaagcgagagcgccaccccggaatccaatatcagcggctctagctgcggcagccccaacagcgccgacaccagcagcgacttcaaggacctgtggaccaagctgaaggaatgccacgaccgggaagtgcagggactccaggtgaaggtcaccaaactcaagcaagaaagaatcctggacgcccagagactggaagaattcttcaccaagaaccagcagctgagagagcagcagaaagtgctgcacgagacaatcaaggttctggaagatagactgcgggccggcctgtgcgacagatgcgccgtgaccgaggaacacatgcgcaaaaagcagcaggagttcgagaacattagacagcaaaatctgaaattgatcacagagctgatgaacgagagaaacacactgcaggaggagaacaagaagctgagcgagcagctgcaacagaagatcgagaatgatcagcaacaccaggccgctgagctggaatgtgaagaggacgtgatccccgacagcccaatcacagctttcagcttttctggcgtgaacagactgaggcggaaggaaaacccccacgtgcggtacatcgagcagacccataccaagctggaacacagcgtgtgtgccaacgagatgagaaaggtgtccaagtcctccacccatccccagcacaaccctaacgaaaatgagatcctggtggctgatacctacgaccagtctcagagccctatggccaaggcccacggcaccagctcttatacccctgataagagctccttcaacctggccaccgtggtggccgagacactgggcctgggcgtgcaggaggaaagcgagacacagggcccaatgagccctctgggagatgagctgtaccactgcctggaaggcaaccacaagaaacagccttttgagtccggctccgagactcctggaacaagcgagagcgctacacctgagggcagctatgaacaacttgcaccacaaccgtgtgtgggagaaactttacattctagcctcccacgagacagtgaactgtttgtgcctgaagaggggagcagcgagaaggagagcgaggacgcgccaaaaacatctcctccgacgcctgggaaacatggtttggaacagactggggaggaaaaagtgatggtgactgttcctgacaaaaatccaccttgtccttgctgtggtacccgggtaaactctgtgttgaatctgattgaacatctgaaagtgtcacacgggaaaaggggggtttgttttcggtgtgcaaaatgtggaaaggaaaatagtaactatcacagtgttgtttgtcattttccaaaatgcaggggtccagagacggagaaagccccagctggggagtggatttgtgaggtatgcaacagagattttacaaccaaaattggcctgggacaacacaagagattggcacacccagcagtgagaaatcaggaaaggatcgttgcttcccaaccgaaagaaacatcaaatagaggtgctcacaaaaggtgctggacaaaggaggaggaagaattactaataagactggaggctcagttcgagggaaacaaaaatattaataagcttattgcagaacacataaccaccaaaacagctaagcagatcagtgacaaaaggcgattgctgtccagaaagccagcagaggagccacgtgaggagcctggaacgtgtcatcacaccaggagagcagctgcgagcctgagaacggagcctgagatgagtcatcacgcccaggcagaggacagagataatggacctgggagacgccctctgccaggcagggcagctgccggagggagaacaatggacgagataagacgccaccctgataagggcaacggacagcagagacccaccaagcaaaaatcagaagaacagctgcaggcttactataaaaagacactagaggaacgactttcagctggggcacttaacaccttcccccgagcattcaagcaggtaatggaaggccgggatataaagctagtaatcaatcagacagcgcaggactgcttcggatgcctggaatccataagccaaataagaacggcaacccgagataaaaaggacacggtgacccgggagaaacacccaaagaaaccttttcagaagtggatgaaggacagagcaatcaaaaaaggtaattatcttcggttccagcgtttattttatcttgatagagggaaactggctaaaatcattttagatgatattgaatgcttgtcttgtgacataccactcagtgaaatttattcggtttttaaaacaagatgggaaacaactggtagctttaaaagccttggggactttaaaacttacgggaaggctgacaacactgccttcagagaattaattacggctaaagaaattgagaaaaatgtgcaggaaatgagcaaaggctcggctcccggtccagacgggattactcttggggacgtcgtaaagatggatcccgagttttcccggaccatggagattttcaatttatggttaacaactggtaaaatcccggacatggtgagggggtgcagaaccgttttgattccaaaatcatcaaagccggatcgtttgaaagacattaataactggagacctatcacgatcggttccatcttgctgagactgttctccaggattgtaacagctaggctgagcaaagcgtgccccctgaacccaaggcaaagaggctttatcagagcggcgggatgctctgaaaacttaaaactcctgcaaactataatttggtcggccaaaagagaacacagaccactgggtgttgtattcgtggacatcgccaaggcttttgacaccgtaagccaccagcacatcattcatgctttgcagcaaagagaggtggatccccacatcgtcggtctggtgagcaatatgtacgagaacatcagtacgtatatcaccacaaagaggaacacacacacagacaaaatccagatccgggttggagtaaagcagggtgacccgatgtcgccccttttatttaacctggcaatggaccctctattatgcaagctggaagagagtggcaaaggataccaccgaggacagagcagcatcacagcgatggcatttgcagacgatctggttttgctgagcgactcctgggaaaatatgaatacaaatattagcatactggagaccttctgcaatctgaccggactcaaaacacaggggcaaaagtgccacggcttttacatcaagccgacaaaggactcttacaccatcaatgactgcgctgcctggactatcaacggcacacccctgaacatgatcgaccccggcgaatctgagaaatacctcggcctgcagtttgacccgtggattggaatagcaaggtccggtctctccacaaaactagatttttggcttcagcggatcgatcaagcaccacttaaacctctgcagaaaactgatattctcaaaacatacaccatccctcggctgatctacatagctgaccactcagaagtgaaaactgcactactcgaaacccttgaccagaagatccggacagcggtcaaggaatggcttcacctacctccgtgcacctgcgatgccatcctgtactcgagcacgagagacggcggtttgggcatcaccaaattggcaggactgatccccagcgtgcaggcccgtagactgcatcggatcgcacagtcatctgacgatacgatgaaatgcttcatggaaaaagagaaaatggaacagctgcataagaaattgtggattcaagctggaggggacagagagaacataccctcgatttgggaagcaccaccgtcgagtgaaccaccaaacaacgtgagcacaaattcggaatgggaagcaccgacccagaaagataaatttccaaagccttgcaattggaggaaaaacgaattcaaaaaatggaccaaattggcatcccaaggccgcggaattgtaaattttgaaagagacaaaattagtaaccattggatccaatactacagacgcatacctcacaggaaactcctcactgcactacaactcagggccaacgtttaccccacgagagaatttctagccaggggtagacaagaccaatacatcaaggcgtgtaggcactgcgatgcggacattgaatcctgcgcccacatcatcggcaactgcccagtgacacaggacgcccgaatcaagaggcacaattacatctgcgaactgcttctcgaggaggcgaagaagaaggactgggtagtgttcaaggaaccgcacataagggattccaacaaggaactgtacaaacctgacctgatatttgtgaaggatgcccgtgcacttgtcgtggatgtgacagtacggtatgaagcagccaaatcatcgctggaggaagccgctgcagagaaagtgagaaagtacaaacacctggaaacggaagtaagacatctcacgaatgcaaaggacgttacttttgtgggctttcccctaggagcgcgggggaaatggcaccaagataactttaaacttttgactgagcttggcctctccaaatcgaggcaagtgaaaatggcagagactttttccacagtagcgctcttttcatctgtggacattgtacatatgtttgccagtagggccagaaaatctatggttatgtaaaccggtagacatgataagatacattgatgagtttggacaaaccacaactagaatgcagtgaaaaaaatgctttatttgtgaaatttgtgatgctattgctttatttgtaaccattataagctgcaataaacaagttaacaacaacaaaaaaaaaaaaaaaaaaaaaaaaaaaaaaacgttgactaaaaaaaaaaaaaaaaaaaaaaaaaaaaaaaaaaaaaaaaaaaaaaaaaaaaaaaaaaaaaaaaaaaaaa

SEQ ID NO: 10636 - DNA, 5264 bp, synthetic construct
  source 1..5264: mol_type = other DNA
gaaataagagagaaaagaagagtaagaagaaatataagagaattcgccaccatggcccctaagaaaaagcggaaggtgaatatcagcggctctagctgcggcagccccaacagcgccgacaccagcagcgacttcaaggacctgtggaccaagctgaaggaatgccacgaccgggaagtgcagggactccaggtgaaggtcaccaaactcaagcaagaaagaatcctggacgcccagagactggaagaattcttcaccaagaaccagcagctgagagagcagcagaaagtgctgcacgagacaatcaaggttctggaagatagactgcgggccggcctgtgcgacagatgcgccgtgaccgaggaacacatgcgcaaaaagcagcaggagttcgagaacattagacagcaaaatctgaaattgatcacagagctgatgaacgagagaaacacactgcaggaggagaacaagaagctgagcgagcagctgcaacagaagatcgagaatgatcagcaacaccaggccgctgagctggaatgtgaagaggacgtgatccccgacagcccaatcacagctttcagcttttctggcgtgaacagactgaggcggaaggaaaacccccacgtgcggtacatcgagcagacccataccaagctggaacacagcgtgtgtgccaacgagatgagaaaggtgtccaagtcctccacccatccccagcacaaccctaacgaaaatgagatcctggtggctgatacctacgaccagtctcagagccctatggccaaggcccacggcaccagctcttatacccctgataagagctccttcaacctggccaccgtggtggccgagacactgggcctgggcgtgcaggaggaaagcgagacacagggcccaatgagccctctgggagatgagctgtaccactgcctggaaggcaaccacaagaaacagccttttgagtccggctccgagactcctggaacaagcgagagcgctacacctgagggcagccctaagagaaaggtgtccagcgccgagggcgctgccaaggaagagcctaaacggagaagcgccagactgagcgccaagccccccgccaaggtggaagccaagcctaagaaggccgccgctaaggacaagagcagcgataagaaagtccagaccaagggcaagcggggcgccaaaggcaaacaggccgaggtggccaaccaggagacaaaggaagatctgcctgctgagaacggcgaaaccaagaccgaggaatctccagcttctgacgaggccggagagaaggaggccaaaagcgacagcggctctgagacacctggaacaagcgagagcgccaccccggaatcctatgaacaacttgcaccacaaccgtgtgtgggagaaactttacattctagcctcccacgagacagtgaactgtttgtgcctgaagaggggagcagcgagaaggagagcgaggacgcgccaaaaacatctcctccgacgcctgggaaacatggtttggaacagactggggaggaaaaagtgatggtgactgttcctgacaaaaatccaccttgtccttgctgtggtacccgggtaaactctgtgttgaatctgattgaacatctgaaagtgtcacacgggaaaaggggggtttgttttcggtgtgcaaaatgtggaaaggaaaatagtaactatcacagtgttgtttgtcattttaagaaatgcaggggtccagagacggagaaagccccagctggggagtggatttgtgaggtatgcaacagagattttacaaccaaaattggcctgggacaacacaagagattggcacacccagcagtgagaaatcaggaaaggatcgttgcttcccaaccgaaagaaacatcaaatagaggtgctcacaaaaggtgctggacaaaggaggaggaagaattactaataagactggaggctcagttcgagggaaacaaaaatattaataagcttattgcagaacacataaccaccaaaacagctaagcagatcagtgacaaaaggcgattgctgtccagaaagccagcagaggagccacgtgaggagcctggaacgtgtcatcacaccaggagagcagctgcgagcctgagaacggagcctgagatgagtcatcacgcccaggcagaggacagagataatggacctgggagacgccctctgccaggcagggcagctgccggagggagaacaatggacgagataagacgccaccctgataagggcaacggacagcagagacccaccaagcaaaaatcagaagaacagctgcaggcttactataaaaagacactagaggaacgactttcagctggggcacttaacaccttcccccgagcattcaagcaggtaatggaaggccgggatataaagctagtaatcaatcagacagcgcaggactgcttcggatgcctggaatccataagccaaataagaacggcaacccgagataaaaaggacacggtgacccgggagaaacacccaaagaaaccttttcagaagtggatgaagaagagagcaatcaaaaaaggtaattatcttcggttccagcgtttattttatcttgatagagggaaactggctaaaatcattttagatgatattgaatgcttgtcttgtgacataccactcagtgaaatttattcggtttttaaaacaagatgggaaacaactggtagctttaaaagccttggggactttaaaacttacgggaaggctgacaacactgccttcagagaattaattacggctaaagaaattgagaaaaatgtgcaggaaatgagcaaaggctcggctcccggtccagacgggattactcttggggacgtcgtaaagatggatcccgagttttcccggaccatggagattttcaatttatggttaacaactggtaaaatcccggacatggtgagggggtgcagaaccgttttgattccaaaatcatcaaagccggatcgtttgaaagacattaataactggagacctatcacgatcggttccatcttgctgagactgttctccaggattgtaacagctaggctgagcaaagcgtgccccctgaacccaaggcaaagaggctttatcagagcggcgggatgctctgaaaacttaaaactcctgcaaactataatttggtcggccaaaagagaacacagaccactgggtgttgtattcgtggacatcgccaaggcttttgacaccgtaagccaccagcacatcattcatgctttgcagcaaagagaggtggatccccacatcgtcggtctggtgagcaatatgtacgagaacatcagtacgtatatcaccacaaagaggaacacacacacagacaaaatccagatccgggttggagtaaagcagggtgacccgatgtcgccccttttatttaacctggcaatggaccctctattatgcaagctggaagagagtggcaaaggataccaccgaggacagagcagcatcacagcgatggcatttgcagacgatctggttttgctgagcgactcctgggaaaatatgaatacaaatattagcatactggagaccttctgcaatctgaccggactcaaaacacaggggcaaaagtgccacggcttttacatcaagccgacaaaggactcttacaccatcaatgactgcgctgcctggactatcaacggcacacccctgaacatgatcgaccccggcgaatctgagaaatacctcggcctgcagtttgacccgtggattggaatagcaaggtccggtctctccacaaaactagatttttggcttcagcggatcgatcaagcaccacttaaacctctgcagaaaactgatattctcaaaacatacaccatccctcggctgatctacatagctgaccactcagaagtgaaaagcgcactactcgaaacccttgaccagaagatccggacagcggtcaaggaatggcttcacctacctccgtgcacctgcgatgccatcctgtactcgagcacgagagacggcggtttgggcatcaccaaattggcaggactgatccccagcgtgcaggcccgtagactgcatcggatcgcacagtcatctgacgatacgatgaaatgcttcatggaaaaagagaaaatggaacagctgcataagaaattgtggattcaagctggaggggacagagagaacataccctcgatttgggaagcaccaccgtcgagtgaaccaccaaacaacgtgagcacaaattcggaatgggaagcaccgacccagaaagataaatttccaaagccttgcaattggaggaaaaacgaattcaaaaaatggaccaaattggcatcccaaggccgcggaattgtaaattttgaaagagacaaaattagtaaccattggatccaatactacagacgcatacctcacaggaaactcctcactgcactacaactcagggccaacgtttaccccacgagagaatttctagccaggggtagacaagaccaatacatcaaggcgtgtaggcactgcgatgcggacaacgaatcctgcgcccacatcatcggcaactgcccagtgacacaggacgcccgaatcaagaggcacaattacatctgcgaactgcttctcgaggaggcgaagaagaaggactgggtagtgttcaaggaaccgcacataagggattccaacaaggaactgtacaaacctgacctgatatttgtgaaggatgggcgtgcacttgtcgtggatgtgacagtacggtatgaagcagccaaatcatcgctggaggaagccgctgcagagaaagtgagaaagtacaaacacctggaaacggaagtaagacatctcacgaatgcaaaggacgttacttttgtgggctttcccctaggagcgcgggggaaatggcaccaagataactttaaacttttgactgagcttggcctctccaaatcgaggcaagtgaaaatggcagagactttttccacagtagcgctcttttcatctgtggacattgtacatatgtttgccagtagggccagaaaatctatggttatgtgataataggctgccttctgcggggcttgccttctggccatgcccttcttctctcccttgcacctgtacctcttggtctttgaataaagcctgagtaggaaggaccggtaaaaaaaaaaaaaaaaaaaaaaaaaaaaaaacgttgactaaaaaaaaaaaaaaaaaaaaaaaaaaaaaaaaaaaaaaaaaaaaaaaaaaaaaaaaaaaaaaaaaaaaaa

SEQ ID NO: 10637 - DNA, 4603 bp, synthetic construct
  source 1..4603: mol_type = other DNA
ggtctagttacaactgggcatcgctgcagagatcgcacctcctcgtggtcccgctggtagcccttcgaagggtgactaagtcgatctctgccccaggtacggagccgttgggactcaccagtccaacgtaactcctgcctaaattcggtgaaacaaattcctcggtaaaaagccccatggcttcttgcccgaaacctggccccccggtttcagcaggggcaatgagtttggaaagtggactgaccacccactccgttctcgccatcgaacgtggtcccaattcgttggcaaattccggatcagactttgggggggggggtctggggctaccgttacgcctattgagggtatcggtcggcactcagacctcccgctccgactgggtagacctggtgtcctggagccacccaggacccacgtctaagtcccagcaggttgacctggtgtctttatttcctaaacaccgggttgacctgttatccaaaaacgaccaggtagacctggtggctcaatttttaccatctaaatttccccccaatttggcagaaaatgatttggctttgctggtgaacttagagttctacagatcggatttgcatgtgtatgagtgtgttcattttgctgcacattgggagggattaagtggtttgcctgaggtgtatgaacaacttgcaccacaaccgtgtgtgggagaaactttacattctagcctcccacgagacagtgaactgtttgtgcctgaagaggggagcagcgagaaggagagcgaggacgcgccaaaaacatctcctccgacgcctgggaaacatggtttggaacagactggggaggaaaaagtgatggtgactgttcctgacaaaaatccaccttgtccttgctgtggtacccgggtaaactctgtgttgaatctgattgaacatctgaaagtgtcacacgggaaaaggggggtttgttttcggtgtgcaaaatgtggaaaggaaaatagtaactatcacagtgttgtttgtcattttccaaaatgcaggggtccagagacggagaaagccccagctggggagtggatttgtgaggtatgcaacagagattttacaaccaaaattggcctgggacaacacaagagattggcacacccagcagtgagaaatcaggaaaggatcgttgcttcccaaccgaaagaaacatcaaatagaggtgctcacaaaaggtgctggacaaaggaggaggaagaattactaataagactggaggctcagttcgagggaaacaaaaatattaataagcttattgcagaacacataaccaccaaaacagctaagcagatcagtgacaaaaggcgattgctgtccagaaagccagcagaggagccacgtgaggagcctggaacgtgtcatcacaccaggagagcagctgcgagcctgagaacggagcctgagatgagtcatcacgcccaggcagaggacagagataatggacctgggagacgccctctgccaggcagggcagctgccggagggagaacaatggacgagataagacgccaccctgataagggcaacggacagcagagacccaccaagcaaaaatcagaagaacagctgcaggcttactataaaaagacactagaggaacgactttcagctggggcacttaacaccttcccccgagcattcaagcaggtaatggaaggccgggatataaagctagtaatcaatcagacagcgcaggactgcttcggatgcctggaatccataagccaaataagaacggcaacccgagataaaaaggacacggtgacccgggagaaacacccaaagaaaccttttcagaagtggatgaaggacagagcaatcaaaaaaggtaattatcttcggttccagcgtttattttatcttgatagagggaaactggctaaaatcattttagatgatattgaatgcttgtcttgtgacataccactcagtgaaatttattcggtttttaaaacaagatgggaaacaactggtagctttaaaagccttggggactttaaaacttacgggaaggctgacaacactgccttcagagaattaattacggctaaagaaattgagaaaaatgtgcaggaaatgagcaaaggctcggctcccggtccagacgggattactcttggggacgtcgtaaagatggatcccgagttttcccggaccatggagattttcaatttatggttaacaactggtaaaatcccggacatggtgagggggtgcagaaccgttttgattccaaaatcatcaaagccggatcgtttgaaagacattaataactggagacctatcacgatcggttccatcttgctgagactgttctccaggattgtaacagctaggctgagcaaagcgtgccccctgaacccaaggcaaagaggctttatcagagcggcgggatgctctgaaaacttaaaactcctgcaaactataatttggtcggccaaaagagaacacagaccactgggtgttgtattcgtggacatcgccaaggcttttgacaccgtaagccaccagcacatcattcatgctttgcagcaaagagaggtggatccccacatcgtcggtctggtgagcaatatgtacgagaacatcagtacgtatatcaccacaaagaggaacacacacacagacaaaatccagatccgggttggagtaaagcagggtgacccgatgtcgccccttttatttaacctggcaatggaccctctattatgcaagctggaagagagtggcaaaggataccaccgaggacagagcagcatcacagcgatggcatttgcagacgatctggttttgctgagcgactcctgggaaaatatgaatacaaatattagcatactggagaccttctgcaatctgaccggactcaaaacacaggggcaaaagtgccacggcttttacatcaagccgacaaaggactcttacaccatcaatgactgcgctgcctggactatcaacggcacacccctgaacatgatcgaccccggcgaatctgagaaatacctcggcctgcagtttgacccgtggattggaatagcaaggtccggtctctccacaaaactagatttttggcttcagcggatcgatcaagcaccacttaaacctctgcagaaaactgatattctcaaaacatacaccatccctcggctgatctacatagctgaccactcagaagtgaaaactgcactactcgaaacccttgaccagaagatccggacagcggtcaaggaatggcttcacctacctccgtgcacctgcgatgccatcctgtactcgagcacgagagacggcggtttgggcatcaccaaattggcaggactgatccccagcgtgcaggcccgtagactgcatcggatcgcacagtcatctgacgatacgatgaaatgcttcatggaaaaagagaaaatggaacagctgcataagaaattgtggattcaagctggaggggacagagagaacataccctcgatttgggaagcaccaccgtcgagtgaaccaccaaacaacgtgagcacaaattcggaatgggaagcaccgacccagaaagataaatttccaaagccttgcaattggaggaaaaacgaattcaaaaaatggaccaaattggcatcccaaggccgcggaattgtaaattttgaaagagacaaaattagtaaccattggatccaatactacagacgcatacctcacaggaaactcctcactgcactacaactcagggccaacgtttaccccacgagagaatttctagccaggggtagacaagaccaatacatcaaggcgtgtaggcactgcgatgcggacattgaatcctgcgcccacatcatcggcaactgcccagtgacacaggacgcccgaatcaagagggccaattacatctgcgaactgcttctcgaggaggcgaagaagaaggactgggtagtgttcaaggaaccgcacataagggattccaacaaggaactgtacaaacctgacctgatatttgtgaaggatgcccgtgcacttgtcgtggatgtgacagtacggtatgaagcagccaaatcatcgctggaggaagccgctgcagagaaagtgagaaagtacaaacacctggaaacggaagtaagacatctcacgaatgcaaaggacgttacttttgtgggctttcccctaggagcgcgggggaaatggcaccaagataactttaaacttttgactgagcttggcctctccaaatcgaggcaagtgaaaatggcagagactttttccacagtagcgctcttttcatctgtggacattgtacatatgtttgccagtagggccagaaaatctatggttatgtaaaccggtagacatgataagatacattgatgagtttggacaaaccacaactagaatgcagtgaaaaaaatgctttatttgtgaaatttgtgatgctattgctttatttgtaaccattataagctgcaataaacaagttaacaacaacaaaaaaaaaaaaaaaaaaaaaaaaaaaaaaacgttgactaaaaaaaaaaaaaaaaaaaaaaaaaaaaaaaaaaaaaaaaaaaaaaaaaaaaaaaaaaaaaaaaaaaaaa

SEQ ID NO: 10638 - DNA, 4603 bp, synthetic construct
  source 1..4603: mol_type = other DNA
ggtctagttacaactgggcatcgctgcagagatcgcacctcctcgtggtcccgctggtagcccttcgaagggtgactaagtcgatctctgccccaggtacggagccgttgggactcaccagtccaacgtaactcctgcctaaattcggtgaaacaaattcctcggtaaaaagccccatggcttcttgcccgaaacctggccccccggtttcagcaggggcaatgagtttggaaagtggactgaccacccactccgttctcgccatcgaacgtggtcccaattcgttggcaaattccggatcagactttgggggggggggtctggggctaccgttacgcctattgagggtatcggtcggcactcagacctcccgctccgactgggtagacctggtgtcctggagccacccaggacccacgtctaagtcccagcaggttgacctggtgtctttatttcctaaacaccgggttgacctgttatccaaaaacgaccaggtagacctggtggctcaatttttaccatctaaatttccccccaatttggcagaaaatgatttggctttgctggtgaacttagagttctacagatcggatttgcatgtgtatgagtgtgttcattttgctgcacattgggagggattaagtggtttgcctgaggtgtatgaacaacttgcaccacaaccgtgtgtgggagaaactttacattctagcctcccacgagacagtgaactgtttgtgcctgaagaggggagcagcgagaaggagagcgaggacgcgccaaaaacatctcctccgacgcctgggaaacatggtttggaacagactggggaggaaaaagtgatggtgactgttcctgacaaaaatccaccttgtccttgctgtggtacccgggtaaactctgtgttgaatctgattgaacatctgaaagtgtcacacgggaaaaggggggtttgttttcggtgtgcaaaatgtggaaaggaaaatagtaactatcacagtgttgtttgtcattttccaaaatgcaggggtccagagacggagaaagccccagctggggagtggatttgtgaggtatgcaacagagattttacaaccaaaattggcctgggacaacacaagagattggcacacccagcagtgagaaatcaggaaaggatcgttgcttcccaaccgaaagaaacatcaaatagaggtgctcacaaaaggtgctggacaaaggaggaggaagaattactaataagactggaggctcagttcgagggaaacaaaaatattaataagcttattgcagaacacataaccaccaaaacagctaagcagatcagtgacaaaaggcgattgctgtccagaaagccagcagaggagccacgtgaggagcctggaacgtgtcatcacaccaggagagcagctgcgagcctgagaacggagcctgagatgagtcatcacgcccaggcagaggacagagataatggacctgggagacgccctctgccaggcagggcagctgccggagggagaacaatggacgagataagacgccaccctgataagggcaacggacagcagagacccaccaagcaaaaatcagaagaacagctgcaggcttactataaaaagacactagaggaacgactttcagctggggcacttaacaccttcccccgagcattcaagcaggtaatggaaggccgggatataaagctagtaatcaatcagacagcgcaggactgcttcggatgcctggaatccataagccaaataagaacggcaacccgagataaaaaggacacggtgacccgggagaaacacccaaagaaaccttttcagaagtggatgaaggacagagcaatcaaaaaaggtaattatcttcggttccagcgtttattttatcttgatagagggaaactggctaaaatcattttagatgatattgaatgcttgtcttgtgacataccactcagtgaaatttattcggtttttaaaacaagatgggaaacaactggtagctttaaaagccttggggactttaaaacttacgggaaggctgacaacactgccttcagagaattaattacggctaaagaaattgagaaaaatgtgcaggaaatgagcaaaggctcggctcccggtccagacgggattactcttggggacgtcgtaaagatggatcccgagttttcccggaccatggagattttcaatttatggttaacaactggtaaaatcccggacatggtgagggggtgcagaaccgttttgattccaaaatcatcaaagccggatcgtttgaaagacattaataactggagacctatcacgatcggttccatcttgctgagactgttctccaggattgtaacagctaggctgagcaaagcgtgccccctgaacccaaggcaaagaggctttatcagagcggcgggatgctctgaaaacttaaaactcctgcaaactataatttggtcggccaaaagagaacacagaccactgggtgttgtattcgtggacatcgccaaggcttttgacaccgtaagccaccagcacatcattcatgctttgcagcaaagagaggtggatccccacatcgtcggtctggtgagcaatatgtacgagaacatcagtacgtatatcaccacaaagaggaacacacacacagacaaaatccagatccgggttggagtaaagcagggtgacccgatgtcgccccttttatttaacctggcaatggaccctctattatgcaagctggaagagagtggcaaaggataccaccgaggacagagcagcatcacagcgatggcatttgcagacgatctggttttgctgagcgactcctgggaaaatatgaatacaaatattagcatactggagaccttctgcaatctgaccggactcaaaacacaggggcaaaagtgccacggcttttacatcaagccgacaaaggactcttacaccatcaatgactgcgctgcctggactatcaacggcacacccctgaacatgatcgaccccggcgaatctgagaaatacctcggcctgcagtttgacccgtggattggaatagcaaggtccggtctctccacaaaactagatttttggcttcagcggatcgatcaagcaccacttaaacctctgcagaaaactgatattctcaaaacatacaccatccctcggctgatctacatagctgaccactcagaagtgaaaactgcactactcgaaacccttgaccagaagatccggacagcggtcaaggaatggcttcacctacctccgtgcacctgcgatgccatcctgtactcgagcacgagagacggcggtttgggcatcaccaaattggcaggactgatccccagcgtgcaggcccgtagactgcatcggatcgcacagtcatctgacgatacgatgaaatgcttcatggaaaaagagaaaatggaacagctgcataagaaattgtggattcaagctggaggggacagagagaacataccctcgatttgggaagcaccaccgtcgagtgaaccaccaaacaacgtgagcacaaattcggaatgggaagcaccgacccagaaagataaatttccaaagccttgcaattggaggaaaaacgaattcaaaaaatggaccaaattggcatcccaaggccgcggaattgtaaattttgaaagagacaaaattagtaaccattggatccaatactacagacgcatacctcacaggaaactcctcactgcactacaactcagggccaacgtttaccccacgagagaatttctagccaggggtagacaagaccaatacatcaaggcgtgtaggcactgcgatgcggacattgaatcctgcgcccacatcatcggcaactgcccagtgacacaggacgcccgaatcaagaggcacaattacatctgcgaactgcttctcgaggaggcgaagaagaaggactgggtagtgttcaaggaaccgcacataagggattccaacaaggaactgtacaaacctgacctgatatttgtgaaggatgcccgtgcacttgtcgtggatgtgacagtacggtatgaagcagccaaatcatcgctggaggaagccgctgcagagaaagtgagaaaggccaaacacctggaaacggaagtaagacatctcacgaatgcaaaggacgttacttttgtgggctttcccctaggagcgcgggggaaatggcaccaagataactttaaacttttgactgagcttggcctctccaaatcgaggcaagtgaaaatggcagagactttttccacagtagcgctcttttcatctgtggacattgtacatatgtttgccagtagggccagaaaatctatggttatgtaaaccggtagacatgataagatacattgatgagtttggacaaaccacaactagaatgcagtgaaaaaaatgctttatttgtgaaatttgtgatgctattgctttatttgtaaccattataagctgcaataaacaagttaacaacaacaaaaaaaaaaaaaaaaaaaaaaaaaaaaaaacgttgactaaaaaaaaaaaaaaaaaaaaaaaaaaaaaaaaaaaaaaaaaaaaaaaaaaaaaaaaaaaaaaaaaaaaaa

SEQ ID NO: 10639 - DNA, 5264 bp, synthetic construct
  source 1..5264: mol_type = other DNA
gaaataagagagaaaagaagagtaagaagaaatataagagaattcgccaccatggcccctaagaaaaagcggaaggtgaatatcagcggctctagctgcggcagccccaacagcgccgacaccagcagcgacttcaaggacctgtggaccaagctgaaggaatgccacgaccgggaagtgcagggactccaggtgaaggtcaccaaactcaagcaagaaagaatcctggacgcccagagactggaagaattcttcaccaagaaccagcagctgagagagcagcagaaagtgctgcacgagacaatcaaggttctggaagatagactgcgggccggcctgtgcgacagatgcgccgtgaccgaggaacacatgcgcaaaaagcagcaggagttcgagaacattagacagcaaaatctgaaattgatcacagagctgatgaacgagagaaacacactgcaggaggagaacaagaagctgagcgagcagctgcaacagaagatcgagaatgatcagcaacaccaggccgctgagctggaatgtgaagaggacgtgatccccgacagcccaatcacagctttcagcttttctggcgtgaacagactgaggcggaaggaaaacccccacgtgcggtacatcgagcagacccataccaagctggaacacagcgtgtgtgccaacgagatgagaaaggtgtccaagtcctccacccatccccagcacaaccctaacgaaaatgagatcctggtggctgatacctacgaccagtctcagagccctatggccaaggcccacggcaccagctcttatacccctgataagagctccttcaacctggccaccgtggtggccgagacactgggcctgggcgtgcaggaggaaagcgagacacagggcccaatgagccctctgggagatgagctgtaccactgcctggaaggcaaccacaagaaacagccttttgagtccggctccgagactcctggaacaagcgagagcgctacacctgagggcagccctaagagaaaggtgtccagcgccgagggcgctgccaaggaagagcctaaacggagaagcgccagactgagcgccaagccccccgccaaggtggaagccaagcctaagaaggccgccgctaaggacaagagcagcgataagaaagtccagaccaagggcaagcggggcgccaaaggcaaacaggccgaggtggccaaccaggagacaaaggaagatctgcctgctgagaacggcgaaaccaagaccgaggaatctccagcttctgacgaggccggagagaaggaggccaaaagcgacagcggctctgagacacctggaacaagcgagagcgccaccccggaatcctatgaacaacttgcaccacaaccgtgtgtgggagaaactttacattctagcctcccacgagacagtgaactgtttgtgcctgaagaggggagcagcgagaaggagagcgaggacgcgccaaaaacatctcctccgacgcctgggaaacatggtttggaacagactggggaggaaaaagtgatggtgactgttcctgacaaaaatccaccttgtccttgctgtggtacccgggtaaactctgtgttgaatctgattgaacatctgaaagtgtcacacgggaaaaggggggtttgttttcggtgtgcaaaatgtggaaaggaaaatagtaactatcacagtgttgtttgtcattttaagaaatgcaggggtccagagacggagaaagccccagctggggagtggatttgtgaggtatgcaacagagattttacaaccaaaattggcctgggacaacacaagagattggcacacccagcagtgagaaatcaggaaaggatcgttgcttcccaaccgaaagaaacatcaaatagaggtgctcacaaaaggtgctggacaaaggaggaggaagaattactaataagactggaggctcagttcgagggaaacaaaaatattaataagcttattgcagaacacataaccaccaaaacagctaagcagatcagtgacaaaaggcgattgctgtccagaaagccagcagaggagccacgtgaggagcctggaacgtgtcatcacaccaggagagcagctgcgagcctgagaacggagcctgagatgagtcatcacgcccaggcagaggacagagataatggacctgggagacgccctctgccaggcagggcagctgccggagggagaacaatggacgagataagacgccaccctgataagggcaacggacagcagagacccaccaagcaaaaatcagaagaacagctgcaggcttactataaaaagacactagaggaacgactttcagctggggcacttaacaccttcccccgagcattcaagcaggtaatggaaggccgggatataaagctagtaatcaatcagacagcgcaggactgcttcggatgcctggaatccataagccaaataagaacggcaacccgagataaaaaggacacggtgacccgggagaaacacccaaagaaaccttttcagaagtggatgaagaagagagcaatcaaaaaaggtaattatcttcggttccagcgtttattttatcttgatagagggaaactggctaaaatcattttagatgatattgaatgcttgtcttgtgacataccactcacagagatccagaccaccatcagagaatactacaagacaactggtagctttaaaagccttggggactttaaaacttacgggaaggctgacaacactgccttcagagaattaattacggctaaagaaattgagaaaaatgtgcaggaaatgagcaaaggctcggctcccggtccagacgggattactcttggggacgtcgtaaagatggatcccgagttttcccggaccatggagattttcaatttatggttaacaactggtaaaatcccggacatggtgagggggtgcagaaccgttttgattccaaaatcatcaaagccggatcgtttgaaagacattaataactggagacctatcacgatcggttccatcttgctgagactgttctccaggattgtaacagctaggctgagcaaagcgtgccccctgaacccaaggcaaagaggctttatcagagcggcgggatgctctgaaaacttaaaactcctgcaaactataatttggtcggccaaaagagaacacagaccactgggtgttgtattcgtggacatcgccaaggcttttgacaccgtaagccaccagcacatcattcatgctttgcagcaaagagaggtggatccccacatcgtcggtctggtgagcaatatgtacgagaacatcagtacgtatatcaccacaaagaggaacacacacacagacaaaatccagatccgggttggagtaaagcagggtgacccgatgtcgccccttttatttaacctggcaatggaccctctattatgcaagctggaagagagtggcaaaggataccaccgaggacagagcagcatcacagcgatggcatttgcagacgatctggttttgctgagcgactcctgggaaaatatgaatacaaatattagcatactggagaccttctgcaatctgaccggactcaaaacacaggggcaaaagtgccacggcttttacatcaagccgacaaagaagtcttacaccatcaatgactgcgctgcctggactatcaacggcacacccctgaacatgatcgaccccggcgaatctgagaaatacctcggcctgcagtttgacccgtggattggaatagcaaggtccggtctctccacaaaactagatttttggcttcagcggatcgatcaagcaccacttaaacctctgcagaaaactgatattctcaaaacatacaccatccctcggctgatctacatagctgaccactcagaagtgaaaagcgcactactcgaaacccttgaccagaagatccggacagcggtcaaggaatggcttcacctacctccgtgcacctgcgatgccatcctgtactcgagcacgagagacggcggtttgggcatcaccaaattggcaggactgatccccagcgtgcaggcccgtagactgcatcggatcgcacagtcatctgacgatacgatgaaatgcttcatggaaaaagagaaaatggaacagctgcataagaaattgtggattcaagctggaggggacagagagaacataccctcgatttgggaagcaccaccgtcgagtgaaccaccaaacaacgtgagcacaaattcggaatgggaagcaccgacccagaaagataaatttccaaagccttgcaattggaggaaaaacgaattcaaaaaatggaccaaattggcatcccaaggccgcggaattgtaaattttgaaagagacaaaattagtaaccattggatccaatactacagacgcatacctcacaggaaactcctcactgcactacaactcagggccaacgtttaccccacgagagaatttctagccaggggtagacaagaccaatacatcaaggcgtgtaggcactgcgatgcggacaacgaatcctgcgcccacatcatcggcaactgcccagtgacacaggacgcccgaatcaagaggcacaattacatctgcgaactgcttctcgaggaggcgaagaagaaggactgggtagtgttcaaggaaccgcacataagggattccaacaaggaactgtacaaacctgacctgatatttgtgaaggatgggcgtgcacttgtcgtggatgtgacagtacggtatgaagcagccaaatcatcgctggaggaagccgctgcagagaaagtgagaaagtacaaacacctggaaacggaagtaagacatctcacgaatgcaaaggacgttacttttgtgggctttcccctaggagcgcgggggaaatggcaccaagataactttaaacttttgactgagcttggcctctccaaatcgaggcaagtgaaaatggcagagactttttccacagtagcgctcttttcatctgtggacattgtacatatgtttgccagtagggccagaaaatctatggttatgtgataataggctgccttctgcggggcttgccttctggccatgcccttcttctctcccttgcacctgtacctcttggtctttgaataaagcctgagtaggaaggaccggtaaaaaaaaaaaaaaaaaaaaaaaaaaaaaaacgttgactaaaaaaaaaaaaaaaaaaaaaaaaaaaaaaaaaaaaaaaaaaaaaaaaaaaaaaaaaaaaaaaaaaaaaa

SEQ ID NO: 10640 - DNA, 5264 bp, synthetic construct
  source 1..5264: mol_type = other DNA
gaaataagagagaaaagaagagtaagaagaaatataagagaattcgccaccatggcccctaagaaaaagcggaaggtgaatatcagcggctctagctgcggcagccccaacagcgccgacaccagcagcgacttcaaggacctgtggaccaagctgaaggaatgccacgaccgggaagtgcagggactccaggtgaaggtcaccaaactcaagcaagaaagaatcctggacgcccagagactggaagaattcttcaccaagaaccagcagctgagagagcagcagaaagtgctgcacgagacaatcaaggttctggaagatagactgcgggccggcctgtgcgacagatgcgccgtgaccgaggaacacatgcgcaaaaagcagcaggagttcgagaacattagacagcaaaatctgaaattgatcacagagctgatgaacgagagaaacacactgcaggaggagaacaagaagctgagcgagcagctgcaacagaagatcgagaatgatcagcaacaccaggccgctgagctggaatgtgaagaggacgtgatccccgacagcccaatcacagctttcagcttttctggcgtgaacagactgaggcggaaggaaaacccccacgtgcggtacatcgagcagacccataccaagctggaacacagcgtgtgtgccaacgagatgagaaaggtgtccaagtcctccacccatccccagcacaaccctaacgaaaatgagatcctggtggctgatacctacgaccagtctcagagccctatggccaaggcccacggcaccagctcttatacccctgataagagctccttcaacctggccaccgtggtggccgagacactgggcctgggcgtgcaggaggaaagcgagacacagggcccaatgagccctctgggagatgagctgtaccactgcctggaaggcaaccacaagaaacagccttttgagtccggctccgagactcctggaacaagcgagagcgctacacctgagggcagccctaagagaaaggtgtccagcgccgagggcgctgccaaggaagagcctaaacggagaagcgccagactgagcgccaagccccccgccaaggtggaagccaagcctaagaaggccgccgctaaggacaagagcagcgataagaaagtccagaccaagggcaagcggggcgccaaaggcaaacaggccgaggtggccaaccaggagacaaaggaagatctgcctgctgagaacggcgaaaccaagaccgaggaatctccagcttctgacgaggccggagagaaggaggccaaaagcgacagcggctctgagacacctggaacaagcgagagcgccaccccggaatcctatgaacaacttgcaccacaaccgtgtgtgggagaaactttacattctagcctcccacgagacagtgaactgtttgtgcctgaagaggggagcagcgagaaggagagcgaggacgcgccaaaaacatctcctccgacgcctgggaaacatggtttggaacagactggggaggaaaaagtgatggtgactgttcctgacaaaaatccaccttgtccttgctgtggtacccgggtaaactctgtgttgaatctgattgaacatctgaaagtgtcacacgggaaaaggggggtttgttttcggtgtgcaaaatgtggaaaggaaaatagtaactatcacagtgttgtttgtcattttaagaaatgcaggggtccagagacggagaaagccccagctggggagtggatttgtgaggtatgcaacagagattttacaaccaaaattggcctgggacaacacaagagattggcacacccagcagtgagaaatcaggaaaggatcgttgcttcccaaccgaaagaaacatcaaatagaggtgctcacaaaaggtgctggacaaaggaggaggaagaattactaataagactggaggctcagttcgagggaaacaaaaatattaataagcttattgcagaacacataaccaccaaaacagctaagcagatcagtgacaaaaggcgattgctgtccagaaagccagcagaggagccacgtgaggagcctggaacgtgtcatcacaccaggagagcagctgcgagcctgagaacggagcctgagatgagtcatcacgcccaggcagaggacagagataatggacctgggagacgccctctgccaggcagggcagctgccggagggagaacaatggacgagataagacgccaccctgataagggcaacggacagcagagacccaccaagcaaaaatcagaagaacagctgcaggcttactataaaaagacactagaggaacgactttcagctggggcacttaacaccttcccccgagcattcaagcaggtaatggaaggccgggatataaagctagtaatcaatcagacagcgcaggactgcttcggatgcctggaatccataagccaaataagaacggcaacccgagataaaaaggacacggtgacccgggagaaacacccaaagaaaccttttcagaagtggatgaagaagagagcaatcaaaaaaggtaattatcttcggttccagcgtttattttatcttgatagagggaaactggctaaaatcattttagatgatattgaatgcttgtcttgtgacataccactcagtgaaatttattcggtttttaaaacaagatgggaaacaactggtagctttaaaagccttggggactttaaaacttacgggaaggctgacaacactgccttcagagaattaattacggctaaagaaattgagaaaaatgtgcaggaaatgagcaaaggctcggctcccggtccagacgggattactcttggggacgtcgtaaagatggatcccgagttttcccggaccatggagattttcaatttatggttaacaactggtaaaatcccggacatggtgagggggtgcagaaccgttttgattccaaaatcatcaaagccggatcgtttgaaagacattaataactggagacctatcacgatcggttccatcttgctgagactgttctccaggattgtaacagctaggctgagcaaagcgtgccccctgaacccaaggcaaagaggctttatcagagcggcgggatgctctgaaaacttaaaactcctgcaaactataatttggtcggccaaaagagaacacagaccactgggtgttgtattcgtggacatcgccaaggcttttgacaccgtaagccaccagcacatcattcatgctttgcagcaaagagaggtggatccccacatcgtcggtctggtgagcaatatgtacgagaacatcagtacgtatatcaccacaaagaggaacacacacacagacaaaatccagatccgggttggagtaaagcagggtgacccgatgtcgccccttttatttaacctggcaatggaccctctattatgcaagctggaagagagtggcaaaggataccaccgaggacagagcagcatcacagcgatggcatttgtggacgatctggttttgctgagcgactcctgggaaaatatgaatacaaatattagcatactggagaccttctgcaatctgaccggactcaaaacacaggggcaaaagtgccacggcttttacatcaagccgacaaagaagtcttacaccatcaatgactgcgctgcctggactatcaacggcacacccctgaacatgatcgaccccggcgaatctgagaaatacctcggcctgcagtttgacccgtggattggaatagcaaggtccggtctctccacaaaactagatttttggcttcagcggatcgatcaagcaccacttaaacctctgcagaaaactgatattctcaaaacatacaccatccctcggctgatctacatagctgaccactcagaagtgaaaagcgcactactcgaaacccttgaccagaagatccggacagcggtcaaggaatggcttcacctacctccgtgcacctgcgatgccatcctgtactcgagcacgagagacggcggtttgggcatcaccaaattggcaggactgatccccagcgtgcaggcccgtagactgcatcggatcgcacagtcatctgacgatacgatgaaatgcttcatggaaaaagagaaaatggaacagctgcataagaaattgtggattcaagctggaggggacagagagaacataccctcgatttgggaagcaccaccgtcgagtgaaccaccaaacaacgtgagcacaaattcggaatgggaagcaccgacccagaaagataaatttccaaagccttgcaattggaggaaaaacgaattcaaaaaatggaccaaattggcatcccaaggccgcggaattgtaaattttgaaagagacaaaattagtaaccattggatccaatactacagacgcatacctcacaggaaactcctcactgcactacaactcagggccaacgtttaccccacgagagaatttctagccaggggtagacaagaccaatacatcaaggcgtgtaggcactgcgatgcggacaacgaatcctgcgcccacatcatcggcaactgcccagtgacacaggacgcccgaatcaagaggcacaattacatctgcgaactgcttctcgaggaggcgaagaagaaggactgggtagtgttcaaggaaccgcacataagggattccaacaaggaactgtacaaacctgacctgatatttgtgaaggatgggcgtgcacttgtcgtggatgtgacagtacggtatgaagcagccaaatcatcgctggaggaagccgctgcagagaaagtgagaaagtacaaacacctggaaacggaagtaagacatctcacgaatgcaaaggacgttacttttgtgggctttcccctaggagcgcgggggaaatggcaccaagataactttaaacttttgactgagcttggcctctccaaatcgaggcaagtgaaaatggcagagactttttccacagtagcgctcttttcatctgtggacattgtacatatgtttgccagtagggccagaaaatctatggttatgtgataataggctgccttctgcggggcttgccttctggccatgcccttcttctctcccttgcacctgtacctcttggtctttgaataaagcctgagtaggaaggaccggtaaaaaaaaaaaaaaaaaaaaaaaaaaaaaaacgttgactaaaaaaaaaaaaaaaaaaaaaaaaaaaaaaaaaaaaaaaaaaaaaaaaaaaaaaaaaaaaaaaaaaaaaa

SEQ ID NO: 10641 - DNA, 5264 bp, synthetic construct
  source 1..5264: mol_type = other DNA
gaaataagagagaaaagaagagtaagaagaaatataagagaattcgccaccatggcccctaagaaaaagcggaaggtgaatatcagcggctctagctgcggcagccccaacagcgccgacaccagcagcgacttcaaggacctgtggaccaagctgaaggaatgccacgaccgggaagtgcagggactccaggtgaaggtcaccaaactcaagcaagaaagaatcctggacgcccagagactggaagaattcttcaccaagaaccagcagctgagagagcagcagaaagtgctgcacgagacaatcaaggttctggaagatagactgcgggccggcctgtgcgacagatgcgccgtgaccgaggaacacatgcgcaaaaagcagcaggagttcgagaacattagacagcaaaatctgaaattgatcacagagctgatgaacgagagaaacacactgcaggaggagaacaagaagctgagcgagcagctgcaacagaagatcgagaatgatcagcaacaccaggccgctgagctggaatgtgaagaggacgtgatccccgacagcccaatcacagctttcagcttttctggcgtgaacagactgaggcggaaggaaaacccccacgtgcggtacatcgagcagacccataccaagctggaacacagcgtgtgtgccaacgagatgagaaaggtgtccaagtcctccacccatccccagcacaaccctaacgaaaatgagatcctggtggctgatacctacgaccagtctcagagccctatggccaaggcccacggcaccagctcttatacccctgataagagctccttcaacctggccaccgtggtggccgagacactgggcctgggcgtgcaggaggaaagcgagacacagggcccaatgagccctctgggagatgagctgtaccactgcctggaaggcaaccacaagaaacagccttttgagtccggctccgagactcctggaacaagcgagagcgctacacctgagggcagccctaagagaaaggtgtccagcgccgagggcgctgccaaggaagagcctaaacggagaagcgccagactgagcgccaagccccccgccaaggtggaagccaagcctaagaaggccgccgctaaggacaagagcagcgataagaaagtccagaccaagggcaagcggggcgccaaaggcaaacaggccgaggtggccaaccaggagacaaaggaagatctgcctgctgagaacggcgaaaccaagaccgaggaatctccagcttctgacgaggccggagagaaggaggccaaaagcgacagcggctctgagacacctggaacaagcgagagcgccaccccggaatcctatgaacaacttgcaccacaaccgtgtgtgggagaaactttacattctagcctcccacgagacagtgaactgtttgtgcctgaagaggggagcagcgagaaggagagcgaggacgcgccaaaaacatctcctccgacgcctgggaaacatggtttggaacagactggggaggaaaaagtgatggtgactgttcctgacaaaaatccaccttgtccttgctgtggtacccgggtaaactctgtgttgaatctgattgaacatctgaaagtgtcacacgggaaaaggggggtttgttttcggtgtgcaaaatgtggaaaggaaaatagtaactatcacagtgttgtttgtcattttaagaaatgcaggggtccagagacggagaaagccccagctggggagtggatttgtgaggtatgcaacagagattttacaaccaaaattggcctgggacaacacaagagattggcacacccagcagtgagaaatcaggaaaggatcgttgcttcccaaccgaaagaaacatcaaatagaggtgctcacaaaaggtgctggacaaaggaggaggaagaattactaataagactggaggctcagttcgagggaaacaaaaatattaataagcttattgcagaacacataaccaccaaaacagctaagcagatcagtgacaaaaggcgattgctgtccagaaagccagcagaggagccacgtgaggagcctggaacgtgtcatcacaccaggagagcagctgcgagcctgagaacggagcctgagatgagtcatcacgcccaggcagaggacagagataatggacctgggagacgccctctgccaggcagggcagctgccggagggagaacaatggacgagataagacgccaccctgataagggcaacggacagcagagacccaccaagcaaaaatcagaagaacagctgcaggcttactataaaaagacactagaggaacgactttcagctggggcacttaacaccttcccccgagcattcaagcaggtaatggaaggccgggatataaagctagtaatcaatcagacagcgcaggactgcttcggatgcctggaatccataagccaaataagaacggcaacccgagataaaaaggacacggtgacccgggagaaacacccaaagaaaccttttcagaagtggatgaagaagagagcaatcaaaaaaggtaattatcttcggttccagcgtttattttatcttgatagagggaaactggctaaaatcattttagatgatattgaatgcttgtcttgtgacataccactcagtgaaatttattcggtttttaaaacaagatgggaaacaactggtagctttaaaagccttggggactttaaaacttacgggaaggctgacaacactgccttcagagaattaattacggctaaagaaattgagaaaaatgtgcaggaaatgagcaaaggctcggctcccggtccagacgggattactcttggggacgtcgtaaagatggatcccgagttttcccggaccatggagattttcaatttatggttaacaactggtaaaatcccggacatggtgagggggtgcagaaccgttttgattccaaaatcatcaaagccggatcgtttgaaagacattaataactggagacctatcacgatcggttccatcttgctgagactgttctccaggattgtaacagctaggctgagcaaagcgtgccccctgaacccaaggcaaagaggctttatcagagcggcgggatgctctgaaaacttaaaactcctgcaaactataatttggtcggccaaaagagaacacagaccactgggtgttgtattcgtggacatcgccaaggcttttgacaccgtaagccaccagcacatcattcatgctttgcagcaaagagaggtggatccccacatcgtcggtctggtgagcaatatgtacgagaacatcagtacgtatatcaccacaaagaggaacacacacacagacaaaatccagatccgggttggagtaaagcagggtgacccgatgtcgccccttttatttaacctggcaatggaccctctattatgcaagctggaagagagtggcaaaggataccaccgaggacagagcagcatcacagcgatggcatttatcgacgatctggttttgctgagcgactcctgggaaaatatgaatacaaatattagcatactggagaccttctgcaatctgaccggactcaaaacacaggggcaaaagtgccacggcttttacatcaagccgacaaagaagtcttacaccatcaatgactgcgctgcctggactatcaacggcacacccctgaacatgatcgaccccggcgaatctgagaaatacctcggcctgcagtttgacccgtggattggaatagcaaggtccggtctctccacaaaactagatttttggcttcagcggatcgatcaagcaccacttaaacctctgcagaaaactgatattctcaaaacatacaccatccctcggctgatctacatagctgaccactcagaagtgaaaagcgcactactcgaaacccttgaccagaagatccggacagcggtcaaggaatggcttcacctacctccgtgcacctgcgatgccatcctgtactcgagcacgagagacggcggtttgggcatcaccaaattggcaggactgatccccagcgtgcaggcccgtagactgcatcggatcgcacagtcatctgacgatacgatgaaatgcttcatggaaaaagagaaaatggaacagctgcataagaaattgtggattcaagctggaggggacagagagaacataccctcgatttgggaagcaccaccgtcgagtgaaccaccaaacaacgtgagcacaaattcggaatgggaagcaccgacccagaaagataaatttccaaagccttgcaattggaggaaaaacgaattcaaaaaatggaccaaattggcatcccaaggccgcggaattgtaaattttgaaagagacaaaattagtaaccattggatccaatactacagacgcatacctcacaggaaactcctcactgcactacaactcagggccaacgtttaccccacgagagaatttctagccaggggtagacaagaccaatacatcaaggcgtgtaggcactgcgatgcggacaacgaatcctgcgcccacatcatcggcaactgcccagtgacacaggacgcccgaatcaagaggcacaattacatctgcgaactgcttctcgaggaggcgaagaagaaggactgggtagtgttcaaggaaccgcacataagggattccaacaaggaactgtacaaacctgacctgatatttgtgaaggatgggcgtgcacttgtcgtggatgtgacagtacggtatgaagcagccaaatcatcgctggaggaagccgctgcagagaaagtgagaaagtacaaacacctggaaacggaagtaagacatctcacgaatgcaaaggacgttacttttgtgggctttcccctaggagcgcgggggaaatggcaccaagataactttaaacttttgactgagcttggcctctccaaatcgaggcaagtgaaaatggcagagactttttccacagtagcgctcttttcatctgtggacattgtacatatgtttgccagtagggccagaaaatctatggttatgtgataataggctgccttctgcggggcttgccttctggccatgcccttcttctctcccttgcacctgtacctcttggtctttgaataaagcctgagtaggaaggaccggtaaaaaaaaaaaaaaaaaaaaaaaaaaaaaaacgttgactaaaaaaaaaaaaaaaaaaaaaaaaaaaaaaaaaaaaaaaaaaaaaaaaaaaaaaaaaaaaaaaaaaaaaa

SEQ ID NO: 10642 - DNA, 5264 bp, synthetic construct
  source 1..5264: mol_type = other DNA
gaaataagagagaaaagaagagtaagaagaaatataagagaattcgccaccatggcccctaagaaaaagcggaaggtgaatatcagcggctctagctgcggcagccccaacagcgccgacaccagcagcgacttcaaggacctgtggaccaagctgaaggaatgccacgaccgggaagtgcagggactccaggtgaaggtcaccaaactcaagcaagaaagaatcctggacgcccagagactggaagaattcttcaccaagaaccagcagctgagagagcagcagaaagtgctgcacgagacaatcaaggttctggaagatagactgcgggccggcctgtgcgacagatgcgccgtgaccgaggaacacatgcgcaaaaagcagcaggagttcgagaacattagacagcaaaatctgaaattgatcacagagctgatgaacgagagaaacacactgcaggaggagaacaagaagctgagcgagcagctgcaacagaagatcgagaatgatcagcaacaccaggccgctgagctggaatgtgaagaggacgtgatccccgacagcccaatcacagctttcagcttttctggcgtgaacagactgaggcggaaggaaaacccccacgtgcggtacatcgagcagacccataccaagctggaacacagcgtgtgtgccaacgagatgagaaaggtgtccaagtcctccacccatccccagcacaaccctaacgaaaatgagatcctggtggctgatacctacgaccagtctcagagccctatggccaaggcccacggcaccagctcttatacccctgataagagctccttcaacctggccaccgtggtggccgagacactgggcctgggcgtgcaggaggaaagcgagacacagggcccaatgagccctctgggagatgagctgtaccactgcctggaaggcaaccacaagaaacagccttttgagtccggctccgagactcctggaacaagcgagagcgctacacctgagggcagccctaagagaaaggtgtccagcgccgagggcgctgccaaggaagagcctaaacggagaagcgccagactgagcgccaagccccccgccaaggtggaagccaagcctaagaaggccgccgctaaggacaagagcagcgataagaaagtccagaccaagggcaagcggggcgccaaaggcaaacaggccgaggtggccaaccaggagacaaaggaagatctgcctgctgagaacggcgaaaccaagaccgaggaatctccagcttctgacgaggccggagagaaggaggccaaaagcgacagcggctctgagacacctggaacaagcgagagcgccaccccggaatcctatgaacaacttgcaccacaaccgtgtgtgggagaaactttacattctagcctcccacgagacagtgaactgtttgtgcctgaagaggggagcagcgagaaggagagcgaggacgcgccaaaaacatctcctccgacgcctgggaaacatggtttggaacagactggggaggaaaaagtgatggtgactgttcctgacaaaaatccaccttgtccttgctgtggtacccgggtaaactctgtgttgaatctgattgaacatctgaaagtgtcacacgggaaaaggggggtttgttttcggtgtgcaaaatgtggaaaggaaaatagtaactatcacagtgttgtttgtcattttaagaaatgcaggggtccagagacggagaaagccccagctggggagtggatttgtgaggtatgcaacagagattttacaaccaaaattggcctgggacaacacaagagattggcacacccagcagtgagaaatcaggaaaggatcgttgcttcccaaccgaaagaaacatcaaatagaggtgctcacaaaaggtgctggacaaaggaggaggaagaattactaataagactggaggctcagttcgagggaaacaaaaatattaataagcttattgcagaacacataaccaccaaaacagctaagcagatcagtgacaaaaggcgattgctgtccagaaagccagcagaggagccacgtgaggagcctggaacgtgtcatcacaccaggagagcagctgcgagcctgagaacggagcctgagatgagtcatcacgcccaggcagaggacagagataatggacctgggagacgccctctgccaggcagggcagctgccggagggagaacaatggacgagataagacgccaccctgataagggcaacggacagcagagacccaccaagcaaaaatcagaagaacagctgcaggcttactataaaaagacactagaggaacgactttcagctggggcacttaacaccttcccccgagcattcaagcaggtaatggaaggccgggatataaagctagtaatcaatcagacagcgcaggactgcttcggatgcctggaatccataagccaaataagaacggcaacccgagataaaaaggacacggtgacccgggagaaacacccaaagaaaccttttcagaagtggatgaagaagagagcaatcaaaaaaggtaattatcttcggttccagcgtttattttatcttgatagagggaaactggctaaaatcattttagatgatattgaatgcttgtcttgtgacataccactcagtgaaatttattcggtttttaaaacaagatgggaaacaactggtagctttaaaagccttggggactttaaaacttacgggaaggctgacaacactgccttcagagaattaattacggctaaagaaattgagaaaaatgtgcaggaaatgagcaaaggctcggctcccggtccagacgggattactcttggggacgtcgtaaagatggatcccgagttttcccggaccatggagattttcaatttatggttaacaactggtaaaatcccggacatggtgagggggtgcagaaccgttttgattccaaaatcatcaaagccggatcgtttgaaagacattaataactggagacctatcacgatcggttccatcttgctgagactgttctccaggattgtaacagctaggctgagcaaagcgtgccccctgaacccaaggcaaagaggctttatcagagcggcgggatgctctgaaaacttaaaactcctgcaaactataatttggtcggccaaaagagaacacagaccactgggtgttgtattcgtggacatcgccaaggcttttgacaccgtaagccaccagcacatcattcatgctttgcagcaaagagaggtggatccccacatcgtcggtctggtgagcaatatgtacgagaacatcagtacgtatatcaccacaaagaggaacacacacacagacaaaatccagatccgggttggagtaaagcagggtgacccgatgtcgccccttttatttaacctggcaatggaccctctattatgcaagctggaagagagtggcaaaggataccaccgaggacagagcagcatcacagcgatggcatttatggacgatctggttttgctgagcgactcctgggaaaatatgaatacaaatattagcatactggagaccttctgcaatctgaccggactcaaaacacaggggcaaaagtgccacggcttttacatcaagccgacaaagaagtcttacaccatcaatgactgcgctgcctggactatcaacggcacacccctgaacatgatcgaccccggcgaatctgagaaatacctcggcctgcagtttgacccgtggattggaatagcaaggtccggtctctccacaaaactagatttttggcttcagcggatcgatcaagcaccacttaaacctctgcagaaaactgatattctcaaaacatacaccatccctcggctgatctacatagctgaccactcagaagtgaaaagcgcactactcgaaacccttgaccagaagatccggacagcggtcaaggaatggcttcacctacctccgtgcacctgcgatgccatcctgtactcgagcacgagagacggcggtttgggcatcaccaaattggcaggactgatccccagcgtgcaggcccgtagactgcatcggatcgcacagtcatctgacgatacgatgaaatgcttcatggaaaaagagaaaatggaacagctgcataagaaattgtggattcaagctggaggggacagagagaacataccctcgatttgggaagcaccaccgtcgagtgaaccaccaaacaacgtgagcacaaattcggaatgggaagcaccgacccagaaagataaatttccaaagccttgcaattggaggaaaaacgaattcaaaaaatggaccaaattggcatcccaaggccgcggaattgtaaattttgaaagagacaaaattagtaaccattggatccaatactacagacgcatacctcacaggaaactcctcactgcactacaactcagggccaacgtttaccccacgagagaatttctagccaggggtagacaagaccaatacatcaaggcgtgtaggcactgcgatgcggacaacgaatcctgcgcccacatcatcggcaactgcccagtgacacaggacgcccgaatcaagaggcacaattacatctgcgaactgcttctcgaggaggcgaagaagaaggactgggtagtgttcaaggaaccgcacataagggattccaacaaggaactgtacaaacctgacctgatatttgtgaaggatgggcgtgcacttgtcgtggatgtgacagtacggtatgaagcagccaaatcatcgctggaggaagccgctgcagagaaagtgagaaagtacaaacacctggaaacggaagtaagacatctcacgaatgcaaaggacgttacttttgtgggctttcccctaggagcgcgggggaaatggcaccaagataactttaaacttttgactgagcttggcctctccaaatcgaggcaagtgaaaatggcagagactttttccacagtagcgctcttttcatctgtggacattgtacatatgtttgccagtagggccagaaaatctatggttatgtgataataggctgccttctgcggggcttgccttctggccatgcccttcttctctcccttgcacctgtacctcttggtctttgaataaagcctgagtaggaaggaccggtaaaaaaaaaaaaaaaaaaaaaaaaaaaaaaacgttgactaaaaaaaaaaaaaaaaaaaaaaaaaaaaaaaaaaaaaaaaaaaaaaaaaaaaaaaaaaaaaaaaaaaaaa

SEQ ID NO: 10643 - DNA, 5264 bp, synthetic construct
  source 1..5264: mol_type = other DNA
gaaataagagagaaaagaagagtaagaagaaatataagagaattcgccaccatggcccctaagaaaaagcggaaggtgaatatcagcggctctagctgcggcagccccaacagcgccgacaccagcagcgacttcaaggacctgtggaccaagctgaaggaatgccacgaccgggaagtgcagggactccaggtgaaggtcaccaaactcaagcaagaaagaatcctggacgcccagagactggaagaattcttcaccaagaaccagcagctgagagagcagcagaaagtgctgcacgagacaatcaaggttctggaagatagactgcgggccggcctgtgcgacagatgcgccgtgaccgaggaacacatgcgcaaaaagcagcaggagttcgagaacattagacagcaaaatctgaaattgatcacagagctgatgaacgagagaaacacactgcaggaggagaacaagaagctgagcgagcagctgcaacagaagatcgagaatgatcagcaacaccaggccgctgagctggaatgtgaagaggacgtgatccccgacagcccaatcacagctttcagcttttctggcgtgaacagactgaggcggaaggaaaacccccacgtgcggtacatcgagcagacccataccaagctggaacacagcgtgtgtgccaacgagatgagaaaggtgtccaagtcctccacccatccccagcacaaccctaacgaaaatgagatcctggtggctgatacctacgaccagtctcagagccctatggccaaggcccacggcaccagctcttatacccctgataagagctccttcaacctggccaccgtggtggccgagacactgggcctgggcgtgcaggaggaaagcgagacacagggcccaatgagccctctgggagatgagctgtaccactgcctggaaggcaaccacaagaaacagccttttgagtccggctccgagactcctggaacaagcgagagcgctacacctgagggcagccctaagagaaaggtgtccagcgccgagggcgctgccaaggaagagcctaaacggagaagcgccagactgagcgccaagccccccgccaaggtggaagccaagcctaagaaggccgccgctaaggacaagagcagcgataagaaagtccagaccaagggcaagcggggcgccaaaggcaaacaggccgaggtggccaaccaggagacaaaggaagatctgcctgctgagaacggcgaaaccaagaccgaggaatctccagcttctgacgaggccggagagaaggaggccaaaagcgacagcggctctgagacacctggaacaagcgagagcgccaccccggaatcctatgaacaacttgcaccacaaccgtgtgtgggagaaactttacattctagcctcccacgagacagtgaactgtttgtgcctgaagaggggagcagcgagaaggagagcgaggacgcgccaaaaacatctcctccgacgcctgggaaacatggtttggaacagactggggaggaaaaagtgatggtgactgttcctgacaaaaatccaccttgtccttgctgtggtacccgggtaaactctgtgttgaatctgattgaacatctgaaagtgtcacacgggaaaaggggggtttgttttcggtgtgcaaaatgtggaaaggaaaatagtaactatcacagtgttgtttgtcattttaagaaatgcaggggtccagagacggagaaagccccagctggggagtggatttgtgaggtatgcaacagagattttacaaccaaaattggcctgggacaacacaagagattggcacacccagcagtgagaaatcaggaaaggatcgttgcttcccaaccgaaagaaacatcaaatagaggtgctcacaaaaggtgctggacaaaggaggaggaagaattactaataagactggaggctcagttcgagggaaacaaaaatattaataagcttattgcagaacacataaccaccaaaacagctaagcagatcagtgacaaaaggcgattgctgtccagaaagccagcagaggagccacgtgaggagcctggaacgtgtcatcacaccaggagagcagctgcgagcctgagaacggagcctgagatgagtcatcacgcccaggcagaggacagagataatggacctgggagacgccctctgccaggcagggcagctgccggagggagaacaatggacgagataagacgccaccctgataagggcaacggacagcagagacccaccaagcaaaaatcagaagaacagctgcaggcttactataaaaagacactagaggaacgactttcagctggggcacttaacaccttcccccgagcattcaagcaggtaatggaaggccgggatataaagctagtaatcaatcagacagcgcaggactgcttcggatgcctggaatccataagccaaataagaacggcaacccgagataaaaaggacacggtgacccgggagaaacacccaaagaaaccttttcagaagtggatgaagaagagagcaatcaaaaaaggtaattatcttcggttccagcgtttattttatcttgatagagggaaactggctaaaatcattttagatgatattgaatgcttgtcttgtgacataccactcagtgaaatttattcggtttttaaaacaagatgggaaacaactggtagctttaaaagccttggggactttaaaacttacgggaaggctgacaacactgccttcagagaattaattacggctaaagaaattgagaaaaatgtgcaggaaatgagcaaaggctcggctcccggtccagacgggattactcttggggacgtcgtaaagatggatcccgagttttcccggaccatggagattttcaatttatggttaacaactggtaaaatcccggacatggtgagggggtgcagaaccgttttgattccaaaatcatcaaagccggatcgtttgaaagacattaataactggagacctatcacgatcggttccatcttgctgagactgttctccaggattgtaacagctaggctgagcaaagcgtgccccctgaacccaaggcaaagaggctttatcagagcggcgggatgctctgaaaacttaaaactcctgcaaactataatttggtcggccaaaagagaacacagaccactgggtgttgtattcgtggacatcgccaaggcttttgacaccgtaagccaccagcacatcattcatgctttgcagcaaagagaggtggatccccacatcgtcggtctggtgagcaatatgtacgagaacatcagtacgtatatcaccacaaagaggaacacacacacagacaaaatccagatccgggttggagtaaagcagggtgacccgatgtcgccccttttatttaacctggcaatggaccctctattatgcaagctggaagagagtggcaaaggataccaccgaggacagagcagcatcacagcgatggcatacgcagacgatctggttttgctgagcgactcctgggaaaatatgaatacaaatattagcatactggagaccttctgcaatctgaccggactcaaaacacaggggcaaaagtgccacggcttttacatcaagccgacaaagaagtcttacaccatcaatgactgcgctgcctggactatcaacggcacacccctgaacatgatcgaccccggcgaatctgagaaatacctcggcctgcagtttgacccgtggattggaatagcaaggtccggtctctccacaaaactagatttttggcttcagcggatcgatcaagcaccacttaaacctctgcagaaaactgatattctcaaaacatacaccatccctcggctgatctacatagctgaccactcagaagtgaaaagcgcactactcgaaacccttgaccagaagatccggacagcggtcaaggaatggcttcacctacctccgtgcacctgcgatgccatcctgtactcgagcacgagagacggcggtttgggcatcaccaaattggcaggactgatccccagcgtgcaggcccgtagactgcatcggatcgcacagtcatctgacgatacgatgaaatgcttcatggaaaaagagaaaatggaacagctgcataagaaattgtggattcaagctggaggggacagagagaacataccctcgatttgggaagcaccaccgtcgagtgaaccaccaaacaacgtgagcacaaattcggaatgggaagcaccgacccagaaagataaatttccaaagccttgcaattggaggaaaaacgaattcaaaaaatggaccaaattggcatcccaaggccgcggaattgtaaattttgaaagagacaaaattagtaaccattggatccaatactacagacgcatacctcacaggaaactcctcactgcactacaactcagggccaacgtttaccccacgagagaatttctagccaggggtagacaagaccaatacatcaaggcgtgtaggcactgcgatgcggacaacgaatcctgcgcccacatcatcggcaactgcccagtgacacaggacgcccgaatcaagaggcacaattacatctgcgaactgcttctcgaggaggcgaagaagaaggactgggtagtgttcaaggaaccgcacataagggattccaacaaggaactgtacaaacctgacctgatatttgtgaaggatgggcgtgcacttgtcgtggatgtgacagtacggtatgaagcagccaaatcatcgctggaggaagccgctgcagagaaagtgagaaagtacaaacacctggaaacggaagtaagacatctcacgaatgcaaaggacgttacttttgtgggctttcccctaggagcgcgggggaaatggcaccaagataactttaaacttttgactgagcttggcctctccaaatcgaggcaagtgaaaatggcagagactttttccacagtagcgctcttttcatctgtggacattgtacatatgtttgccagtagggccagaaaatctatggttatgtgataataggctgccttctgcggggcttgccttctggccatgcccttcttctctcccttgcacctgtacctcttggtctttgaataaagcctgagtaggaaggaccggtaaaaaaaaaaaaaaaaaaaaaaaaaaaaaaacgttgactaaaaaaaaaaaaaaaaaaaaaaaaaaaaaaaaaaaaaaaaaaaaaaaaaaaaaaaaaaaaaaaaaaaaaa

SEQ ID NO: 10644 - DNA, 5264 bp, synthetic construct
  source 1..5264: mol_type = other DNA
gaaataagagagaaaagaagagtaagaagaaatataagagaattcgccaccatggcccctaagaaaaagcggaaggtgaatatcagcggctctagctgcggcagccccaacagcgccgacaccagcagcgacttcaaggacctgtggaccaagctgaaggaatgccacgaccgggaagtgcagggactccaggtgaaggtcaccaaactcaagcaagaaagaatcctggacgcccagagactggaagaattcttcaccaagaaccagcagctgagagagcagcagaaagtgctgcacgagacaatcaaggttctggaagatagactgcgggccggcctgtgcgacagatgcgccgtgaccgaggaacacatgcgcaaaaagcagcaggagttcgagaacattagacagcaaaatctgaaattgatcacagagctgatgaacgagagaaacacactgcaggaggagaacaagaagctgagcgagcagctgcaacagaagatcgagaatgatcagcaacaccaggccgctgagctggaatgtgaagaggacgtgatccccgacagcccaatcacagctttcagcttttctggcgtgaacagactgaggcggaaggaaaacccccacgtgcggtacatcgagcagacccataccaagctggaacacagcgtgtgtgccaacgagatgagaaaggtgtccaagtcctccacccatccccagcacaaccctaacgaaaatgagatcctggtggctgatacctacgaccagtctcagagccctatggccaaggcccacggcaccagctcttatacccctgataagagctccttcaacctggccaccgtggtggccgagacactgggcctgggcgtgcaggaggaaagcgagacacagggcccaatgagccctctgggagatgagctgtaccactgcctggaaggcaaccacaagaaacagccttttgagtccggctccgagactcctggaacaagcgagagcgctacacctgagggcagccctaagagaaaggtgtccagcgccgagggcgctgccaaggaagagcctaaacggagaagcgccagactgagcgccaagccccccgccaaggtggaagccaagcctaagaaggccgccgctaaggacaagagcagcgataagaaagtccagaccaagggcaagcggggcgccaaaggcaaacaggccgaggtggccaaccaggagacaaaggaagatctgcctgctgagaacggcgaaaccaagaccgaggaatctccagcttctgacgaggccggagagaaggaggccaaaagcgacagcggctctgagacacctggaacaagcgagagcgccaccccggaatcctatgaacaacttgcaccacaaccgtgtgtgggagaaactttacattctagcctcccacgagacagtgaactgtttgtgcctgaagaggggagcagcgagaaggagagcgaggacgcgccaaaaacatctcctccgacgcctgggaaacatggtttggaacagactggggaggaaaaagtgatggtgactgttcctgacaaaaatccaccttgtccttgctgtggtacccgggtaaactctgtgttgaatctgattgaacatctgaaagtgtcacacgggaaaaggggggtttgttttcggtgtgcaaaatgtggaaaggaaaatagtaactatcacagtgttgtttgtcattttaagaaatgcaggggtccagagacggagaaagccccagctggggagtggatttgtgaggtatgcaacagagattttacaaccaaaattggcctgggacaacacaagagattggcacacccagcagtgagaaatcaggaaaggatcgttgcttcccaaccgaaagaaacatcaaatagaggtgctcacaaaaggtgctggacaaaggaggaggaagaattactaataagactggaggctcagttcgagggaaacaaaaatattaataagcttattgcagaacacataaccaccaaaacagctaagcagatcagtgacaaaaggcgattgctgtccagaaagccagcagaggagccacgtgaggagcctggaacgtgtcatcacaccaggagagcagctgcgagcctgagaacggagcctgagatgagtcatcacgcccaggcagaggacagagataatggacctgggagacgccctctgccaggcagggcagctgccggagggagaacaatggacgagataagacgccaccctgataagggcaacggacagcagagacccaccaagcaaaaatcagaagaacagctgcaggcttactataaaaagacactagaggaacgactttcagctggggcacttaacaccttcccccgagcattcaagcaggtaatggaaggccgggatataaagctagtaatcaatcagacagcgcaggactgcttcggatgcctggaatccataagccaaataagaacggcaacccgagataaaaaggacacggtgacccgggagaaacacccaaagaaaccttttcagaagtggatgaagaagagagcaatcaaaaaaggtaattatcttcggttccagcgtttattttatcttgatagagggaaactggctaaaatcattttagatgatattgaatgcttgtcttgtgacataccactcagtgaaatttattcggtttttaaaacaagatgggaaacaactggtagctttaaaagccttggggactttaaaacttacgggaaggctgacaacactgccttcagagaattaattacggctaaagaaattgagaaaaatgtgcaggaaatgagcaaaggctcggctcccggtccagacgggattactcttggggacgtcgtaaagatggatcccgagttttcccggaccatggagattttcaatttatggttaacaactggtaaaatcccggacatggtgagggggtgcagaaccgttttgattccaaaatcatcaaagccggatcgtttgaaagacattaataactggagacctatcacgatcggttccatcttgctgagactgttctccaggattgtaacagctaggctgagcaaagcgtgccccctgaacccaaggcaaagaggctttatcagagcggcgggatgctctgaaaacttaaaactcctgcaaactataatttggtcggccaaaagagaacacagaccactgggtgttgtattcgtggacatcgccaaggcttttgacaccgtaagccaccagcacatcattcatgctttgcagcaaagagaggtggatccccacatcgtcggtctggtgagcaatatgtacgagaacatcagtacgtatatcaccacaaagaggaacacacacacagacaaaatccagatccgggttggagtaaagcagggtgacccgatgtcgccccttttatttaacctggcaatggaccctctattatgcaagctggaagagagtggcaaaggataccaccgaggacagagcagcatcacagcgatggcatttcacgacgatctggttttgctgagcgactcctgggaaaatatgaatacaaatattagcatactggagaccttctgcaatctgaccggactcaaaacacaggggcaaaagtgccacggcttttacatcaagccgacaaagaagtcttacaccatcaatgactgcgctgcctggactatcaacggcacacccctgaacatgatcgaccccggcgaatctgagaaatacctcggcctgcagtttgacccgtggattggaatagcaaggtccggtctctccacaaaactagatttttggcttcagcggatcgatcaagcaccacttaaacctctgcagaaaactgatattctcaaaacatacaccatccctcggctgatctacatagctgaccactcagaagtgaaaagcgcactactcgaaacccttgaccagaagatccggacagcggtcaaggaatggcttcacctacctccgtgcacctgcgatgccatcctgtactcgagcacgagagacggcggtttgggcatcaccaaattggcaggactgatccccagcgtgcaggcccgtagactgcatcggatcgcacagtcatctgacgatacgatgaaatgcttcatggaaaaagagaaaatggaacagctgcataagaaattgtggattcaagctggaggggacagagagaacataccctcgatttgggaagcaccaccgtcgagtgaaccaccaaacaacgtgagcacaaattcggaatgggaagcaccgacccagaaagataaatttccaaagccttgcaattggaggaaaaacgaattcaaaaaatggaccaaattggcatcccaaggccgcggaattgtaaattttgaaagagacaaaattagtaaccattggatccaatactacagacgcatacctcacaggaaactcctcactgcactacaactcagggccaacgtttaccccacgagagaatttctagccaggggtagacaagaccaatacatcaaggcgtgtaggcactgcgatgcggacaacgaatcctgcgcccacatcatcggcaactgcccagtgacacaggacgcccgaatcaagaggcacaattacatctgcgaactgcttctcgaggaggcgaagaagaaggactgggtagtgttcaaggaaccgcacataagggattccaacaaggaactgtacaaacctgacctgatatttgtgaaggatgggcgtgcacttgtcgtggatgtgacagtacggtatgaagcagccaaatcatcgctggaggaagccgctgcagagaaagtgagaaagtacaaacacctggaaacggaagtaagacatctcacgaatgcaaaggacgttacttttgtgggctttcccctaggagcgcgggggaaatggcaccaagataactttaaacttttgactgagcttggcctctccaaatcgaggcaagtgaaaatggcagagactttttccacagtagcgctcttttcatctgtggacattgtacatatgtttgccagtagggccagaaaatctatggttatgtgataataggctgccttctgcggggcttgccttctggccatgcccttcttctctcccttgcacctgtacctcttggtctttgaataaagcctgagtaggaaggaccggtaaaaaaaaaaaaaaaaaaaaaaaaaaaaaaacgttgactaaaaaaaaaaaaaaaaaaaaaaaaaaaaaaaaaaaaaaaaaaaaaaaaaaaaaaaaaaaaaaaaaaaaaa

SEQ ID NO: 10645 - DNA, 5264 bp, synthetic construct
  source 1..5264: mol_type = other DNA
gaaataagagagaaaagaagagtaagaagaaatataagagaattcgccaccatggcccctaagaaaaagcggaaggtgaatatcagcggctctagctgcggcagccccaacagcgccgacaccagcagcgacttcaaggacctgtggaccaagctgaaggaatgccacgaccgggaagtgcagggactccaggtgaaggtcaccaaactcaagcaagaaagaatcctggacgcccagagactggaagaattcttcaccaagaaccagcagctgagagagcagcagaaagtgctgcacgagacaatcaaggttctggaagatagactgcgggccggcctgtgcgacagatgcgccgtgaccgaggaacacatgcgcaaaaagcagcaggagttcgagaacattagacagcaaaatctgaaattgatcacagagctgatgaacgagagaaacacactgcaggaggagaacaagaagctgagcgagcagctgcaacagaagatcgagaatgatcagcaacaccaggccgctgagctggaatgtgaagaggacgtgatccccgacagcccaatcacagctttcagcttttctggcgtgaacagactgaggcggaaggaaaacccccacgtgcggtacatcgagcagacccataccaagctggaacacagcgtgtgtgccaacgagatgagaaaggtgtccaagtcctccacccatccccagcacaaccctaacgaaaatgagatcctggtggctgatacctacgaccagtctcagagccctatggccaaggcccacggcaccagctcttatacccctgataagagctccttcaacctggccaccgtggtggccgagacactgggcctgggcgtgcaggaggaaagcgagacacagggcccaatgagccctctgggagatgagctgtaccactgcctggaaggcaaccacaagaaacagccttttgagtccggctccgagactcctggaacaagcgagagcgctacacctgagggcagccctaagagaaaggtgtccagcgccgagggcgctgccaaggaagagcctaaacggagaagcgccagactgagcgccaagccccccgccaaggtggaagccaagcctaagaaggccgccgctaaggacaagagcagcgataagaaagtccagaccaagggcaagcggggcgccaaaggcaaacaggccgaggtggccaaccaggagacaaaggaagatctgcctgctgagaacggcgaaaccaagaccgaggaatctccagcttctgacgaggccggagagaaggaggccaaaagcgacagcggctctgagacacctggaacaagcgagagcgccaccccggaatcctatgaacaacttgcaccacaaccgtgtgtgggagaaactttacattctagcctcccacgagacagtgaactgtttgtgcctgaagaggggagcagcgagaaggagagcgaggacgcgccaaaaacatctcctccgacgcctgggaaacatggtttggaacagactggggaggaaaaagtgatggtgactgttcctgacaaaaatccaccttgtccttgctgtggtacccgggtaaactctgtgttgaatctgattgaacatctgaaagtgtcacacgggaaaaggggggtttgttttcggtgtgcaaaatgtggaaaggaaaatagtaactatcacagtgttgtttgtcattttaagaaatgcaggggtccagagacggagaaagccccagctggggagtggatttgtgaggtatgcaacagagattttacaaccaaaattggcctgggacaacacaagagattggcacacccagcagtgagaaatcaggaaaggatcgttgcttcccaaccgaaagaaacatcaaatagaggtgctcacaaaaggtgctggacaaaggaggaggaagaattactaataagactggaggctcagttcgagggaaacaaaaatattaataagcttattgcagaacacataaccaccaaaacagctaagcagatcagtgacaaaaggcgattgctgtccagaaagccagcagaggagccacgtgaggagcctggaacgtgtcatcacaccaggagagcagctgcgagcctgagaacggagcctgagatgagtcatcacgcccaggcagaggacagagataatggacctgggagacgccctctgccaggcagggcagctgccggagggagaacaatggacgagataagacgccaccctgataagggcaacggacagcagagacccaccaagcaaaaatcagaagaacagctgcaggcttactataaaaagacactagaggaacgactttcagctggggcacttaacaccttcccccgagcattcaagcaggtaatggaaggccgggatataaagctagtaatcaatcagacagcgcaggactgcttcggatgcctggaatccataagccaaataagaacggcaacccgagataaaaaggacacggtgacccgggagaaacacccaaagaaaccttttcagaagtggatgaagaagagagcaatcaaaaaaggtaattatcttcggttccagcgtttattttatcttgatagagggaaactggctaaaatcattttagatgatattgaatgcttgtcttgtgacataccactcagtgaaatttattcggtttttaaaacaagatgggaaacaactggtagctttaaaagccttggggactttaaaacttacgggaaggctgacaacactgccttcagagaattaattacggctaaagaaattgagaaaaatgtgcaggaaatgagcaaaggctcggctcccggtccagacgggattactcttggggacgtcgtaaagatggatcccgagttttcccggaccatggagattttcaatttatggttaacaactggtaaaatcccggacatggtgagggggtgcagaaccgttttgattccaaaatcatcaaagccggatcgtttgaaagacattaataactggagacctatcacgatcggttccatcttgctgagactgttctccaggattgtaacagctaggctgagcaaagcgtgccccctgaacccaaggcaaagaggctttatcagagcggcgggatgctctgaaaacttaaaactcctgcaaactataatttggtcggccaaaagagaacacagaccactgggtgttgtattcgtggacatcgccaaggcttttgacaccgtaagccaccagcacatcattcatgctttgcagcaaagagaggtggatccccacatcgtcggtctggtgagcaatatgtacgagaacatcagtacgtatatcaccacaaagaggaacacacacacagacaaaatccagatccgggttggagtaaagcagggtgacccgatgtcgccccttttatttaacctggcaatggaccctctattatgcaagctggaagagagtggcaaaggataccaccgaggacagagcagcatcacagcgatggcatttgcagacgatctggttttgctgagcgactcctgggaaaatatgaatacaaatattagcatactggagaccttctgcaatctgaccggactcaaaacacaggggcaaaagtgccacggcttttacatcaagccgacaaagaagtcttacaccatcaatgactgcgctgcctggactatcaacggcacacccctgaacatgatcgaccccggcgaatctgagaaatacctcggcctgaggtttgacccgtggattggaatagcaaggtccggtctctccacaaaactagatttttggcttcagcggatcgatcaagcaccacttaaacctctgcagaaaactgatattctcaaaacatacaccatccctcggctgatctacatagctgaccactcagaagtgaaaagcgcactactcgaaacccttgaccagaagatccggacagcggtcaaggaatggcttcacctacctccgtgcacctgcgatgccatcctgtactcgagcacgagagacggcggtttgggcatcaccaaattggcaggactgatccccagcgtgcaggcccgtagactgcatcggatcgcacagtcatctgacgatacgatgaaatgcttcatggaaaaagagaaaatggaacagctgcataagaaattgtggattcaagctggaggggacagagagaacataccctcgatttgggaagcaccaccgtcgagtgaaccaccaaacaacgtgagcacaaattcggaatgggaagcaccgacccagaaagataaatttccaaagccttgcaattggaggaaaaacgaattcaaaaaatggaccaaattggcatcccaaggccgcggaattgtaaattttgaaagagacaaaattagtaaccattggatccaatactacagacgcatacctcacaggaaactcctcactgcactacaactcagggccaacgtttaccccacgagagaatttctagccaggggtagacaagaccaatacatcaaggcgtgtaggcactgcgatgcggacaacgaatcctgcgcccacatcatcggcaactgcccagtgacacaggacgcccgaatcaagaggcacaattacatctgcgaactgcttctcgaggaggcgaagaagaaggactgggtagtgttcaaggaaccgcacataagggattccaacaaggaactgtacaaacctgacctgatatttgtgaaggatgggcgtgcacttgtcgtggatgtgacagtacggtatgaagcagccaaatcatcgctggaggaagccgctgcagagaaagtgagaaagtacaaacacctggaaacggaagtaagacatctcacgaatgcaaaggacgttacttttgtgggctttcccctaggagcgcgggggaaatggcaccaagataactttaaacttttgactgagcttggcctctccaaatcgaggcaagtgaaaatggcagagactttttccacagtagcgctcttttcatctgtggacattgtacatatgtttgccagtagggccagaaaatctatggttatgtgataataggctgccttctgcggggcttgccttctggccatgcccttcttctctcccttgcacctgtacctcttggtctttgaataaagcctgagtaggaaggaccggtaaaaaaaaaaaaaaaaaaaaaaaaaaaaaaacgttgactaaaaaaaaaaaaaaaaaaaaaaaaaaaaaaaaaaaaaaaaaaaaaaaaaaaaaaaaaaaaaaaaaaaaaa

SEQ ID NO: 10646 - DNA, 5264 bp, synthetic construct
  source 1..5264: mol_type = other DNA
gaaataagagagaaaagaagagtaagaagaaatataagagaattcgccaccatggcccctaagaaaaagcggaaggtgaatatcagcggctctagctgcggcagccccaacagcgccgacaccagcagcgacttcaaggacctgtggaccaagctgaaggaatgccacgaccgggaagtgcagggactccaggtgaaggtcaccaaactcaagcaagaaagaatcctggacgcccagagactggaagaattcttcaccaagaaccagcagctgagagagcagcagaaagtgctgcacgagacaatcaaggttctggaagatagactgcgggccggcctgtgcgacagatgcgccgtgaccgaggaacacatgcgcaaaaagcagcaggagttcgagaacattagacagcaaaatctgaaattgatcacagagctgatgaacgagagaaacacactgcaggaggagaacaagaagctgagcgagcagctgcaacagaagatcgagaatgatcagcaacaccaggccgctgagctggaatgtgaagaggacgtgatccccgacagcccaatcacagctttcagcttttctggcgtgaacagactgaggcggaaggaaaacccccacgtgcggtacatcgagcagacccataccaagctggaacacagcgtgtgtgccaacgagatgagaaaggtgtccaagtcctccacccatccccagcacaaccctaacgaaaatgagatcctggtggctgatacctacgaccagtctcagagccctatggccaaggcccacggcaccagctcttatacccctgataagagctccttcaacctggccaccgtggtggccgagacactgggcctgggcgtgcaggaggaaagcgagacacagggcccaatgagccctctgggagatgagctgtaccactgcctggaaggcaaccacaagaaacagccttttgagtccggctccgagactcctggaacaagcgagagcgctacacctgagggcagccctaagagaaaggtgtccagcgccgagggcgctgccaaggaagagcctaaacggagaagcgccagactgagcgccaagccccccgccaaggtggaagccaagcctaagaaggccgccgctaaggacaagagcagcgataagaaagtccagaccaagggcaagcggggcgccaaaggcaaacaggccgaggtggccaaccaggagacaaaggaagatctgcctgctgagaacggcgaaaccaagaccgaggaatctccagcttctgacgaggccggagagaaggaggccaaaagcgacagcggctctgagacacctggaacaagcgagagcgccaccccggaatcctatgaacaacttgcaccacaaccgtgtgtgggagaaactttacattctagcctcccacgagacagtgaactgtttgtgcctgaagaggggagcagcgagaaggagagcgaggacgcgccaaaaacatctcctccgacgcctgggaaacatggtttggaacagactggggaggaaaaagtgatggtgactgttcctgacaaaaatccaccttgtccttgctgtggtacccgggtaaactctgtgttgaatctgattgaacatctgaaagtgtcacacgggaaaaggggggtttgttttcggtgtgcaaaatgtggaaaggaaaatagtaactatcacagtgttgtttgtcattttaagaaatgcaggggtccagagacggagaaagccccagctggggagtggatttgtgaggtatgcaacagagattttacaaccaaaattggcctgggacaacacaagagattggcacacccagcagtgagaaatcaggaaaggatcgttgcttcccaaccgaaagaaacatcaaatagaggtgctcacaaaaggtgctggacaaaggaggaggaagaattactaataagactggaggctcagttcgagggaaacaaaaatattaataagcttattgcagaacacataaccaccaaaacagctaagcagatcagtgacaaaaggcgattgctgtccagaaagccagcagaggagccacgtgaggagcctggaacgtgtcatcacaccaggagagcagctgcgagcctgagaacggagcctgagatgagtcatcacgcccaggcagaggacagagataatggacctgggagacgccctctgccaggcagggcagctgccggagggagaacaatggacgagataagacgccaccctgataagggcaacggacagcagagacccaccaagcaaaaatcagaagaacagctgcaggcttactataaaaagacactagaggaacgactttcagctggggcacttaacaccttcccccgagcattcaagcaggtaatggaaggccgggatataaagctagtaatcaatcagacagcgcaggactgcttcggatgcctggaatccataagccaaataagaacggcaacccgagataaaaaggacacggtgacccgggagaaacacccaaagaaaccttttcagaagtggatgaagaagagagcaatcaaaaaaggtaattatcttcggttccagcgtttattttatcttgatagagggaaactggctaaaatcattttagatgatattgaatgcttgtcttgtgacataccactcagtgaaatttattcggtttttaaaacaagatgggaaacaactggtagctttaaaagccttggggactttaaaacttacgggaaggctgacaacactgccttcagagaattaattacggctaaagaaattgagaaaaatgtgcaggaaatgagcaaaggctcggctcccggtccagacgggattactcttggggacgtcgtaaagatggatcccgagttttcccggaccatggagattttcaatttatggttaacaactggtaaaatcccggacatggtgagggggtgcagaaccgttttgattccaaaatcatcaaagccggatcgtttgaaagacattaataactggagacctatcacgatcggttccatcttgctgagactgttctccaggattgtaacagctaggctgagcaaagcgtgccccctgaacccaaggcaaagaggctttatcagagcggcgggatgctctgaaaacttaaaactcctgcaaactataatttggtcggccaaaagagaacacagaccactgggtgttgtattcgtggacatcgccaaggcttttgacaccgtaagccaccagcacatcattcatgctttgcagcaaagagaggtggatccccacatcgtcggtctggtgagcaatatgtacgagaacatcagtacgtatatcaccacaaagaggaacacacacacagacaaaatccagatccgggttggagtaaagcagggtgacccgatgtcgccccttttatttaacctggcaatggaccctctattatgcaagctggaagagagtggcaaaggataccaccgaggacagagcagcatcacagcgatggcatttgcagacgatctggttttgctgagcgactcctgggaaaatatgaatacaaatattagcatactggagaccttctgcaatctgaccggactcaaaacacaggggcaaaagtgccacggcttttacatcaagccgacaaagaagtcttacaccatcaatgactgcgctgcctggactatcaacggcacacccctgaacatgatcgaccccggcgaatctgagaaatacatcggcctgcagtttgacccgtggattggaatagcaaggtccggtctctccacaaaactagatttttggcttcagcggatcgatcaagcaccacttaaacctctgcagaaaactgatattctcaaaacatacaccatccctcggctgatctacatagctgaccactcagaagtgaaaagcgcactactcgaaacccttgaccagaagatccggacagcggtcaaggaatggcttcacctacctccgtgcacctgcgatgccatcctgtactcgagcacgagagacggcggtttgggcatcaccaaattggcaggactgatccccagcgtgcaggcccgtagactgcatcggatcgcacagtcatctgacgatacgatgaaatgcttcatggaaaaagagaaaatggaacagctgcataagaaattgtggattcaagctggaggggacagagagaacataccctcgatttgggaagcaccaccgtcgagtgaaccaccaaacaacgtgagcacaaattcggaatgggaagcaccgacccagaaagataaatttccaaagccttgcaattggaggaaaaacgaattcaaaaaatggaccaaattggcatcccaaggccgcggaattgtaaattttgaaagagacaaaattagtaaccattggatccaatactacagacgcatacctcacaggaaactcctcactgcactacaactcagggccaacgtttaccccacgagagaatttctagccaggggtagacaagaccaatacatcaaggcgtgtaggcactgcgatgcggacaacgaatcctgcgcccacatcatcggcaactgcccagtgacacaggacgcccgaatcaagaggcacaattacatctgcgaactgcttctcgaggaggcgaagaagaaggactgggtagtgttcaaggaaccgcacataagggattccaacaaggaactgtacaaacctgacctgatatttgtgaaggatgggcgtgcacttgtcgtggatgtgacagtacggtatgaagcagccaaatcatcgctggaggaagccgctgcagagaaagtgagaaagtacaaacacctggaaacggaagtaagacatctcacgaatgcaaaggacgttacttttgtgggctttcccctaggagcgcgggggaaatggcaccaagataactttaaacttttgactgagcttggcctctccaaatcgaggcaagtgaaaatggcagagactttttccacagtagcgctcttttcatctgtggacattgtacatatgtttgccagtagggccagaaaatctatggttatgtgataataggctgccttctgcggggcttgccttctggccatgcccttcttctctcccttgcacctgtacctcttggtctttgaataaagcctgagtaggaaggaccggtaaaaaaaaaaaaaaaaaaaaaaaaaaaaaaacgttgactaaaaaaaaaaaaaaaaaaaaaaaaaaaaaaaaaaaaaaaaaaaaaaaaaaaaaaaaaaaaaaaaaaaaaa

SEQ ID NO: 10647 - DNA, 5264 bp, synthetic construct
  source 1..5264: mol_type = other DNA
gaaataagagagaaaagaagagtaagaagaaatataagagaattcgccaccatggcccctaagaaaaagcggaaggtgaatatcagcggctctagctgcggcagccccaacagcgccgacaccagcagcgacttcaaggacctgtggaccaagctgaaggaatgccacgaccgggaagtgcagggactccaggtgaaggtcaccaaactcaagcaagaaagaatcctggacgcccagagactggaagaattcttcaccaagaaccagcagctgagagagcagcagaaagtgctgcacgagacaatcaaggttctggaagatagactgcgggccggcctgtgcgacagatgcgccgtgaccgaggaacacatgcgcaaaaagcagcaggagttcgagaacattagacagcaaaatctgaaattgatcacagagctgatgaacgagagaaacacactgcaggaggagaacaagaagctgagcgagcagctgcaacagaagatcgagaatgatcagcaacaccaggccgctgagctggaatgtgaagaggacgtgatccccgacagcccaatcacagctttcagcttttctggcgtgaacagactgaggcggaaggaaaacccccacgtgcggtacatcgagcagacccataccaagctggaacacagcgtgtgtgccaacgagatgagaaaggtgtccaagtcctccacccatccccagcacaaccctaacgaaaatgagatcctggtggctgatacctacgaccagtctcagagccctatggccaaggcccacggcaccagctcttatacccctgataagagctccttcaacctggccaccgtggtggccgagacactgggcctgggcgtgcaggaggaaagcgagacacagggcccaatgagccctctgggagatgagctgtaccactgcctggaaggcaaccacaagaaacagccttttgagtccggctccgagactcctggaacaagcgagagcgctacacctgagggcagccctaagagaaaggtgtccagcgccgagggcgctgccaaggaagagcctaaacggagaagcgccagactgagcgccaagccccccgccaaggtggaagccaagcctaagaaggccgccgctaaggacaagagcagcgataagaaagtccagaccaagggcaagcggggcgccaaaggcaaacaggccgaggtggccaaccaggagacaaaggaagatctgcctgctgagaacggcgaaaccaagaccgaggaatctccagcttctgacgaggccggagagaaggaggccaaaagcgacagcggctctgagacacctggaacaagcgagagcgccaccccggaatcctatgaacaacttgcaccacaaccgtgtgtgggagaaactttacattctagcctcccacgagacagtgaactgtttgtgcctgaagaggggagcagcgagaaggagagcgaggacgcgccaaaaacatctcctccgacgcctgggaaacatggtttggaacagactggggaggaaaaagtgatggtgactgttcctgacaaaaatccaccttgtccttgctgtggtacccgggtaaactctgtgttgaatctgattgaacatctgaaagtgtcacacgggaaaaggggggtttgttttcggtgtgcaaaatgtggaaaggaaaatagtaactatcacagtgttgtttgtcattttaagaaatgcaggggtccagagacggagaaagccccagctggggagtggatttgtgaggtatgcaacagagattttacaaccaaaattggcctgggacaacacaagagattggcacacccagcagtgagaaatcaggaaaggatcgttgcttcccaaccgaaagaaacatcaaatagaggtgctcacaaaaggtgctggacaaaggaggaggaagaattactaataagactggaggctcagttcgagggaaacaaaaatattaataagcttattgcagaacacataaccaccaaaacagctaagcagatcagtgacaaaaggcgattgctgtccagaaagccagcagaggagccacgtgaggagcctggaacgtgtcatcacaccaggagagcagctgcgagcctgagaacggagcctgagatgagtcatcacgcccaggcagaggacagagataatggacctgggagacgccctctgccaggcagggcagctgccggagggagaacaatggacgagataagacgccaccctgataagggcaacggacagcagagacccaccaagcaaaaatcagaagaacagctgcaggcttactataaaaagacactagaggaacgactttcagctggggcacttaacaccttcccccgagcattcaagcaggtaatggaaggccgggatataaagctagtaatcaatcagacagcgcaggactgcttcggatgcctggaatccataagccaaataagaacggcaacccgagataaaaaggacacggtgacccgggagaaacacccaaagaaaccttttcagaagtggatgaagaagagagcaatcaaaaaaggtaattatcttcggttccagcgtttattttatcttgatagagggaaactggctaaaatcattttagatgatattgaatgcttgtcttgtgacataccactcagtgaaatttattcggtttttaaaacaagatgggaaacaactggtagctttaaaagccttggggactttaaaacttacgggaaggctgacaacactgccttcagagaattaattacggctaaagaaattgagaaaaatgtgcaggaaatgagcaaaggctcggctcccggtccagacgggattactcttggggacgtcgtaaagatggatcccgagttttcccggaccatggagattttcaatttatggttaacaactggtaaaatcccggacatggtgagggggtgcagaaccgttttgattccaaaatcatcaaagccggatcgtttgaaagacattaataactggagacctatcacgatcggttccatcttgctgagactgttctccaggattgtaacagctaggctgagcaaagcgtgccccctgaacccaaggcaaagaggctttatcagagcggcgggatgctctgaaaacttaaaactcctgcaaactataatttggtcggccaaaagagaacacagaccactgggtgttgtattcgtggacatcgccaaggcttttgacaccgtaagccaccagcacatcattcatgctttgcagcaaagagaggtggatccccacatcgtcggtctggtgagcaatatgtacgagaacatcagtacgtatatcaccacaaagaggaacacacacacagacaaaatccagatccgggttggagtaaagcagggtgacccgatgtcgccccttttatttaacctggcaatggaccctctattatgcaagctggaagagagtggcaaaggataccaccgaggacagagcagcatcacagcgatggcatttgcagacgatctggttttgctgagcgactcctgggaaaatatgaatacaaatattagcatactggagaccttctgcaatctgaccggactcaaaacacaggggcaaaagtgccacggcttttacatcaagccgacaaagaagtcttacaccatcaatgactgcgctgcctggactatcaacggcacacccctgaacatgatcgaccccggcagctctgagaaatacctcggcctgcagtttgacccgtggattggaatagcaaggtccggtctctccacaaaactagatttttggcttcagcggatcgatcaagcaccacttaaacctctgcagaaaactgatattctcaaaacatacaccatccctcggctgatctacatagctgaccactcagaagtgaaaagcgcactactcgaaacccttgaccagaagatccggacagcggtcaaggaatggcttcacctacctccgtgcacctgcgatgccatcctgtactcgagcacgagagacggcggtttgggcatcaccaaattggcaggactgatccccagcgtgcaggcccgtagactgcatcggatcgcacagtcatctgacgatacgatgaaatgcttcatggaaaaagagaaaatggaacagctgcataagaaattgtggattcaagctggaggggacagagagaacataccctcgatttgggaagcaccaccgtcgagtgaaccaccaaacaacgtgagcacaaattcggaatgggaagcaccgacccagaaagataaatttccaaagccttgcaattggaggaaaaacgaattcaaaaaatggaccaaattggcatcccaaggccgcggaattgtaaattttgaaagagacaaaattagtaaccattggatccaatactacagacgcatacctcacaggaaactcctcactgcactacaactcagggccaacgtttaccccacgagagaatttctagccaggggtagacaagaccaatacatcaaggcgtgtaggcactgcgatgcggacaacgaatcctgcgcccacatcatcggcaactgcccagtgacacaggacgcccgaatcaagaggcacaattacatctgcgaactgcttctcgaggaggcgaagaagaaggactgggtagtgttcaaggaaccgcacataagggattccaacaaggaactgtacaaacctgacctgatatttgtgaaggatgggcgtgcacttgtcgtggatgtgacagtacggtatgaagcagccaaatcatcgctggaggaagccgctgcagagaaagtgagaaagtacaaacacctggaaacggaagtaagacatctcacgaatgcaaaggacgttacttttgtgggctttcccctaggagcgcgggggaaatggcaccaagataactttaaacttttgactgagcttggcctctccaaatcgaggcaagtgaaaatggcagagactttttccacagtagcgctcttttcatctgtggacattgtacatatgtttgccagtagggccagaaaatctatggttatgtgataataggctgccttctgcggggcttgccttctggccatgcccttcttctctcccttgcacctgtacctcttggtctttgaataaagcctgagtaggaaggaccggtaaaaaaaaaaaaaaaaaaaaaaaaaaaaaaacgttgactaaaaaaaaaaaaaaaaaaaaaaaaaaaaaaaaaaaaaaaaaaaaaaaaaaaaaaaaaaaaaaaaaaaaaa

SEQ ID NO: 10648 - DNA, 5264 bp, synthetic construct
  source 1..5264: mol_type = other DNA
gaaataagagagaaaagaagagtaagaagaaatataagagaattcgccaccatggcccctaagaaaaagcggaaggtgaatatcagcggctctagctgcggcagccccaacagcgccgacaccagcagcgacttcaaggacctgtggaccaagctgaaggaatgccacgaccgggaagtgcagggactccaggtgaaggtcaccaaactcaagcaagaaagaatcctggacgcccagagactggaagaattcttcaccaagaaccagcagctgagagagcagcagaaagtgctgcacgagacaatcaaggttctggaagatagactgcgggccggcctgtgcgacagatgcgccgtgaccgaggaacacatgcgcaaaaagcagcaggagttcgagaacattagacagcaaaatctgaaattgatcacagagctgatgaacgagagaaacacactgcaggaggagaacaagaagctgagcgagcagctgcaacagaagatcgagaatgatcagcaacaccaggccgctgagctggaatgtgaagaggacgtgatccccgacagcccaatcacagctttcagcttttctggcgtgaacagactgaggcggaaggaaaacccccacgtgcggtacatcgagcagacccataccaagctggaacacagcgtgtgtgccaacgagatgagaaaggtgtccaagtcctccacccatccccagcacaaccctaacgaaaatgagatcctggtggctgatacctacgaccagtctcagagccctatggccaaggcccacggcaccagctcttatacccctgataagagctccttcaacctggccaccgtggtggccgagacactgggcctgggcgtgcaggaggaaagcgagacacagggcccaatgagccctctgggagatgagctgtaccactgcctggaaggcaaccacaagaaacagccttttgagtccggctccgagactcctggaacaagcgagagcgctacacctgagggcagccctaagagaaaggtgtccagcgccgagggcgctgccaaggaagagcctaaacggagaagcgccagactgagcgccaagccccccgccaaggtggaagccaagcctaagaaggccgccgctaaggacaagagcagcgataagaaagtccagaccaagggcaagcggggcgccaaaggcaaacaggccgaggtggccaaccaggagacaaaggaagatctgcctgctgagaacggcgaaaccaagaccgaggaatctccagcttctgacgaggccggagagaaggaggccaaaagcgacagcggctctgagacacctggaacaagcgagagcgccaccccggaatcctatgaacaacttgcaccacaaccgtgtgtgggagaaactttacattctagcctcccacgagacagtgaactgtttgtgcctgaagaggggagcagcgagaaggagagcgaggacgcgccaaaaacatctcctccgacgcctgggaaacatggtttggaacagactggggaggaaaaagtgatggtgactgttcctgacaaaaatccaccttgtccttgctgtggtacccgggtaaactctgtgttgaatctgattgaacatctgaaagtgtcacacgggaaaaggggggtttgttttcggtgtgcaaaatgtggaaaggaaaatagtaactatcacagtgttgtttgtcattttaagaaatgcaggggtccagagacggagaaagccccagctggggagtggatttgtgaggtatgcaacagagattttacaaccaaaattggcctgggacaacacaagagattggcacacccagcagtgagaaatcaggaaaggatcgttgcttcccaaccgaaagaaacatcaaatagaggtgctcacaaaaggtgctggacaaaggaggaggaagaattactaataagactggaggctcagttcgagggaaacaaaaatattaataagcttattgcagaacacataaccaccaaaacagctaagcagatcagtgacaaaaggcgattgctgtccagaaagccagcagaggagccacgtgaggagcctggaacgtgtcatcacaccaggagagcagctgcgagcctgagaacggagcctgagatgagtcatcacgcccaggcagaggacagagataatggacctgggagacgccctctgccaggcagggcagctgccggagggagaacaatggacgagataagacgccaccctgataagggcaacggacagcagagacccaccaagcaaaaatcagaagaacagctgcaggcttactataaaaagacactagaggaacgactttcagctggggcacttaacaccttcccccgagcattcaagcaggtaatggaaggccgggatataaagctagtaatcaatcagacagcgcaggactgcttcggatgcctggaatccataagccaaataagaacggcaacccgagataaaaaggacacggtgacccgggagaaacacccaaagaaaccttttcagaagtggatgaagaagagagcaatcaaaaaaggtaattatcttcggttccagcgtttattttatcttgatagagggaaactggctaaaatcattttagatgatattgaatgcttgtcttgtgacataccactcagtgaaatttattcggtttttaaaacaagatgggaaacaactggtagctttaaaagccttggggactttaaaacttacgggaaggctgacaacactgccttcagagaattaattacggctaaagaaattgagaaaaatgtgcaggaaatgagcaaaggctcggctcccggtccagacgggattactcttagagacgtcgtaaagatggatcccgagttttcccggaccatggagattttcaatttatggttaacaactggtaaaatcccggacatggtgagggggtgcagaaccgttttgattccaaaatcatcaaagccggatcgtttgaaagacattaataactggagacctatcacgatcggttccatcttgctgagactgttctccaggattgtaacagctaggctgagcaaagcgtgccccctgaacccaaggcaaagaggctttatcagagcggcgggatgctctgaaaacttaaaactcctgcaaactataatttggtcggccaaaagagaacacagaccactgggtgttgtattcgtggacatcgccaaggcttttgacaccgtaagccaccagcacatcattcatgctttgcagcaaagagaggtggatccccacatcgtcggtctggtgagcaatatgtacgagaacatcagtacgtatatcaccacaaagaggaacacacacacagacaaaatccagatccgggttggagtaaagcagggtgacccgatgtcgccccttttatttaacctggcaatggaccctctattatgcaagctggaagagagtggcaaaggataccaccgaggacagagcagcatcacagcgatggcatttgcagacgatctggttttgctgagcgactcctgggaaaatatgaatacaaatattagcatactggagaccttctgcaatctgaccggactcaaaacacaggggcaaaagtgccacggcttttacatcaagccgacaaagaagtcttacaccatcaatgactgcgctgcctggactatcaacggcacacccctgaacatgatcgaccccggcgaatctgagaaatacctcggcctgcagtttgacccgtggattggaatagcaaggtccggtctctccacaaaactagatttttggcttcagcggatcgatcaagcaccacttaaacctctgcagaaaactgatattctcaaaacatacaccatccctcggctgatctacatagctgaccactcagaagtgaaaagcgcactactcgaaacccttgaccagaagatccggacagcggtcaaggaatggcttcacctacctccgtgcacctgcgatgccatcctgtactcgagcacgagagacggcggtttgggcatcaccaaattggcaggactgatccccagcgtgcaggcccgtagactgcatcggatcgcacagtcatctgacgatacgatgaaatgcttcatggaaaaagagaaaatggaacagctgcataagaaattgtggattcaagctggaggggacagagagaacataccctcgatttgggaagcaccaccgtcgagtgaaccaccaaacaacgtgagcacaaattcggaatgggaagcaccgacccagaaagataaatttccaaagccttgcaattggaggaaaaacgaattcaaaaaatggaccaaattggcatcccaaggccgcggaattgtaaattttgaaagagacaaaattagtaaccattggatccaatactacagacgcatacctcacaggaaactcctcactgcactacaactcagggccaacgtttaccccacgagagaatttctagccaggggtagacaagaccaatacatcaaggcgtgtaggcactgcgatgcggacaacgaatcctgcgcccacatcatcggcaactgcccagtgacacaggacgcccgaatcaagaggcacaattacatctgcgaactgcttctcgaggaggcgaagaagaaggactgggtagtgttcaaggaaccgcacataagggattccaacaaggaactgtacaaacctgacctgatatttgtgaaggatgggcgtgcacttgtcgtggatgtgacagtacggtatgaagcagccaaatcatcgctggaggaagccgctgcagagaaagtgagaaagtacaaacacctggaaacggaagtaagacatctcacgaatgcaaaggacgttacttttgtgggctttcccctaggagcgcgggggaaatggcaccaagataactttaaacttttgactgagcttggcctctccaaatcgaggcaagtgaaaatggcagagactttttccacagtagcgctcttttcatctgtggacattgtacatatgtttgccagtagggccagaaaatctatggttatgtgataataggctgccttctgcggggcttgccttctggccatgcccttcttctctcccttgcacctgtacctcttggtctttgaataaagcctgagtaggaaggaccggtaaaaaaaaaaaaaaaaaaaaaaaaaaaaaaacgttgactaaaaaaaaaaaaaaaaaaaaaaaaaaaaaaaaaaaaaaaaaaaaaaaaaaaaaaaaaaaaaaaaaaaaaa

SEQ ID NO: 10649 - DNA, 5264 bp, synthetic construct
  source 1..5264: mol_type = other DNA
gaaataagagagaaaagaagagtaagaagaaatataagagaattcgccaccatggcccctaagaaaaagcggaaggtgaatatcagcggctctagctgcggcagccccaacagcgccgacaccagcagcgacttcaaggacctgtggaccaagctgaaggaatgccacgaccgggaagtgcagggactccaggtgaaggtcaccaaactcaagcaagaaagaatcctggacgcccagagactggaagaattcttcaccaagaaccagcagctgagagagcagcagaaagtgctgcacgagacaatcaaggttctggaagatagactgcgggccggcctgtgcgacagatgcgccgtgaccgaggaacacatgcgcaaaaagcagcaggagttcgagaacattagacagcaaaatctgaaattgatcacagagctgatgaacgagagaaacacactgcaggaggagaacaagaagctgagcgagcagctgcaacagaagatcgagaatgatcagcaacaccaggccgctgagctggaatgtgaagaggacgtgatccccgacagcccaatcacagctttcagcttttctggcgtgaacagactgaggcggaaggaaaacccccacgtgcggtacatcgagcagacccataccaagctggaacacagcgtgtgtgccaacgagatgagaaaggtgtccaagtcctccacccatccccagcacaaccctaacgaaaatgagatcctggtggctgatacctacgaccagtctcagagccctatggccaaggcccacggcaccagctcttatacccctgataagagctccttcaacctggccaccgtggtggccgagacactgggcctgggcgtgcaggaggaaagcgagacacagggcccaatgagccctctgggagatgagctgtaccactgcctggaaggcaaccacaagaaacagccttttgagtccggctccgagactcctggaacaagcgagagcgctacacctgagggcagccctaagagaaaggtgtccagcgccgagggcgctgccaaggaagagcctaaacggagaagcgccagactgagcgccaagccccccgccaaggtggaagccaagcctaagaaggccgccgctaaggacaagagcagcgataagaaagtccagaccaagggcaagcggggcgccaaaggcaaacaggccgaggtggccaaccaggagacaaaggaagatctgcctgctgagaacggcgaaaccaagaccgaggaatctccagcttctgacgaggccggagagaaggaggccaaaagcgacagcggctctgagacacctggaacaagcgagagcgccaccccggaatcctatgaacaacttgcaccacaaccgtgtgtgggagaaactttacattctagcctcccacgagacagtgaactgtttgtgcctgaagaggggagcagcgagaaggagagcgaggacgcgccaaaaacatctcctccgacgcctgggaaacatggtttggaacagactggggaggaaaaagtgatggtgactgttcctgacaaaaatccaccttgtccttgctgtggtacccgggtaaactctgtgttgaatctgattgaacatctgaaagtgtcacacgggaaaaggggggtttgttttcggtgtgcaaaatgtggaaaggaaaatagtaactatcacagtgttgtttgtcattttaagaaatgcaggggtccagagacggagaaagccccagctggggagtggatttgtgaggtatgcaacagagattttacaaccaaaattggcctgggacaacacaagagattggcacacccagcagtgagaaatcaggaaaggatcgttgcttcccaaccgaaagaaacatcaaatagaggtgctcacaaaaggtgctggacaaaggaggaggaagaattactaataagactggaggctcagttcgagggaaacaaaaatattaataagcttattgcagaacacataaccaccaaaacagctaagcagatcagtgacaaaaggcgattgctgtccagaaagccagcagaggagccacgtgaggagcctggaacgtgtcatcacaccaggagagcagctgcgagcctgagaacggagcctgagatgagtcatcacgcccaggcagaggacagagataatggacctgggagacgccctctgccaggcagggcagctgccggagggagaacaatggacgagataagacgccaccctgataagggcaacggacagcagagacccaccaagcaaaaatcagaagaacagctgcaggcttactataaaaagacactagaggaacgactttcagctggggcacttaacaccttcccccgagcattcaagcaggtaatggaaggccgggatataaagctagtaatcaatcagacagcgcaggactgcttcggatgcctggaatccataagccaaataagaacggcaacccgagataaaaaggacacggtgacccgggagaaacacccaaagaaaccttttcagaagtggatgaagaagagagcaatcaaaaaaggtaattatcttcggttccagcgtttattttatcttgatagagggaaactggctaaaatcattttagatgatattgaatgcttgtcttgtgacataccactcagtgaaatttattcggtttttaaaacaagatgggaaacaactggtagctttaaaagccttggggactttaaaacttacgggaaggctgacaacactgccttcagagaattaattacggctaaagaaattgagaaaaatgtgagggaaatgagcaaaggctcggctcccggtccagacgggattactcttggggacgtcgtaaagatggatcccgagttttcccggaccatggagattttcaatttatggttaacaactggtaaaatcccggacatggtgagggggtgcagaaccgttttgattccaaaatcatcaaagccggatcgtttgaaagacattaataactggagacctatcacgatcggttccatcttgctgagactgttctccaggattgtaacagctaggctgagcaaagcgtgccccctgaacccaaggcaaagaggctttatcagagcggcgggatgctctgaaaacttaaaactcctgcaaactataatttggtcggccaaaagagaacacagaccactgggtgttgtattcgtggacatcgccaaggcttttgacaccgtaagccaccagcacatcattcatgctttgcagcaaagagaggtggatccccacatcgtcggtctggtgagcaatatgtacgagaacatcagtacgtatatcaccacaaagaggaacacacacacagacaaaatccagatccgggttggagtaaagcagggtgacccgatgtcgccccttttatttaacctggcaatggaccctctattatgcaagctggaagagagtggcaaaggataccaccgaggacagagcagcatcacagcgatggcatttgcagacgatctggttttgctgagcgactcctgggaaaatatgaatacaaatattagcatactggagaccttctgcaatctgaccggactcaaaacacaggggcaaaagtgccacggcttttacatcaagccgacaaagaagtcttacaccatcaatgactgcgctgcctggactatcaacggcacacccctgaacatgatcgaccccggcgaatctgagaaatacctcggcctgcagtttgacccgtggattggaatagcaaggtccggtctctccacaaaactagatttttggcttcagcggatcgatcaagcaccacttaaacctctgcagaaaactgatattctcaaaacatacaccatccctcggctgatctacatagctgaccactcagaagtgaaaagcgcactactcgaaacccttgaccagaagatccggacagcggtcaaggaatggcttcacctacctccgtgcacctgcgatgccatcctgtactcgagcacgagagacggcggtttgggcatcaccaaattggcaggactgatccccagcgtgcaggcccgtagactgcatcggatcgcacagtcatctgacgatacgatgaaatgcttcatggaaaaagagaaaatggaacagctgcataagaaattgtggattcaagctggaggggacagagagaacataccctcgatttgggaagcaccaccgtcgagtgaaccaccaaacaacgtgagcacaaattcggaatgggaagcaccgacccagaaagataaatttccaaagccttgcaattggaggaaaaacgaattcaaaaaatggaccaaattggcatcccaaggccgcggaattgtaaattttgaaagagacaaaattagtaaccattggatccaatactacagacgcatacctcacaggaaactcctcactgcactacaactcagggccaacgtttaccccacgagagaatttctagccaggggtagacaagaccaatacatcaaggcgtgtaggcactgcgatgcggacaacgaatcctgcgcccacatcatcggcaactgcccagtgacacaggacgcccgaatcaagaggcacaattacatctgcgaactgcttctcgaggaggcgaagaagaaggactgggtagtgttcaaggaaccgcacataagggattccaacaaggaactgtacaaacctgacctgatatttgtgaaggatgggcgtgcacttgtcgtggatgtgacagtacggtatgaagcagccaaatcatcgctggaggaagccgctgcagagaaagtgagaaagtacaaacacctggaaacggaagtaagacatctcacgaatgcaaaggacgttacttttgtgggctttcccctaggagcgcgggggaaatggcaccaagataactttaaacttttgactgagcttggcctctccaaatcgaggcaagtgaaaatggcagagactttttccacagtagcgctcttttcatctgtggacattgtacatatgtttgccagtagggccagaaaatctatggttatgtgataataggctgccttctgcggggcttgccttctggccatgcccttcttctctcccttgcacctgtacctcttggtctttgaataaagcctgagtaggaaggaccggtaaaaaaaaaaaaaaaaaaaaaaaaaaaaaaacgttgactaaaaaaaaaaaaaaaaaaaaaaaaaaaaaaaaaaaaaaaaaaaaaaaaaaaaaaaaaaaaaaaaaaaaaa

SEQ ID NO: 10650 - DNA, 5264 bp, synthetic construct
  source 1..5264: mol_type = other DNA
gaaataagagagaaaagaagagtaagaagaaatataagagaattcgccaccatggcccctaagaaaaagcggaaggtgaatatcagcggctctagctgcggcagccccaacagcgccgacaccagcagcgacttcaaggacctgtggaccaagctgaaggaatgccacgaccgggaagtgcagggactccaggtgaaggtcaccaaactcaagcaagaaagaatcctggacgcccagagactggaagaattcttcaccaagaaccagcagctgagagagcagcagaaagtgctgcacgagacaatcaaggttctggaagatagactgcgggccggcctgtgcgacagatgcgccgtgaccgaggaacacatgcgcaaaaagcagcaggagttcgagaacattagacagcaaaatctgaaattgatcacagagctgatgaacgagagaaacacactgcaggaggagaacaagaagctgagcgagcagctgcaacagaagatcgagaatgatcagcaacaccaggccgctgagctggaatgtgaagaggacgtgatccccgacagcccaatcacagctttcagcttttctggcgtgaacagactgaggcggaaggaaaacccccacgtgcggtacatcgagcagacccataccaagctggaacacagcgtgtgtgccaacgagatgagaaaggtgtccaagtcctccacccatccccagcacaaccctaacgaaaatgagatcctggtggctgatacctacgaccagtctcagagccctatggccaaggcccacggcaccagctcttatacccctgataagagctccttcaacctggccaccgtggtggccgagacactgggcctgggcgtgcaggaggaaagcgagacacagggcccaatgagccctctgggagatgagctgtaccactgcctggaaggcaaccacaagaaacagccttttgagtccggctccgagactcctggaacaagcgagagcgctacacctgagggcagccctaagagaaaggtgtccagcgccgagggcgctgccaaggaagagcctaaacggagaagcgccagactgagcgccaagccccccgccaaggtggaagccaagcctaagaaggccgccgctaaggacaagagcagcgataagaaagtccagaccaagggcaagcggggcgccaaaggcaaacaggccgaggtggccaaccaggagacaaaggaagatctgcctgctgagaacggcgaaaccaagaccgaggaatctccagcttctgacgaggccggagagaaggaggccaaaagcgacagcggctctgagacacctggaacaagcgagagcgccaccccggaatcctatgaacaacttgcaccacaaccgtgtgtgggagaaactttacattctagcctcccacgagacagtgaactgtttgtgcctgaagaggggagcagcgagaaggagagcgaggacgcgccaaaaacatctcctccgacgcctgggaaacatggtttggaacagactggggaggaaaaagtgatggtgactgttcctgacaaaaatccaccttgtccttgctgtggtacccgggtaaactctgtgttgaatctgattgaacatctgaaagtgtcacacgggaaaaggggggtttgttttcggtgtgcaaaatgtggaaaggaaaatagtaactatcacagtgttgtttgtcattttaagaaatgcaggggtccagagacggagaaagccccagctggggagtggatttgtgaggtatgcaacagagattttacaaccaaaattggcctgggacaacacaagagattggcacacccagcagtgagaaatcaggaaaggatcgttgcttcccaaccgaaagaaacatcaaatagaggtgctcacaaaaggtgctggacaaaggaggaggaagaattactaataagactggaggctcagttcgagggaaacaaaaatattaataagcttattgcagaacacataaccaccaaaacagctaagcagatcagtgacaaaaggcgattgctgtccagaaagccagcagaggagccacgtgaggagcctggaacgtgtcatcacaccaggagagcagctgcgagcctgagaacggagcctgagatgagtcatcacgcccaggcagaggacagagataatggacctgggagacgccctctgccaggcagggcagctgccggagggagaacaatggacgagataagacgccaccctgataagggcaacggacagcagagacccaccaagcaaaaatcagaagaacagctgcaggcttactataaaaagacactagaggaacgactttcagctggggcacttaacaccttcccccgagcattcaagcaggtaatggaaggccgggatataaagctagtaatcaatcagacagcgcaggactgcttcggatgcctggaatccataagccaaataagaacggcaacccgagataaaaaggacacggtgacccgggagaaacacccaaagaaaccttttcagaagtggatgaagaagagagcaatcaaaaaaggtaattatcttcggttccagcgtttattttatcttgatagagggaaactggctaaaatcattttagatgatattgaatgcttgtcttgtgacataccactcagtgaaatttattcggtttttaaaacaagatgggaaacaactggtagctttaaaagccttggggactttaaaacttacgggaaggctgacaacactgccttcagagaattaattacggctaaagaaattgagaaaaatgtgcaggaaatgagcaaaggctcggctcccggtccagacgggattactcttggggacgtcgtaaagatggatcccgagttttcccggaccatggagattttcaatttatggttaacaactggtaaaatcccggacatggtgagggggtgcagaaccgttttgattccaaaatcatcaaagccggatcgtttgaaagacattaataactggagacctatcacgatcggttccatcttgctgagactgttctccaggattgtaacagctaggctgagcaaagcgtgccccctgaacccaaggcaaagaggctttatcagagcggcgggatgctctgaaaacttaaaactcctgcaaactataatttggtcggccaaaagagaacacagaccactgggtgttgtattcgtggacatcgccaaggcttttgacaccgtaagccaccagcacatcattcatgctttgcagcaaagagaggtggatccccacatcgtcggtctggtgagcaatatgtacgagaacatcagtacgtatatcaccacaaagaggaacacacacacagacaaaatccagatccgggttggagtaaagcagggtgacccgatgtcgccccttttatttaacctggcaatggaccctctattatgcaagctggaagagagtggcaaaggataccaccgaggacagagcagcatcacagcgatggcatttgcagacgatctggttttgctgagcgactcctgggaaaatatgaatacaaatattagcatactggagaccttctgcaatctgaccggactcaaaacacaggggcaaaagtgccacggcttttacatcaagccgacaaagaagtcttacaccatcaatgactgcgctgcctggactatcaacggcacacccctgaacatgatcgaccccggcgaatctgagaaatacctcggcctgcagtttgacccgtggattggaatagcaaggtccggtctctccacaaaactagataggtggcttcagcggatcgatcaagcaccacttaaacctctgcagaaaactgatattctcaaaacatacaccatccctcggctgatctacatagctgaccactcagaagtgaaaagcgcactactcgaaacccttgaccagaagatccggacagcggtcaaggaatggcttcacctacctccgtgcacctgcgatgccatcctgtactcgagcacgagagacggcggtttgggcatcaccaaattggcaggactgatccccagcgtgcaggcccgtagactgcatcggatcgcacagtcatctgacgatacgatgaaatgcttcatggaaaaagagaaaatggaacagctgcataagaaattgtggattcaagctggaggggacagagagaacataccctcgatttgggaagcaccaccgtcgagtgaaccaccaaacaacgtgagcacaaattcggaatgggaagcaccgacccagaaagataaatttccaaagccttgcaattggaggaaaaacgaattcaaaaaatggaccaaattggcatcccaaggccgcggaattgtaaattttgaaagagacaaaattagtaaccattggatccaatactacagacgcatacctcacaggaaactcctcactgcactacaactcagggccaacgtttaccccacgagagaatttctagccaggggtagacaagaccaatacatcaaggcgtgtaggcactgcgatgcggacaacgaatcctgcgcccacatcatcggcaactgcccagtgacacaggacgcccgaatcaagaggcacaattacatctgcgaactgcttctcgaggaggcgaagaagaaggactgggtagtgttcaaggaaccgcacataagggattccaacaaggaactgtacaaacctgacctgatatttgtgaaggatgggcgtgcacttgtcgtggatgtgacagtacggtatgaagcagccaaatcatcgctggaggaagccgctgcagagaaagtgagaaagtacaaacacctggaaacggaagtaagacatctcacgaatgcaaaggacgttacttttgtgggctttcccctaggagcgcgggggaaatggcaccaagataactttaaacttttgactgagcttggcctctccaaatcgaggcaagtgaaaatggcagagactttttccacagtagcgctcttttcatctgtggacattgtacatatgtttgccagtagggccagaaaatctatggttatgtgataataggctgccttctgcggggcttgccttctggccatgcccttcttctctcccttgcacctgtacctcttggtctttgaataaagcctgagtaggaaggaccggtaaaaaaaaaaaaaaaaaaaaaaaaaaaaaaacgttgactaaaaaaaaaaaaaaaaaaaaaaaaaaaaaaaaaaaaaaaaaaaaaaaaaaaaaaaaaaaaaaaaaaaaaa

SEQ ID NO: 10651 - DNA, 5264 bp, synthetic construct
  source 1..5264: mol_type = other DNA
gaaataagagagaaaagaagagtaagaagaaatataagagaattcgccaccatggcccctaagaaaaagcggaaggtgaatatcagcggctctagctgcggcagccccaacagcgccgacaccagcagcgacttcaaggacctgtggaccaagctgaaggaatgccacgaccgggaagtgcagggactccaggtgaaggtcaccaaactcaagcaagaaagaatcctggacgcccagagactggaagaattcttcaccaagaaccagcagctgagagagcagcagaaagtgctgcacgagacaatcaaggttctggaagatagactgcgggccggcctgtgcgacagatgcgccgtgaccgaggaacacatgcgcaaaaagcagcaggagttcgagaacattagacagcaaaatctgaaattgatcacagagctgatgaacgagagaaacacactgcaggaggagaacaagaagctgagcgagcagctgcaacagaagatcgagaatgatcagcaacaccaggccgctgagctggaatgtgaagaggacgtgatccccgacagcccaatcacagctttcagcttttctggcgtgaacagactgaggcggaaggaaaacccccacgtgcggtacatcgagcagacccataccaagctggaacacagcgtgtgtgccaacgagatgagaaaggtgtccaagtcctccacccatccccagcacaaccctaacgaaaatgagatcctggtggctgatacctacgaccagtctcagagccctatggccaaggcccacggcaccagctcttatacccctgataagagctccttcaacctggccaccgtggtggccgagacactgggcctgggcgtgcaggaggaaagcgagacacagggcccaatgagccctctgggagatgagctgtaccactgcctggaaggcaaccacaagaaacagccttttgagtccggctccgagactcctggaacaagcgagagcgctacacctgagggcagccctaagagaaaggtgtccagcgccgagggcgctgccaaggaagagcctaaacggagaagcgccagactgagcgccaagccccccgccaaggtggaagccaagcctaagaaggccgccgctaaggacaagagcagcgataagaaagtccagaccaagggcaagcggggcgccaaaggcaaacaggccgaggtggccaaccaggagacaaaggaagatctgcctgctgagaacggcgaaaccaagaccgaggaatctccagcttctgacgaggccggagagaaggaggccaaaagcgacagcggctctgagacacctggaacaagcgagagcgccaccccggaatcctatgaacaacttgcaccacaaccgtgtgtgggagaaactttacattctagcctcccacgagacagtgaactgtttgtgcctgaagaggggagcagcgagaaggagagcgaggacgcgccaaaaacatctcctccgacgcctgggaaacatggtttggaacagactggggaggaaaaagtgatggtgactgttccttggaaaaatccaccttgtccttgctgtggtacccgggtaaactctgtgttgaatctgattgaacatctgaaagtgtcacacgggaaaaggggggtttgttttcggtgtgcaaaatgtggaaaggaaaatagtaactatcacagtgttgtttgtcattttaagaaatgcaggggtccagagacggagaaagccccagctggggagtggatttgtgaggtatgcaacagagattttacaaccaaaattggcctgggacaacacaagagattggcacacccagcagtgagaaatcaggaaaggatcgttgcttcccaaccgaaagaaacatcaaatagaggtgctcacaaaaggtgctggacaaaggaggaggaagaattactaataagactggaggctcagttcgagggaaacaaaaatattaataagcttattgcagaacacataaccaccaaaacagctaagcagatcagtgacaaaaggcgattgctgtccagaaagccagcagaggagccacgtgaggagcctggaacgtgtcatcacaccaggagagcagctgcgagcctgagaacggagcctgagatgagtcatcacgcccaggcagaggacagagataatggacctgggagacgccctctgccaggcagggcagctgccggagggagaacaatggacgagataagacgccaccctgataagggcaacggacagcagagacccaccaagcaaaaatcagaagaacagctgcaggcttactataaaaagacactagaggaacgactttcagctggggcacttaacaccttcccccgagcattcaagcaggtaatggaaggccgggatataaagctagtaatcaatcagacagcgcaggactgcttcggatgcctggaatccataagccaaataagaacggcaacccgagataaaaaggacacggtgacccgggagaaacacccaaagaaaccttttcagaagtggatgaagaagagagcaatcaaaaaaggtaattatcttcggttccagcgtttattttatcttgatagagggaaactggctaaaatcattttagatgatattgaatgcttgtcttgtgacataccactcagtgaaatttattcggtttttaaaacaagatgggaaacaactggtagctttaaaagccttggggactttaaaacttacgggaaggctgacaacactgccttcagagaattaattacggctaaagaaattgagaaaaatgtgcaggaaatgagcaaaggctcggctcccggtccagacgggattactcttggggacgtcgtaaagatggatcccgagttttcccggaccatggagattttcaatttatggttaacaactggtaaaatcccggacatggtgagggggtgcagaaccgttttgattccaaaatcatcaaagccggatcgtttgaaagacattaataactggagacctatcacgatcggttccatcttgctgagactgttctccaggattgtaacagctaggctgagcaaagcgtgccccctgaacccaaggcaaagaggctttatcagagcggcgggatgctctgaaaacttaaaactcctgcaaactataatttggtcggccaaaagagaacacagaccactgggtgttgtattcgtggacatcgccaaggcttttgacaccgtaagccaccagcacatcattcatgctttgcagcaaagagaggtggatccccacatcgtcggtctggtgagcaatatgtacgagaacatcagtacgtatatcaccacaaagaggaacacacacacagacaaaatccagatccgggttggagtaaagcagggtgacccgatgtcgccccttttatttaacctggcaatggaccctctattatgcaagctggaagagagtggcaaaggataccaccgaggacagagcagcatcacagcgatggcatttgcagacgatctggttttgctgagcgactcctgggaaaatatgaatacaaatattagcatactggagaccttctgcaatctgaccggactcaaaacacaggggcaaaagtgccacggcttttacatcaagccgacaaaggactcttacaccatcaatgactgcgctgcctggactatcaacggcacacccctgaacatgatcgaccccggcgaatctgagaaatacctcggcctgcagtttgacccgtggattggaatagcaaggtccggtctctccacaaaactagatttttggcttcagcggatcgatcaagcaccacttaaacctctgcagaaaactgatattctcaaaacatacaccatccctcggctgatctacatagctgaccactcagaagtgaaaagcgcactactcgaaacccttgaccagaagatccggacagcggtcaaggaatggcttcacctacctccgtgcacctgcgatgccatcctgtactcgagcacgagagacggcggtttgggcatcaccaaattggcaggactgatccccagcgtgcaggcccgtagactgcatcggatcgcacagtcatctgacgatacgatgaaatgcttcatggaaaaagagaaaatggaacagctgcataagaaattgtggattcaagctggaggggacagagagaacataccctcgatttgggaagcaccaccgtcgagtgaaccaccaaacaacgtgagcacaaattcggaatgggaagcaccgacccagaaagataaatttccaaagccttgcaattggaggaaaaacgaattcaaaaaatggaccaaattggcatcccaaggccgcggaattgtaaattttgaaagagacaaaattagtaaccattggatccaatactacagacgcatacctcacaggaaactcctcactgcactacaactcagggccaacgtttaccccacgagagaatttctagccaggggtagacaagaccaatacatcaaggcgtgtaggcactgcgatgcggacaacgaatcctgcgcccacatcatcggcaactgcccagtgacacaggacgcccgaatcaagaggcacaattacatctgcgaactgcttctcgaggaggcgaagaagaaggactgggtagtgttcaaggaaccgcacataagggattccaacaaggaactgtacaaacctgacctgatatttgtgaaggatgggcgtgcacttgtcgtggatgtgacagtacggtatgaagcagccaaatcatcgctggaggaagccgctgcagagaaagtgagaaagtacaaacacctggaaacggaagtaagacatctcacgaatgcaaaggacgttacttttgtgggctttcccctaggagcgcgggggaaatggcaccaagataactttaaacttttgactgagcttggcctctccaaatcgaggcaagtgaaaatggcagagactttttccacagtagcgctcttttcatctgtggacattgtacatatgtttgccagtagggccagaaaatctatggttatgtgataataggctgccttctgcggggcttgccttctggccatgcccttcttctctcccttgcacctgtacctcttggtctttgaataaagcctgagtaggaaggaccggtaaaaaaaaaaaaaaaaaaaaaaaaaaaaaaacgttgactaaaaaaaaaaaaaaaaaaaaaaaaaaaaaaaaaaaaaaaaaaaaaaaaaaaaaaaaaaaaaaaaaaaaaa

SEQ ID NO: 10652 - DNA, 5264 bp, synthetic construct
  source 1..5264: mol_type = other DNA
gaaataagagagaaaagaagagtaagaagaaatataagagaattcgccaccatggcccctaagaaaaagcggaaggtgaatatcagcggctctagctgcggcagccccaacagcgccgacaccagcagcgacttcaaggacctgtggaccaagctgaaggaatgccacgaccgggaagtgcagggactccaggtgaaggtcaccaaactcaagcaagaaagaatcctggacgcccagagactggaagaattcttcaccaagaaccagcagctgagagagcagcagaaagtgctgcacgagacaatcaaggttctggaagatagactgcgggccggcctgtgcgacagatgcgccgtgaccgaggaacacatgcgcaaaaagcagcaggagttcgagaacattagacagcaaaatctgaaattgatcacagagctgatgaacgagagaaacacactgcaggaggagaacaagaagctgagcgagcagctgcaacagaagatcgagaatgatcagcaacaccaggccgctgagctggaatgtgaagaggacgtgatccccgacagcccaatcacagctttcagcttttctggcgtgaacagactgaggcggaaggaaaacccccacgtgcggtacatcgagcagacccataccaagctggaacacagcgtgtgtgccaacgagatgagaaaggtgtccaagtcctccacccatccccagcacaaccctaacgaaaatgagatcctggtggctgatacctacgaccagtctcagagccctatggccaaggcccacggcaccagctcttatacccctgataagagctccttcaacctggccaccgtggtggccgagacactgggcctgggcgtgcaggaggaaagcgagacacagggcccaatgagccctctgggagatgagctgtaccactgcctggaaggcaaccacaagaaacagccttttgagtccggctccgagactcctggaacaagcgagagcgctacacctgagggcagccctaagagaaaggtgtccagcgccgagggcgctgccaaggaagagcctaaacggagaagcgccagactgagcgccaagccccccgccaaggtggaagccaagcctaagaaggccgccgctaaggacaagagcagcgataagaaagtccagaccaagggcaagcggggcgccaaaggcaaacaggccgaggtggccaaccaggagacaaaggaagatctgcctgctgagaacggcgaaaccaagaccgaggaatctccagcttctgacgaggccggagagaaggaggccaaaagcgacagcggctctgagacacctggaacaagcgagagcgccaccccggaatcctatgaacaacttgcaccacaaccgtgtgtgggagaaactttacattctagcctcccacgagacagtgaactgtttgtgcctgaagaggggagcagcgagaaggagagcgaggacgcgccaaaaacatctcctccgacgcctgggaaacatggtttggaacagactggggaggaaaaagtgatggtgactgttcctgacaaaaatccaccttgtccttgctgtggtacccgggtaaactctgtgttgaatctgattgaacatctgaaagtgtcacacgggaaaaggggggtttgttttcggtgtgcaaaatgtggaaaggaaaatagtaactatcacagtgttgtttgtcattttaagaaatgcaggggtccagagacggagaaagccccagctggggagtggatttgtgaggtatgcaacagagattttacaaccaaaattggcctgggacaacacaagagattggcacacccagcagtgagaaatcaggaaaggatcgttgcttcccaaccgaaagaaacatcaaatagaggtgctcacaaaagggtctggacaaaggaggaggaagaattactaataagactggaggctcagttcgagggaaacaaaaatattaataagcttattgcagaacacataaccaccaaaacagctaagcagatcagtgacaaaaggcgattgctgtccagaaagccagcagaggagccacgtgaggagcctggaacgtgtcatcacaccaggagagcagctgcgagcctgagaacggagcctgagatgagtcatcacgcccaggcagaggacagagataatggacctgggagacgccctctgccaggcagggcagctgccggagggagaacaatggacgagataagacgccaccctgataagggcaacggacagcagagacccaccaagcaaaaatcagaagaacagctgcaggcttactataaaaagacactagaggaacgactttcagctggggcacttaacaccttcccccgagcattcaagcaggtaatggaaggccgggatataaagctagtaatcaatcagacagcgcaggactgcttcggatgcctggaatccataagccaaataagaacggcaacccgagataaaaaggacacggtgacccgggagaaacacccaaagaaaccttttcagaagtggatgaagaagagagcaatcaaaaaaggtaattatcttcggttccagcgtttattttatcttgatagagggaaactggctaaaatcattttagatgatattgaatgcttgtcttgtgacataccactcagtgaaatttattcggtttttaaaacaagatgggaaacaactggtagctttaaaagccttggggactttaaaacttacgggaaggctgacaacactgccttcagagaattaattacggctaaagaaattgagaaaaatgtgcaggaaatgagcaaaggctcggctcccggtccagacgggattactcttggggacgtcgtaaagatggatcccgagttttcccggaccatggagattttcaatttatggttaacaactggtaaaatcccggacatggtgagggggtgcagaaccgttttgattccaaaatcatcaaagccggatcgtttgaaagacattaataactggagacctatcacgatcggttccatcttgctgagactgttctccaggattgtaacagctaggctgagcaaagcgtgccccctgaacccaaggcaaagaggctttatcagagcggcgggatgctctgaaaacttaaaactcctgcaaactataatttggtcggccaaaagagaacacagaccactgggtgttgtattcgtggacatcgccaaggcttttgacaccgtaagccaccagcacatcattcatgctttgcagcaaagagaggtggatccccacatcgtcggtctggtgagcaatatgtacgagaacatcagtacgtatatcaccacaaagaggaacacacacacagacaaaatccagatccgggttggagtaaagcagggtgacccgatgtcgccccttttatttaacctggcaatggaccctctattatgcaagctggaagagagtggcaaaggataccaccgaggacagagcagcatcacagcgatggcatttgcagacgatctggttttgctgagcgactcctgggaaaatatgaatacaaatattagcatactggagaccttctgcaatctgaccggactcaaaacacaggggcaaaagtgccacggcttttacatcaagccgacaaaggactcttacaccatcaatgactgcgctgcctggactatcaacggcacacccctgaacatgatcgaccccggcgaatctgagaaatacctcggcctgcagtttgacccgtggattggaatagcaaggtccggtctctccacaaaactagatttttggcttcagcggatcgatcaagcaccacttaaacctctgcagaaaactgatattctcaaaacatacaccatccctcggctgatctacatagctgaccactcagaagtgaaaagcgcactactcgaaacccttgaccagaagatccggacagcggtcaaggaatggcttcacctacctccgtgcacctgcgatgccatcctgtactcgagcacgagagacggcggtttgggcatcaccaaattggcaggactgatccccagcgtgcaggcccgtagactgcatcggatcgcacagtcatctgacgatacgatgaaatgcttcatggaaaaagagaaaatggaacagctgcataagaaattgtggattcaagctggaggggacagagagaacataccctcgatttgggaagcaccaccgtcgagtgaaccaccaaacaacgtgagcacaaattcggaatgggaagcaccgacccagaaagataaatttccaaagccttgcaattggaggaaaaacgaattcaaaaaatggaccaaattggcatcccaaggccgcggaattgtaaattttgaaagagacaaaattagtaaccattggatccaatactacagacgcatacctcacaggaaactcctcactgcactacaactcagggccaacgtttaccccacgagagaatttctagccaggggtagacaagaccaatacatcaaggcgtgtaggcactgcgatgcggacaacgaatcctgcgcccacatcatcggcaactgcccagtgacacaggacgcccgaatcaagaggcacaattacatctgcgaactgcttctcgaggaggcgaagaagaaggactgggtagtgttcaaggaaccgcacataagggattccaacaaggaactgtacaaacctgacctgatatttgtgaaggatgggcgtgcacttgtcgtggatgtgacagtacggtatgaagcagccaaatcatcgctggaggaagccgctgcagagaaagtgagaaagtacaaacacctggaaacggaagtaagacatctcacgaatgcaaaggacgttacttttgtgggctttcccctaggagcgcgggggaaatggcaccaagataactttaaacttttgactgagcttggcctctccaaatcgaggcaagtgaaaatggcagagactttttccacagtagcgctcttttcatctgtggacattgtacatatgtttgccagtagggccagaaaatctatggttatgtgataataggctgccttctgcggggcttgccttctggccatgcccttcttctctcccttgcacctgtacctcttggtctttgaataaagcctgagtaggaaggaccggtaaaaaaaaaaaaaaaaaaaaaaaaaaaaaaacgttgactaaaaaaaaaaaaaaaaaaaaaaaaaaaaaaaaaaaaaaaaaaaaaaaaaaaaaaaaaaaaaaaaaaaaaa

SEQ ID NO: 10653 - DNA, 5264 bp, synthetic construct
  source 1..5264: mol_type = other DNA
gaaataagagagaaaagaagagtaagaagaaatataagagaattcgccaccatggcccctaagaaaaagcggaaggtgaatatcagcggctctagctgcggcagccccaacagcgccgacaccagcagcgacttcaaggacctgtggaccaagctgaaggaatgccacgaccgggaagtgcagggactccaggtgaaggtcaccaaactcaagcaagaaagaatcctggacgcccagagactggaagaattcttcaccaagaaccagcagctgagagagcagcagaaagtgctgcacgagacaatcaaggttctggaagatagactgcgggccggcctgtgcgacagatgcgccgtgaccgaggaacacatgcgcaaaaagcagcaggagttcgagaacattagacagcaaaatctgaaattgatcacagagctgatgaacgagagaaacacactgcaggaggagaacaagaagctgagcgagcagctgcaacagaagatcgagaatgatcagcaacaccaggccgctgagctggaatgtgaagaggacgtgatccccgacagcccaatcacagctttcagcttttctggcgtgaacagactgaggcggaaggaaaacccccacgtgcggtacatcgagcagacccataccaagctggaacacagcgtgtgtgccaacgagatgagaaaggtgtccaagtcctccacccatccccagcacaaccctaacgaaaatgagatcctggtggctgatacctacgaccagtctcagagccctatggccaaggcccacggcaccagctcttatacccctgataagagctccttcaacctggccaccgtggtggccgagacactgggcctgggcgtgcaggaggaaagcgagacacagggcccaatgagccctctgggagatgagctgtaccactgcctggaaggcaaccacaagaaacagccttttgagtccggctccgagactcctggaacaagcgagagcgctacacctgagggcagccctaagagaaaggtgtccagcgccgagggcgctgccaaggaagagcctaaacggagaagcgccagactgagcgccaagccccccgccaaggtggaagccaagcctaagaaggccgccgctaaggacaagagcagcgataagaaagtccagaccaagggcaagcggggcgccaaaggcaaacaggccgaggtggccaaccaggagacaaaggaagatctgcctgctgagaacggcgaaaccaagaccgaggaatctccagcttctgacgaggccggagagaaggaggccaaaagcgacagcggctctgagacacctggaacaagcgagagcgccaccccggaatcctatgaacaacttgcaccacaaccgtgtgtgggagaaactttacattctagcctcccacgagacagtgaactgtttgtgcctgaagaggggagcagcgagaaggagagcgaggacgcgccaaaaacatctcctccgacgcctgggaaacatggtttggaacagactggggaggaaaaagtgatggtgactgttcctgacaaaaatccaccttgtccttgctgtggtacccgggtaaactctgtgttgaatctgattgaacatctgaaagtgtcacacgggaaaaggggggtttgttttcggtgtgcaaaatgtggaaaggaaaatagtaactatcacagtgttgtttgtcattttaagaaatgcaggggtccagagacggagaaagccccagctggggagtggatttgtgaggtatgcaacagagattttacaaccaaaattggcctgggacaacacaagagattggcacacccagcagtgagaaatcaggaaaggatcgttgcttcccaaccgaaagaaacatcaaatagaggtgctcacaaaaggtgctggacaaaggaggaggaagaattactaataagactggaggctcagttcgagggaaacaaaaatattaataagcttattgcagaacacataaccaccaaaacagctaagcagatcagtgacaaaaggcgattgctgtccagaaagccagcagaggagccacgtgaggagcctggaacgtgtcatcacaccaggagagcagctgcgagcctgagaacggagcctgagatgagtcatcacgcccaggcagaggacagagataatggacctgggagacgccctctgccaggcagggcagctgccggagggagaacaatggacgagataagacgccaccctgataagggcaacggacagcagagacccaccaagcaaaaatcagaagaacagctgcaggcttactataaaaagacactagaggaacgactttcagctggggcacttaacaccttcccccgagcattcaagcaggtaatggaaggccgggatataaagctagtaatcaatcagacagcgcaggactgcttcggatgcctggaatccataagccaaataagaacggcaacccgagataaaaaggacacggtgacccgggagaaacacccaaagaaaccttttcagaagtggatgaagaagagagcaatcaaaaaaggtaattatcttcggttccagcgtttattttatcttgatagagggaaactggctaaaatcattttagatgatattgaatgcttgtcttgtgacataccactcagtgaaatttattcggtttttaaaacaagatgggaaacaactggtagctttaaaagccttggggactttaaaacttacgggaaggctgacaacactgccttcagagaattaattacggctaaagaaattgagaaaaatgtgcaggaaatgagcaaaggctcggctcccggtccagacgggattactcttggggacgtcgtaaagatggatcccgagttttccgtgaccatggagattttcaatttatggttaacaactggtaaaatcccggacatggtgagggggtgcagaaccgttttgattccaaaatcatcaaagccggatcgtttgaaagacattaataactggagacctatcacgatcggttccatcttgctgagactgttctccaggattgtaacagctaggctgagcaaagcgtgccccctgaacccaaggcaaagaggctttatcagagcggcgggatgctctgaaaacttaaaactcctgcaaactataatttggtcggccaaaagagaacacagaccactgggtgttgtattcgtggacatcgccaaggcttttgacaccgtaagccaccagcacatcattcatgctttgcagcaaagagaggtggatccccacatcgtcggtctggtgagcaatatgtacgagaacatcagtacgtatatcaccacaaagaggaacacacacacagacaaaatccagatccgggttggagtaaagcagggtgacccgatgtcgccccttttatttaacctggcaatggaccctctattatgcaagctggaagagagtggcaaaggataccaccgaggacagagcagcatcacagcgatggcatttgcagacgatctggttttgctgagcgactcctgggaaaatatgaatacaaatattagcatactggagaccttctgcaatctgaccggactcaaaacacaggggcaaaagtgccacggcttttacatcaagccgacaaaggactcttacaccatcaatgactgcgctgcctggactatcaacggcacacccctgaacatgatcgaccccggcgaatctgagaaatacctcggcctgcagtttgacccgtggattggaatagcaaggtccggtctctccacaaaactagatttttggcttcagcggatcgatcaagcaccacttaaacctctgcagaaaactgatattctcaaaacatacaccatccctcggctgatctacatagctgaccactcagaagtgaaaagcgcactactcgaaacccttgaccagaagatccggacagcggtcaaggaatggcttcacctacctccgtgcacctgcgatgccatcctgtactcgagcacgagagacggcggtttgggcatcaccaaattggcaggactgatccccagcgtgcaggcccgtagactgcatcggatcgcacagtcatctgacgatacgatgaaatgcttcatggaaaaagagaaaatggaacagctgcataagaaattgtggattcaagctggaggggacagagagaacataccctcgatttgggaagcaccaccgtcgagtgaaccaccaaacaacgtgagcacaaattcggaatgggaagcaccgacccagaaagataaatttccaaagccttgcaattggaggaaaaacgaattcaaaaaatggaccaaattggcatcccaaggccgcggaattgtaaattttgaaagagacaaaattagtaaccattggatccaatactacagacgcatacctcacaggaaactcctcactgcactacaactcagggccaacgtttaccccacgagagaatttctagccaggggtagacaagaccaatacatcaaggcgtgtaggcactgcgatgcggacaacgaatcctgcgcccacatcatcggcaactgcccagtgacacaggacgcccgaatcaagaggcacaattacatctgcgaactgcttctcgaggaggcgaagaagaaggactgggtagtgttcaaggaaccgcacataagggattccaacaaggaactgtacaaacctgacctgatatttgtgaaggatgggcgtgcacttgtcgtggatgtgacagtacggtatgaagcagccaaatcatcgctggaggaagccgctgcagagaaagtgagaaagtacaaacacctggaaacggaagtaagacatctcacgaatgcaaaggacgttacttttgtgggctttcccctaggagcgcgggggaaatggcaccaagataactttaaacttttgactgagcttggcctctccaaatcgaggcaagtgaaaatggcagagactttttccacagtagcgctcttttcatctgtggacattgtacatatgtttgccagtagggccagaaaatctatggttatgtgataataggctgccttctgcggggcttgccttctggccatgcccttcttctctcccttgcacctgtacctcttggtctttgaataaagcctgagtaggaaggaccggtaaaaaaaaaaaaaaaaaaaaaaaaaaaaaaacgttgactaaaaaaaaaaaaaaaaaaaaaaaaaaaaaaaaaaaaaaaaaaaaaaaaaaaaaaaaaaaaaaaaaaaaaa

SEQ ID NO: 10654 - DNA, 5264 bp, synthetic construct
  source 1..5264: mol_type = other DNA
gaaataagagagaaaagaagagtaagaagaaatataagagaattcgccaccatggcccctaagaaaaagcggaaggtgaatatcagcggctctagctgcggcagccccaacagcgccgacaccagcagcgacttcaaggacctgtggaccaagctgaaggaatgccacgaccgggaagtgcagggactccaggtgaaggtcaccaaactcaagcaagaaagaatcctggacgcccagagactggaagaattcttcaccaagaaccagcagctgagagagcagcagaaagtgctgcacgagacaatcaaggttctggaagatagactgcgggccggcctgtgcgacagatgcgccgtgaccgaggaacacatgcgcaaaaagcagcaggagttcgagaacattagacagcaaaatctgaaattgatcacagagctgatgaacgagagaaacacactgcaggaggagaacaagaagctgagcgagcagctgcaacagaagatcgagaatgatcagcaacaccaggccgctgagctggaatgtgaagaggacgtgatccccgacagcccaatcacagctttcagcttttctggcgtgaacagactgaggcggaaggaaaacccccacgtgcggtacatcgagcagacccataccaagctggaacacagcgtgtgtgccaacgagatgagaaaggtgtccaagtcctccacccatccccagcacaaccctaacgaaaatgagatcctggtggctgatacctacgaccagtctcagagccctatggccaaggcccacggcaccagctcttatacccctgataagagctccttcaacctggccaccgtggtggccgagacactgggcctgggcgtgcaggaggaaagcgagacacagggcccaatgagccctctgggagatgagctgtaccactgcctggaaggcaaccacaagaaacagccttttgagtccggctccgagactcctggaacaagcgagagcgctacacctgagggcagccctaagagaaaggtgtccagcgccgagggcgctgccaaggaagagcctaaacggagaagcgccagactgagcgccaagccccccgccaaggtggaagccaagcctaagaaggccgccgctaaggacaagagcagcgataagaaagtccagaccaagggcaagcggggcgccaaaggcaaacaggccgaggtggccaaccaggagacaaaggaagatctgcctgctgagaacggcgaaaccaagaccgaggaatctccagcttctgacgaggccggagagaaggaggccaaaagcgacagcggctctgagacacctggaacaagcgagagcgccaccccggaatcctatgaacaacttgcaccacaaccgtgtgtgggagaaactttacattctagcctcccacgagacagtgaactgtttgtgcctgaagaggggagcagcgagaaggagagcgaggacgcgccaaaaacatctcctccgacgcctgggaaacatggtttggaacagactggggaggaaaaagtgatggtgactgttcctgacaaaaatccaccttgtccttgctgtggtacccgggtaaactctgtgttgaatctgattgaacatctgaaagtgtcacacgggaaaaggggggtttgttttcggtgtgcaaaatgtggaaaggaaaatagtaactatcacagtgttgtttgtcattttaagaaatgcaggggtccagagacggagaaagccccagctggggagtggatttgtgaggtatgcaacagagattttacaaccaaaattggcctgggacaacacaagagattggcacacccagcagtgagaaatcaggaaaggatcgttgcttcccaaccgaaagaaacatcaaatagaggtgctcacaaaaggtgctggacaaaggaggaggaagaattactaataagactggaggctcagttcgagggaaacaaaaatattaataagcttattgcagaacacataaccaccaaaacagctaagcagatcagtgacaaaaggcgattgctgtccagaaagccagcagaggagccacgtgaggagcctggaacgtgtcatcacaccaggagagcagctgcgagcctgagaacggagcctgagatgagtcatcacgcccaggcagaggacagagataatggacctgggagacgccctctgccaggcagggcagctgccggagggagaacaatggacgagataagacgccaccctgataagggcaacggacagcagagacccaccaagcaaaaatcagaagaacagctgcaggcttactataaaaagacactagaggaacgactttcagctggggcacttaacaccttcccccgagcattcaagcaggtaatggaaggccgggatataaagctagtaatcaatcagacagcgcaggactgcttcggatgcctggaatccataagccaaataagaacggcaacccgagataaaaaggacacggtgacccgggagaaacacccaaagaaaccttttcagaagtggatgaagaagagagcaatcaaaaaaggtaattatcttcggttccagcgtttattttatcttgatagagggaaactggctaaaatcattttagatgatattgaatgcttgtcttgtgacataccactcagtgaaatttattcggtttttaaaacaagatgggaaacaactggtagctttaaaagccttggggactttaaaacttacgggaaggctgacaacactgccttcagagaattaattacggctaaagaaattgagaaaaatgtgcaggaaatgagcaaaggctcggctcccggtccagacgggattactcttggggacgtcgtaaagatggatcccgagttttcccggaccatggagattttcaatttatggttaacaactggtaaaatcccggacatggtgagggggtgcagaaccgttttgattccaaaatcatcaaagccggatcgtttgaaagacattaataactggagacctatcacgatcggttccatcttgctgagactgttctccaggattgtaacagctaggctgagcaaagcgtgccccctgaacccaaggcaaagaggctttatcagagcggcgggatgctctgaaaacttaaaactcctgcaaactataatttggtcggccaaaagagaacacagaccactgggtgttgtattcgtggacatcgccaaggcttttgacaccgtaagccaccagcacatcattcatgctttgcagcaaagagaggtggatccccacatcgtcggtctggtgagcaatatgtacgagaacatcagtacgtatatcaccacaaagaggaacacacacacagacaaaatccagatccgggttggagtaaagcagggtgacccgatgtcgccccttttatttaacctggcaatggaccctctattatgcaagctggaagagagtggcaaaggataccaccgaggacagagcagcatcacagcgatggcatttgcagacgatctggttttgctgagcgactcctgggaaaatatgaatacaaatattagcatactggagaccttctgcaatctgaccggactcaaaacacaggggcaaaagtgccacggcttttacatcaagccgacaaaggactcttacaccatcaatgactgcgctgcctggactatcaacggcacacccctgaacatgatcgaccccggcgaatctgagaaatacctcggcctgcagtttgacccgtggattggaatagcaaggtccggtctctccacaaaactagatttttggcttcagcggatcgatcaagcaccacttaaacctctgcagaaagttgatattctcaaaacatacaccatccctcggctgatctacatagctgaccactcagaagtgaaaagcgcactactcgaaacccttgaccagaagatccggacagcggtcaaggaatggcttcacctacctccgtgcacctgcgatgccatcctgtactcgagcacgagagacggcggtttgggcatcaccaaattggcaggactgatccccagcgtgcaggcccgtagactgcatcggatcgcacagtcatctgacgatacgatgaaatgcttcatggaaaaagagaaaatggaacagctgcataagaaattgtggattcaagctggaggggacagagagaacataccctcgatttgggaagcaccaccgtcgagtgaaccaccaaacaacgtgagcacaaattcggaatgggaagcaccgacccagaaagataaatttccaaagccttgcaattggaggaaaaacgaattcaaaaaatggaccaaattggcatcccaaggccgcggaattgtaaattttgaaagagacaaaattagtaaccattggatccaatactacagacgcatacctcacaggaaactcctcactgcactacaactcagggccaacgtttaccccacgagagaatttctagccaggggtagacaagaccaatacatcaaggcgtgtaggcactgcgatgcggacaacgaatcctgcgcccacatcatcggcaactgcccagtgacacaggacgcccgaatcaagaggcacaattacatctgcgaactgcttctcgaggaggcgaagaagaaggactgggtagtgttcaaggaaccgcacataagggattccaacaaggaactgtacaaacctgacctgatatttgtgaaggatgggcgtgcacttgtcgtggatgtgacagtacggtatgaagcagccaaatcatcgctggaggaagccgctgcagagaaagtgagaaagtacaaacacctggaaacggaagtaagacatctcacgaatgcaaaggacgttacttttgtgggctttcccctaggagcgcgggggaaatggcaccaagataactttaaacttttgactgagcttggcctctccaaatcgaggcaagtgaaaatggcagagactttttccacagtagcgctcttttcatctgtggacattgtacatatgtttgccagtagggccagaaaatctatggttatgtgataataggctgccttctgcggggcttgccttctggccatgcccttcttctctcccttgcacctgtacctcttggtctttgaataaagcctgagtaggaaggaccggtaaaaaaaaaaaaaaaaaaaaaaaaaaaaaaacgttgactaaaaaaaaaaaaaaaaaaaaaaaaaaaaaaaaaaaaaaaaaaaaaaaaaaaaaaaaaaaaaaaaaaaaaa

SEQ ID NO: 10655 - DNA, 5264 bp, synthetic construct
  source 1..5264: mol_type = other DNA
gaaataagagagaaaagaagagtaagaagaaatataagagaattcgccaccatggcccctaagaaaaagcggaaggtgaatatcagcggctctagctgcggcagccccaacagcgccgacaccagcagcgacttcaaggacctgtggaccaagctgaaggaatgccacgaccgggaagtgcagggactccaggtgaaggtcaccaaactcaagcaagaaagaatcctggacgcccagagactggaagaattcttcaccaagaaccagcagctgagagagcagcagaaagtgctgcacgagacaatcaaggttctggaagatagactgcgggccggcctgtgcgacagatgcgccgtgaccgaggaacacatgcgcaaaaagcagcaggagttcgagaacattagacagcaaaatctgaaattgatcacagagctgatgaacgagagaaacacactgcaggaggagaacaagaagctgagcgagcagctgcaacagaagatcgagaatgatcagcaacaccaggccgctgagctggaatgtgaagaggacgtgatccccgacagcccaatcacagctttcagcttttctggcgtgaacagactgaggcggaaggaaaacccccacgtgcggtacatcgagcagacccataccaagctggaacacagcgtgtgtgccaacgagatgagaaaggtgtccaagtcctccacccatccccagcacaaccctaacgaaaatgagatcctggtggctgatacctacgaccagtctcagagccctatggccaaggcccacggcaccagctcttatacccctgataagagctccttcaacctggccaccgtggtggccgagacactgggcctgggcgtgcaggaggaaagcgagacacagggcccaatgagccctctgggagatgagctgtaccactgcctggaaggcaaccacaagaaacagccttttgagtccggctccgagactcctggaacaagcgagagcgctacacctgagggcagccctaagagaaaggtgtccagcgccgagggcgctgccaaggaagagcctaaacggagaagcgccagactgagcgccaagccccccgccaaggtggaagccaagcctaagaaggccgccgctaaggacaagagcagcgataagaaagtccagaccaagggcaagcggggcgccaaaggcaaacaggccgaggtggccaaccaggagacaaaggaagatctgcctgctgagaacggcgaaaccaagaccgaggaatctccagcttctgacgaggccggagagaaggaggccaaaagcgacagcggctctgagacacctggaacaagcgagagcgccaccccggaatcctatgaacaacttgcaccacaaccgtgtgtgggagaaactttacattctagcctcccacgagacagtgaactgtttgtgcctgaagaggggagcagcgagaaggagagcgaggacgcgccaaaaacatctcctccgacgcctgggaaacatggtttggaacagactggggaggaaaaagtgatggtgactgttcctgacaaaaatccaccttgtccttgctgtggtacccgggtaaactctgtgttgaatctgattgaacatctgaaagtgtcacacgggaaaaggggggtttgttttcggtgtgcaaaatgtggaaaggaaaatagtaactatcacagtgttgtttgtcattttaagaaatgcaggggtccagagacggagaaagccccagctggggagtggatttgtgaggtatgcaacagagattttacaaccaaaattggcctgggacaacacaagagattggcacacccagcagtgagaaatcaggaaaggatcgttgcttcccaaccgaaagaaacatcaaatagaggtgctcacaaaaggtgctggacaaaggaggaggaagaattactaataagactggaggctcagttcgagggaaacaaaaatattaataagcttattgcagaacacataaccaccaaaacagctaagcagatcagtgacaaaaggcgattgctgtccagaaagccagcagaggagccacgtgaggagcctggaacgtgtcatcacaccaggagagcagctgcgagcctgagaacggagcctgagatgagtcatcacgcccaggcagaggacagagataatggacctgggagacgccctctgccaggcagggcagctgccggagggagaacaatggacgagataagacgccaccctgataagggcaacggacagcagagacccaccaagcaaaaatcagaagaacagctgcaggcttactataaaaagacactagaggaacgactttcagctggggcacttaacaccttcccccgagcattcaagcaggtaatggaaggccgggatataaagctagtaatcaatcagacagcgcaggactgcttcggatgcctggaatccataagccaaataagaacggcaacccgagataaaaaggacacggtgacccgggagaaacacccaaagaaaccttttcagaagtggatgaagaagagagcaatcaaaaaaggtaattatcttcggttccagcgtttattttatcttgatagagggaaactggctaaaatcattttagatgatattgaatgcttgtcttgtgacataccactcagtgaaatttattcggtttttaaaacaagatgggaaacaactggtagctttaaaagccttggggactttaaaacttacgggaaggctgacaacactgccttcagagaattaattacggctaaagaaattgagaaaaatgtgcaggaaatgagcaaaggctcggctcccggtccagacgggattactcttggggacgtcgtaaagatggatcccgagttttcccggaccatggagattttcaatttatggttaacaactggtaaaatcccggacatggtgagggagtgcagaaccgttttgattccaaaatcatcaaagccggatcgtttgaaagacattaataactggagacctatcacgatcggttccatcttgctgagactgttctccaggattgtaacagctaggctgagcaaagcgtgccccctgaacccaaggcaaagaggctttatcagagcggcgggatgctctgaaaacttaaaactcctgcaaactataatttggtcggccaaaagagaacacagaccactgggtgttgtattcgtggacatcgccaaggcttttgacaccgtaagccaccagcacatcattcatgctttgcagcaaagagaggtggatccccacatcgtcggtctggtgagcaatatgtacgagaacatcagtacgtatatcaccacaaagaggaacacacacacagacaaaatccagatccgggttggagtaaagcagggtgacccgatgtcgccccttttatttaacctggcaatggaccctctattatgcaagctggaagagagtggcaaaggataccaccgaggacagagcagcatcacagcgatggcatttgcagacgatctggttttgctgagcgactcctgggaaaatatgaatacaaatattagcatactggagaccttctgcaatctgaccggactcaaaacacaggggcaaaagtgccacggcttttacatcaagccgacaaaggactcttacaccatcaatgactgcgctgcctggactatcaacggcacacccctgaacatgatcgaccccggcgaatctgagaaatacctcggcctgcagtttgacccgtggattggaatagcaaggtccggtctctccacaaaactagatttttggcttcagcggatcgatcaagcaccacttaaacctctgcagaaaactgatattctcaaaacatacaccatccctcggctgatctacatagctgaccactcagaagtgaaaagcgcactactcgaaacccttgaccagaagatccggacagcggtcaaggaatggcttcacctacctccgtgcacctgcgatgccatcctgtactcgagcacgagagacggcggtttgggcatcaccaaattggcaggactgatccccagcgtgcaggcccgtagactgcatcggatcgcacagtcatctgacgatacgatgaaatgcttcatggaaaaagagaaaatggaacagctgcataagaaattgtggattcaagctggaggggacagagagaacataccctcgatttgggaagcaccaccgtcgagtgaaccaccaaacaacgtgagcacaaattcggaatgggaagcaccgacccagaaagataaatttccaaagccttgcaattggaggaaaaacgaattcaaaaaatggaccaaattggcatcccaaggccgcggaattgtaaattttgaaagagacaaaattagtaaccattggatccaatactacagacgcatacctcacaggaaactcctcactgcactacaactcagggccaacgtttaccccacgagagaatttctagccaggggtagacaagaccaatacatcaaggcgtgtaggcactgcgatgcggacaacgaatcctgcgcccacatcatcggcaactgcccagtgacacaggacgcccgaatcaagaggcacaattacatctgcgaactgcttctcgaggaggcgaagaagaaggactgggtagtgttcaaggaaccgcacataagggattccaacaaggaactgtacaaacctgacctgatatttgtgaaggatgggcgtgcacttgtcgtggatgtgacagtacggtatgaagcagccaaatcatcgctggaggaagccgctgcagagaaagtgagaaagtacaaacacctggaaacggaagtaagacatctcacgaatgcaaaggacgttacttttgtgggctttcccctaggagcgcgggggaaatggcaccaagataactttaaacttttgactgagcttggcctctccaaatcgaggcaagtgaaaatggcagagactttttccacagtagcgctcttttcatctgtggacattgtacatatgtttgccagtagggccagaaaatctatggttatgtgataataggctgccttctgcggggcttgccttctggccatgcccttcttctctcccttgcacctgtacctcttggtctttgaataaagcctgagtaggaaggaccggtaaaaaaaaaaaaaaaaaaaaaaaaaaaaaaacgttgactaaaaaaaaaaaaaaaaaaaaaaaaaaaaaaaaaaaaaaaaaaaaaaaaaaaaaaaaaaaaaaaaaaaaaa

SEQ ID NO: 10656 - DNA, 5264 bp, synthetic construct
  source 1..5264: mol_type = other DNA
gaaataagagagaaaagaagagtaagaagaaatataagagaattcgccaccatggcccctaagaaaaagcggaaggtgaatatcagcggctctagctgcggcagccccaacagcgccgacaccagcagcgacttcaaggacctgtggaccaagctgaaggaatgccacgaccgggaagtgcagggactccaggtgaaggtcaccaaactcaagcaagaaagaatcctggacgcccagagactggaagaattcttcaccaagaaccagcagctgagagagcagcagaaagtgctgcacgagacaatcaaggttctggaagatagactgcgggccggcctgtgcgacagatgcgccgtgaccgaggaacacatgcgcaaaaagcagcaggagttcgagaacattagacagcaaaatctgaaattgatcacagagctgatgaacgagagaaacacactgcaggaggagaacaagaagctgagcgagcagctgcaacagaagatcgagaatgatcagcaacaccaggccgctgagctggaatgtgaagaggacgtgatccccgacagcccaatcacagctttcagcttttctggcgtgaacagactgaggcggaaggaaaacccccacgtgcggtacatcgagcagacccataccaagctggaacacagcgtgtgtgccaacgagatgagaaaggtgtccaagtcctccacccatccccagcacaaccctaacgaaaatgagatcctggtggctgatacctacgaccagtctcagagccctatggccaaggcccacggcaccagctcttatacccctgataagagctccttcaacctggccaccgtggtggccgagacactgggcctgggcgtgcaggaggaaagcgagacacagggcccaatgagccctctgggagatgagctgtaccactgcctggaaggcaaccacaagaaacagccttttgagtccggctccgagactcctggaacaagcgagagcgctacacctgagggcagccctaagagaaaggtgtccagcgccgagggcgctgccaaggaagagcctaaacggagaagcgccagactgagcgccaagccccccgccaaggtggaagccaagcctaagaaggccgccgctaaggacaagagcagcgataagaaagtccagaccaagggcaagcggggcgccaaaggcaaacaggccgaggtggccaaccaggagacaaaggaagatctgcctgctgagaacggcgaaaccaagaccgaggaatctccagcttctgacgaggccggagagaaggaggccaaaagcgacagcggctctgagacacctggaacaagcgagagcgccaccccggaatcctatgaacaacttgcaccacaaccgtgtgtgggagaaactttacattctagcctcccacgagacagtgaactgtttgtgcctgaagaggggagcagcgagaaggagagcgaggacgcgccaaaaacatctcctccgacgcctgggaaacatggtttggaacagactggggaggaaaaagtgatggtgactgttcctgacaaaaatccaccttgtccttgctgtggtacccgggtaaactctgtgttgaatctgattgaacatctgaaagtgtcacacgggaaaaggggggtttgttttcggtgtgcaaaatgtggaaaggaaaatagtaactatcacagtgttgtttgtcattttaagaaatgcaggggtccagagacggagaaagccccagctggggagtggatttgtgaggtatgcaacagagattttacaaccaaaattggcctgggacaacacaagagattggcacacccagcagtgagaaatcaggaaaggatcgttgcttcccaaccgaaagaaacatcaaatagaggtgctcacaaaaggtgctggacaaaggaggaggaagaattactaataagactggaggctcagttcgagggaaacaaaaatattaataagcttattgcagaacacataaccaccaaaacagctaagcagatcagtgacaaaaggcgattgctgtccagaaagccagcagaggagccacgtgaggagcctggaacgtgtcatcacaccaggagagcagctgcgagcctgagaacggagcctgagatgagtcatcacgcccaggcagaggacagagataatggacctgggagacgccctctgccaggcagggcagctgccggagggagaacaatggacgagataagacgccaccctgataagggcaacggacagcagagacccaccaagcaaaaatcagaagaacagctgcaggcttactataaaaagacactagaggaacgactttcagctggggcacttaacaccttcccccgagcattcaagcaggtaatggaaggccgggatataaagctagtaatcaatcagacagcgcaggactgcttcggatgcctggaatccataagccaaataagaacggcaacccgagataaaaaggacacggtgacccgggagaaacacccaaagaaaccttttcagaagtggatgaagaagagagcaatcaaaaaaggtaattatcttcggttccagcgtttattttatcttgatagagggaaactggctaaaatcattttagatgatattgaatgcttgtcttgtgacataccactcagtgaaatttattcggtttttaaaacaagatgggaaacaactggtagctttaaaagccttggggactttaaaacttacgggaaggctgacaacactgccttcagagaattaattacggctaaagaaattgagaaaaatgtgcaggaaatgagcaaaggctcggctcccggtccagacgggattactcttggggacgtcgtaaagatggatcccgagttttcccggaccatggagattttcaatttatggttactaactggtaaaatcccggacatggtgagggggtgcagaaccgttttgattccaaaatcatcaaagccggatcgtttgaaagacattaataactggagacctatcacgatcggttccatcttgctgagactgttctccaggattgtaacagctaggctgagcaaagcgtgccccctgaacccaaggcaaagaggctttatcagagcggcgggatgctctgaaaacttaaaactcctgcaaactataatttggtcggccaaaagagaacacagaccactgggtgttgtattcgtggacatcgccaaggcttttgacaccgtaagccaccagcacatcattcatgctttgcagcaaagagaggtggatccccacatcgtcggtctggtgagcaatatgtacgagaacatcagtacgtatatcaccacaaagaggaacacacacacagacaaaatccagatccgggttggagtaaagcagggtgacccgatgtcgccccttttatttaacctggcaatggaccctctattatgcaagctggaagagagtggcaaaggataccaccgaggacagagcagcatcacagcgatggcatttgcagacgatctggttttgctgagcgactcctgggaaaatatgaatacaaatattagcatactggagaccttctgcaatctgaccggactcaaaacacaggggcaaaagtgccacggcttttacatcaagccgacaaaggactcttacaccatcaatgactgcgctgcctggactatcaacggcacacccctgaacatgatcgaccccggcgaatctgagaaatacctcggcctgcagtttgacccgtggattggaatagcaaggtccggtctctccacaaaactagatttttggcttcagcggatcgatcaagcaccacttaaacctctgcagaaaactgatattctcaaaacatacaccatccctcggctgatctacatagctgaccactcagaagtgaaaagcgcactactcgaaacccttgaccagaagatccggacagcggtcaaggaatggcttcacctacctccgtgcacctgcgatgccatcctgtactcgagcacgagagacggcggtttgggcatcaccaaattggcaggactgatccccagcgtgcaggcccgtagactgcatcggatcgcacagtcatctgacgatacgatgaaatgcttcatggaaaaagagaaaatggaacagctgcataagaaattgtggattcaagctggaggggacagagagaacataccctcgatttgggaagcaccaccgtcgagtgaaccaccaaacaacgtgagcacaaattcggaatgggaagcaccgacccagaaagataaatttccaaagccttgcaattggaggaaaaacgaattcaaaaaatggaccaaattggcatcccaaggccgcggaattgtaaattttgaaagagacaaaattagtaaccattggatccaatactacagacgcatacctcacaggaaactcctcactgcactacaactcagggccaacgtttaccccacgagagaatttctagccaggggtagacaagaccaatacatcaaggcgtgtaggcactgcgatgcggacaacgaatcctgcgcccacatcatcggcaactgcccagtgacacaggacgcccgaatcaagaggcacaattacatctgcgaactgcttctcgaggaggcgaagaagaaggactgggtagtgttcaaggaaccgcacataagggattccaacaaggaactgtacaaacctgacctgatatttgtgaaggatgggcgtgcacttgtcgtggatgtgacagtacggtatgaagcagccaaatcatcgctggaggaagccgctgcagagaaagtgagaaagtacaaacacctggaaacggaagtaagacatctcacgaatgcaaaggacgttacttttgtgggctttcccctaggagcgcgggggaaatggcaccaagataactttaaacttttgactgagcttggcctctccaaatcgaggcaagtgaaaatggcagagactttttccacagtagcgctcttttcatctgtggacattgtacatatgtttgccagtagggccagaaaatctatggttatgtgataataggctgccttctgcggggcttgccttctggccatgcccttcttctctcccttgcacctgtacctcttggtctttgaataaagcctgagtaggaaggaccggtaaaaaaaaaaaaaaaaaaaaaaaaaaaaaaacgttgactaaaaaaaaaaaaaaaaaaaaaaaaaaaaaaaaaaaaaaaaaaaaaaaaaaaaaaaaaaaaaaaaaaaaaa

SEQ ID NO: 10657 - DNA, 5264 bp, synthetic construct
  source 1..5264: mol_type = other DNA
gaaataagagagaaaagaagagtaagaagaaatataagagaattcgccaccatggcccctaagaaaaagcggaaggtgaatatcagcggctctagctgcggcagccccaacagcgccgacaccagcagcgacttcaaggacctgtggaccaagctgaaggaatgccacgaccgggaagtgcagggactccaggtgaaggtcaccaaactcaagcaagaaagaatcctggacgcccagagactggaagaattcttcaccaagaaccagcagctgagagagcagcagaaagtgctgcacgagacaatcaaggttctggaagatagactgcgggccggcctgtgcgacagatgcgccgtgaccgaggaacacatgcgcaaaaagcagcaggagttcgagaacattagacagcaaaatctgaaattgatcacagagctgatgaacgagagaaacacactgcaggaggagaacaagaagctgagcgagcagctgcaacagaagatcgagaatgatcagcaacaccaggccgctgagctggaatgtgaagaggacgtgatccccgacagcccaatcacagctttcagcttttctggcgtgaacagactgaggcggaaggaaaacccccacgtgcggtacatcgagcagacccataccaagctggaacacagcgtgtgtgccaacgagatgagaaaggtgtccaagtcctccacccatccccagcacaaccctaacgaaaatgagatcctggtggctgatacctacgaccagtctcagagccctatggccaaggcccacggcaccagctcttatacccctgataagagctccttcaacctggccaccgtggtggccgagacactgggcctgggcgtgcaggaggaaagcgagacacagggcccaatgagccctctgggagatgagctgtaccactgcctggaaggcaaccacaagaaacagccttttgagtccggctccgagactcctggaacaagcgagagcgctacacctgagggcagccctaagagaaaggtgtccagcgccgagggcgctgccaaggaagagcctaaacggagaagcgccagactgagcgccaagccccccgccaaggtggaagccaagcctaagaaggccgccgctaaggacaagagcagcgataagaaagtccagaccaagggcaagcggggcgccaaaggcaaacaggccgaggtggccaaccaggagacaaaggaagatctgcctgctgagaacggcgaaaccaagaccgaggaatctccagcttctgacgaggccggagagaaggaggccaaaagcgacagcggctctgagacacctggaacaagcgagagcgccaccccggaatcctatgaacaacttgcaccacaaccgtgtgtgggagaaactttacattctagcctcccacgagacagtgaactgtttgtgcctgaagaggggagcagcgagaaggagagcgaggacgcgccaaaaacatctcctccgacgcctgggaaacatggtttggaacagactggggaggaaaaagtgatggtgactgttcctgacaaaaatccaccttgtccttgctgtggtacccgggtaaactctgtgttgaatctgattgaacatctgaaagtgtcacacgggaaaaggggggtttgttttcggtgtgcaaaatgtggaaaggaaaatagtaactatcacagtgttgtttgtcattttaagaaatgcaggggtccagagacggagaaagccccagctggggagtggatttgtgaggtatgcaacagagattttacaaccaaaattggcctgggacaacacaagagattggcacacccagcagtgagaaatcaggaaaggatcgttgcttcccaaccgaaagaaacatcaaatagaggtgctcacaaaaggtgctggacaaaggaggaggaagaattactaataagactggaggctcagttcgagggaaacaaaaatattaataagcttattgcagaacacataaccaccaaaacagctaagcagatcagtgacaaaaggcgattgctgtccagaaagccagcagaggagccacgtgaggagcctggaacgtgtcatcacaccaggagagcagctgcgagcctgagaacggagcctgagatgagtcatcacgcccaggcagaggacagagataatggacctgggagacgccctctgccaggcagggcagctgccggagggagaacaatggacgagataagacgccaccctgataagggcaacggacagcagagacccaccaagcaaaaatcagaagaacagctgcaggcttactataaaaagacactagaggaacgactttcagctggggcacttaacaccttcccccgagcattcaagcaggtaatggaaggccgggatataaagctagtaatcaatcagacagcgcaggactgcttcggatgcctggaatccataagccaaataagaacggcaacccgagataaaaaggacacggtgacccgggagaaacacccaaagaaaccttttcagaagtggatgaagaagagagcaatcaaaaaaggtaattatcttcggttccagcgtttattttatcttgatagagggaaactggctaaaatcattttagatgatattgaatgcttgtcttgtgacataccactcagtgaaatttattcggtttttaaaacaagatgggaaacaactggtagctttaaaagccttggggactttaaaacttacgggaaggctgacaacactgccttcagagaattaattacggctaaagaaattgagaaaaatgtgcaggaaatgagcaaaggctcggctcccggtccagacgggattactcttggggacgtcgtaaagatggatcccgagttttcccggaccatggagattttcaatttatggttaacaactggtaaaatcccggacatggtgagggggtgcagaaccgttttgattccaaaatcatcaaagccggatcgtttgaaagacattaataactggagacctatcacgatcggttccatcttgctgagactgttctccaggattgtaacagctaggctgagcaaagcgtgccccctgaacccaaggcaaagaggctttatcagagcggcgggatgctctgaaaacttaaaactcctgcaaactataatttggtcggccaaaagagaacacagaccactgggtgttgtattcgtggacatcgccaaggcttttgacaccgtaagccaccagcacatcattcatgctttgcagcaaagagaggtggatccccacatcgtcggtctggtgagcaatatgtacgagaacatcagtacgtatatcaccacaaagaggaacacacacacagacaaaatccagatccgggttggagtaaagcagggtgacccgatgtcgccccttttatttaacctggcaatggaccctctattatgcaagctggaagagagtggcaaaggataccaccgaggacagagcagcatcacagcgatggcatttgcagacgatctggttttgctgagcgactcctgggaaaatatgaatacaaatattagcatactggagaccttctgcaatctgaccggactcaaaacacaggggcaaaagtgccacggcttttacatcaagccgacaaaggactcttacaccatcaatgactgcgctgcctggactatcaacggcacacccctgaacatgatcgaccccggcgaatctgagaaatacctcggcctgcaggttgacccgtggattggaatagcaaggtccggtctctccacaaaactagatttttggcttcagcggatcgatcaagcaccacttaaacctctgcagaaaactgatattctcaaaacatacaccatccctcggctgatctacatagctgaccactcagaagtgaaaagcgcactactcgaaacccttgaccagaagatccggacagcggtcaaggaatggcttcacctacctccgtgcacctgcgatgccatcctgtactcgagcacgagagacggcggtttgggcatcaccaaattggcaggactgatccccagcgtgcaggcccgtagactgcatcggatcgcacagtcatctgacgatacgatgaaatgcttcatggaaaaagagaaaatggaacagctgcataagaaattgtggattcaagctggaggggacagagagaacataccctcgatttgggaagcaccaccgtcgagtgaaccaccaaacaacgtgagcacaaattcggaatgggaagcaccgacccagaaagataaatttccaaagccttgcaattggaggaaaaacgaattcaaaaaatggaccaaattggcatcccaaggccgcggaattgtaaattttgaaagagacaaaattagtaaccattggatccaatactacagacgcatacctcacaggaaactcctcactgcactacaactcagggccaacgtttaccccacgagagaatttctagccaggggtagacaagaccaatacatcaaggcgtgtaggcactgcgatgcggacaacgaatcctgcgcccacatcatcggcaactgcccagtgacacaggacgcccgaatcaagaggcacaattacatctgcgaactgcttctcgaggaggcgaagaagaaggactgggtagtgttcaaggaaccgcacataagggattccaacaaggaactgtacaaacctgacctgatatttgtgaaggatgggcgtgcacttgtcgtggatgtgacagtacggtatgaagcagccaaatcatcgctggaggaagccgctgcagagaaagtgagaaagtacaaacacctggaaacggaagtaagacatctcacgaatgcaaaggacgttacttttgtgggctttcccctaggagcgcgggggaaatggcaccaagataactttaaacttttgactgagcttggcctctccaaatcgaggcaagtgaaaatggcagagactttttccacagtagcgctcttttcatctgtggacattgtacatatgtttgccagtagggccagaaaatctatggttatgtgataataggctgccttctgcggggcttgccttctggccatgcccttcttctctcccttgcacctgtacctcttggtctttgaataaagcctgagtaggaaggaccggtaaaaaaaaaaaaaaaaaaaaaaaaaaaaaaacgttgactaaaaaaaaaaaaaaaaaaaaaaaaaaaaaaaaaaaaaaaaaaaaaaaaaaaaaaaaaaaaaaaaaaaaaa

SEQ ID NO: 10658 - DNA, 5264 bp, synthetic construct
  source 1..5264: mol_type = other DNA
gaaataagagagaaaagaagagtaagaagaaatataagagaattcgccaccatggcccctaagaaaaagcggaaggtgaatatcagcggctctagctgcggcagccccaacagcgccgacaccagcagcgacttcaaggacctgtggaccaagctgaaggaatgccacgaccgggaagtgcagggactccaggtgaaggtcaccaaactcaagcaagaaagaatcctggacgcccagagactggaagaattcttcaccaagaaccagcagctgagagagcagcagaaagtgctgcacgagacaatcaaggttctggaagatagactgcgggccggcctgtgcgacagatgcgccgtgaccgaggaacacatgcgcaaaaagcagcaggagttcgagaacattagacagcaaaatctgaaattgatcacagagctgatgaacgagagaaacacactgcaggaggagaacaagaagctgagcgagcagctgcaacagaagatcgagaatgatcagcaacaccaggccgctgagctggaatgtgaagaggacgtgatccccgacagcccaatcacagctttcagcttttctggcgtgaacagactgaggcggaaggaaaacccccacgtgcggtacatcgagcagacccataccaagctggaacacagcgtgtgtgccaacgagatgagaaaggtgtccaagtcctccacccatccccagcacaaccctaacgaaaatgagatcctggtggctgatacctacgaccagtctcagagccctatggccaaggcccacggcaccagctcttatacccctgataagagctccttcaacctggccaccgtggtggccgagacactgggcctgggcgtgcaggaggaaagcgagacacagggcccaatgagccctctgggagatgagctgtaccactgcctggaaggcaaccacaagaaacagccttttgagtccggctccgagactcctggaacaagcgagagcgctacacctgagggcagccctaagagaaaggtgtccagcgccgagggcgctgccaaggaagagcctaaacggagaagcgccagactgagcgccaagccccccgccaaggtggaagccaagcctaagaaggccgccgctaaggacaagagcagcgataagaaagtccagaccaagggcaagcggggcgccaaaggcaaacaggccgaggtggccaaccaggagacaaaggaagatctgcctgctgagaacggcgaaaccaagaccgaggaatctccagcttctgacgaggccggagagaaggaggccaaaagcgacagcggctctgagacacctggaacaagcgagagcgccaccccggaatcctatgaacaacttgcaccacaaccgtgtgtgggagaaactttacattctagcctcccacgagacagtgaactgtttgtgcctgaagaggggagcagcgagaaggagagcgaggacgcgccaaaaacatctcctccgacgcctgggaaacatggtttggaacagactggggaggaaaaagtgatggtgactgttcctgacaaaaatccaccttgtccttgctgtggtacccgggtaaactctgtgttgaatctgattgaacatctgaaagtgtcacacgggaaaaggggggtttgttttcggtgtgcaaaatgtggaaaggaaaatagtaactatcacagtgttgtttgtcattttaagaaatgcaggggtccagagacggagaaagccccagctggggagtggatttgtgaggtatgcaacagagattttacaaccaaaattggcctgggacaacacaagagattggcacacccagcagtgagaaatcaggaaaggatcgttgcttcccaaccgaaagaaacatcaaatagaggtgctcacaaaaggtgctggacaaaggaggaggaagaattactaataagactggaggctcagttcgagggaaacaaaaatattaataagcttattgcagaacacataaccaccaaaacagctaagcagatcagtgacaaaaggcgattgctgtccagaaagccagcagaggagccacgtgaggagcctggaacgtgtcatcacaccaggagagcagctgcgagcctgagaacggagcctgagatgagtcatcacgcccaggcagaggacagagataatggacctgggagacgccctctgccaggcagggcagctgccggagggagaacaatggacgagataagacgccaccctgataagggcaacggacagcagagacccaccaagcaaaaatcagaagaacagctgcaggcttactataaaaagacactagaggaacgactttcagctggggcacttaacaccttcccccgagcattcaagcaggtaatggaaggccgggatataaagctagtaatcaatcagacagcgcaggactgcttcggatgcctggaatccataagccaaataagaacggcaacccgagataaaaaggacacggtgacccgggagaaacacccaaagaaaccttttcagaagtggatgaagaagagagcaatcaaaaaaggtaattatcttcggttccagcgtttattttatcttgatagagggaaactggctaaaatcattttagatgatattgaatgcttgtcttgtgacataccactcagtgaaatttattcggtttttaaaacaagatgggaaacaactggtagctttaaaagccttggggactttaaaacttacgggaaggctgacaacactgccttcagagaattaattacggctaaagaaattgagaaaaatgtgcaggaaatgagcaaaggctcggctcccggtccagacgggattactcttggggacgtcgtaaagatggatcccgagttttcccggaccatggagattttcaatttatggttaacaactggtaaaatcccggactccgtgagggggtgcagaaccgttttgattccaaaatcatcaaagccggatcgtttgaaagacattaataactggagacctatcacgatcggttccatcttgctgagactgttctccaggattgtaacagctaggctgagcaaagcgtgccccctgaacccaaggcaaagaggctttatcagagcggcgggatgctctgaaaacttaaaactcctgcaaactataatttggtcggccaaaagagaacacagaccactgggtgttgtattcgtggacatcgccaaggcttttgacaccgtaagccaccagcacatcattcatgctttgcagcaaagagaggtggatccccacatcgtcggtctggtgagcaatatgtacgagaacatcagtacgtatatcaccacaaagaggaacacacacacagacaaaatccagatccgggttggagtaaagcagggtgacccgatgtcgccccttttatttaacctggcaatggaccctctattatgcaagctggaagagagtggcaaaggataccaccgaggacagagcagcatcacagcgatggcatttgcagacgatctggttttgctgagcgactcctgggaaaatatgaatacaaatattagcatactggagaccttctgcaatctgaccggactcaaaacacaggggcaaaagtgccacggcttttacatcaagccgacaaaggactcttacaccatcaatgactgcgctgcctggactatcaacggcacacccctgaacatgatcgaccccggcgaatctgagaaatacctcggcctgcagtttgacccgtggattggaatagcaaggtccggtctctccacaaaactagatttttggcttcagcggatcgatcaagcaccacttaaacctctgcagaaaactgatattctcaaaacatacaccatccctcggctgatctacatagctgaccactcagaagtgaaaagcgcactactcgaaacccttgaccagaagatccggacagcggtcaaggaatggcttcacctacctccgtgcacctgcgatgccatcctgtactcgagcacgagagacggcggtttgggcatcaccaaattggcaggactgatccccagcgtgcaggcccgtagactgcatcggatcgcacagtcatctgacgatacgatgaaatgcttcatggaaaaagagaaaatggaacagctgcataagaaattgtggattcaagctggaggggacagagagaacataccctcgatttgggaagcaccaccgtcgagtgaaccaccaaacaacgtgagcacaaattcggaatgggaagcaccgacccagaaagataaatttccaaagccttgcaattggaggaaaaacgaattcaaaaaatggaccaaattggcatcccaaggccgcggaattgtaaattttgaaagagacaaaattagtaaccattggatccaatactacagacgcatacctcacaggaaactcctcactgcactacaactcagggccaacgtttaccccacgagagaatttctagccaggggtagacaagaccaatacatcaaggcgtgtaggcactgcgatgcggacaacgaatcctgcgcccacatcatcggcaactgcccagtgacacaggacgcccgaatcaagaggcacaattacatctgcgaactgcttctcgaggaggcgaagaagaaggactgggtagtgttcaaggaaccgcacataagggattccaacaaggaactgtacaaacctgacctgatatttgtgaaggatgggcgtgcacttgtcgtggatgtgacagtacggtatgaagcagccaaatcatcgctggaggaagccgctgcagagaaagtgagaaagtacaaacacctggaaacggaagtaagacatctcacgaatgcaaaggacgttacttttgtgggctttcccctaggagcgcgggggaaatggcaccaagataactttaaacttttgactgagcttggcctctccaaatcgaggcaagtgaaaatggcagagactttttccacagtagcgctcttttcatctgtggacattgtacatatgtttgccagtagggccagaaaatctatggttatgtgataataggctgccttctgcggggcttgccttctggccatgcccttcttctctcccttgcacctgtacctcttggtctttgaataaagcctgagtaggaaggaccggtaaaaaaaaaaaaaaaaaaaaaaaaaaaaaaacgttgactaaaaaaaaaaaaaaaaaaaaaaaaaaaaaaaaaaaaaaaaaaaaaaaaaaaaaaaaaaaaaaaaaaaaaa

SEQ ID NO: 10659 - DNA, 5264 bp, synthetic construct
  source 1..5264: mol_type = other DNA
gaaataagagagaaaagaagagtaagaagaaatataagagaattcgccaccatggcccctaagaaaaagcggaaggtgaatatcagcggctctagctgcggcagccccaacagcgccgacaccagcagcgacttcaaggacctgtggaccaagctgaaggaatgccacgaccgggaagtgcagggactccaggtgaaggtcaccaaactcaagcaagaaagaatcctggacgcccagagactggaagaattcttcaccaagaaccagcagctgagagagcagcagaaagtgctgcacgagacaatcaaggttctggaagatagactgcgggccggcctgtgcgacagatgcgccgtgaccgaggaacacatgcgcaaaaagcagcaggagttcgagaacattagacagcaaaatctgaaattgatcacagagctgatgaacgagagaaacacactgcaggaggagaacaagaagctgagcgagcagctgcaacagaagatcgagaatgatcagcaacaccaggccgctgagctggaatgtgaagaggacgtgatccccgacagcccaatcacagctttcagcttttctggcgtgaacagactgaggcggaaggaaaacccccacgtgcggtacatcgagcagacccataccaagctggaacacagcgtgtgtgccaacgagatgagaaaggtgtccaagtcctccacccatccccagcacaaccctaacgaaaatgagatcctggtggctgatacctacgaccagtctcagagccctatggccaaggcccacggcaccagctcttatacccctgataagagctccttcaacctggccaccgtggtggccgagacactgggcctgggcgtgcaggaggaaagcgagacacagggcccaatgagccctctgggagatgagctgtaccactgcctggaaggcaaccacaagaaacagccttttgagtccggctccgagactcctggaacaagcgagagcgctacacctgagggcagccctaagagaaaggtgtccagcgccgagggcgctgccaaggaagagcctaaacggagaagcgccagactgagcgccaagccccccgccaaggtggaagccaagcctaagaaggccgccgctaaggacaagagcagcgataagaaagtccagaccaagggcaagcggggcgccaaaggcaaacaggccgaggtggccaaccaggagacaaaggaagatctgcctgctgagaacggcgaaaccaagaccgaggaatctccagcttctgacgaggccggagagaaggaggccaaaagcgacagcggctctgagacacctggaacaagcgagagcgccaccccggaatcctatgaacaacttgcaccacaaccgtgtgtgggagaaactttacattctagcctcccacgagacagtgaactgtttgtgcctgaagaggggagcagcgagaaggagagcgaggacgcgccaaaaacatctcctccgacgcctgggaaacatggtttggaacagactggggaggaaaaagtgatggtgactgttcctgacaaaaatccaccttgtccttgctgtggtacccgggtaaactctgtgttgaatctgattgaacatctgaaagtgtcacacgggaaaaggggggtttgttttcggtgtgcaaaatgtggaaaggaaaatagtaactatcacagtgttgtttgtcattttaagaaatgcaggggtccagagacggagaaagccccagctggggagtggatttgtgaggtatgcaacagagattttacaaccaaaattggcctgggacaacacaagagattggcacacccagcagtgagaaatcaggaaaggatcgttgcttcccaaccgaaagaaacatcaaatagaggtgctcacaaaaggtgctggacaaaggaggaggaagaattactaataagactggaggctcagttcgagggaaacaaaaatattaataagcttattgcagaacacataaccaccaaaacagctaagcagatcagtgacaaaaggcgattgctgtccagaaagccagcagaggagccacgtgaggagcctggaacgtgtcatcacaccaggagagcagctgcgagcctgagaacggagcctgagatgagtcatcacgcccaggcagaggacagagataatggacctgggagacgccctctgccaggcagggcagctgccggagggagaacaatggacgagataagacgccaccctgataagggcaacggacagcagagacccaccaagcaaaaatcagaagaacagctgcaggcttactataaaaagacactagaggaacgactttcagctggggcacttaacaccttcccccgagcattcaagcaggtaatggaaggccgggatataaagctagtaatcaatcagacagcgcaggactgcttcggatgcctggaatccataagccaaataagaacggcaacccgagataaaaaggacacggtgacccgggagaaacacccaaagaaaccttttcagaagtggatgaagaagagagcaatcaaaaaaggtaattatcttcggttccagcgtttattttatcttgatagagggaaactggctaaaatcattttagatgatattgaatgcttgtcttgtgacataccactcagtgaaatttattcggtttttaaaacaagatgggaaacaactggtagctttaaaagccttggggactttaaaacttacgggaaggctgacaacactgccttcagagaattaattacggctaaagaaattgagaaaaatgtgcaggaaatgagcaaaggctcggctcccggtccagacgggattactcttggggacgtcgtaaagatggatcccgagttttcccggaccatggagattttcaatttatggttaacaactggtaaaatcccggacatggtgagggggtgcagaaccgttttgattccaaaatcatcaaagccggatcgtttgaaagacattaataactggagacctatcacgatcggttccatcttgctgagactgttctccaggattgtaacagctaggctgagcaaagcgtgccccctgaacccaaggcaaagaggctttatcagagcggcgggatgctctgaaaacttaaaactcctgcaaactataatttggtcggccaaaagagaacacagaccactgggtgttgtattcgtggacatcgccaaggcttttgacaccgtaagccaccagcacatcattcatgctttgcagcaaagagaggtggatccccacatcgtcggtctggtgagcaatatgtacgagaacatcagtacgtatatcaccacaaagaggaacacacacacagacaaaatccagatccgggttggagtaaagcagggtgacccgatgtcgccccttttatttaacctggcaatggaccctctattatgcaagctggaagagagtggcaaaggataccaccgaggacagagcagcatcacagcgatggcatttgcagacgatctggttttgctgagcgactcctgggaaaatatgaatacaaatattagcatactggagaccttctgcaatctgaccggactcaaaacacaggggcaaaagtgccacggcttttacatcaagccgacaaaggactcttacaccatcaatgactgcgctgcctggactatcaacggcacacccctgaacatgatcgaccccggcgaatctgagaaatacctcggcctgcagtttgacccgtggattggaatagcaaggtccggtctctccacaaaactagatttttggcttcagcggatcgatcaagcaccacttaaacctctgcagaaaactgatattctcaaaacatacaccatccctcggctgatctacatagctgaccactcagaagtgaaaagcgcactactcgaaacccttgaccagaagatccggacagcggtcaaggaatggcttcacctacctccgtgcacctgcgatgccatcctgtactcgagcacgagagacggcggtttgggcatcaccaaattggcaggactgatccccagcgtgcaggcccgtagactgcatcggatcgcacagtcatctgacgatacgatgaaatgcttcatggaaaaagagaaaatggaacagctgcataagaaattgtggattcaagctggaggggacagagagaacataccctcgatttgggaagcaccaccgtcgagtgaaccaccaaacaacgtgagcacaaattcggaacccgaagcaccgacccagaaagataaatttccaaagccttgcaattggaggaaaaacgaattcaaaaaatggaccaaattggcatcccaaggccgcggaattgtaaattttgaaagagacaaaattagtaaccattggatccaatactacagacgcatacctcacaggaaactcctcactgcactacaactcagggccaacgtttaccccacgagagaatttctagccaggggtagacaagaccaatacatcaaggcgtgtaggcactgcgatgcggacaacgaatcctgcgcccacatcatcggcaactgcccagtgacacaggacgcccgaatcaagaggcacaattacatctgcgaactgcttctcgaggaggcgaagaagaaggactgggtagtgttcaaggaaccgcacataagggattccaacaaggaactgtacaaacctgacctgatatttgtgaaggatgggcgtgcacttgtcgtggatgtgacagtacggtatgaagcagccaaatcatcgctggaggaagccgctgcagagaaagtgagaaagtacaaacacctggaaacggaagtaagacatctcacgaatgcaaaggacgttacttttgtgggctttcccctaggagcgcgggggaaatggcaccaagataactttaaacttttgactgagcttggcctctccaaatcgaggcaagtgaaaatggcagagactttttccacagtagcgctcttttcatctgtggacattgtacatatgtttgccagtagggccagaaaatctatggttatgtgataataggctgccttctgcggggcttgccttctggccatgcccttcttctctcccttgcacctgtacctcttggtctttgaataaagcctgagtaggaaggaccggtaaaaaaaaaaaaaaaaaaaaaaaaaaaaaaacgttgactaaaaaaaaaaaaaaaaaaaaaaaaaaaaaaaaaaaaaaaaaaaaaaaaaaaaaaaaaaaaaaaaaaaaaa

SEQ ID NO: 10660 - DNA, 5264 bp, synthetic construct
  source 1..5264: mol_type = other DNA
gaaataagagagaaaagaagagtaagaagaaatataagagaattcgccaccatggcccctaagaaaaagcggaaggtgaatatcagcggctctagctgcggcagccccaacagcgccgacaccagcagcgacttcaaggacctgtggaccaagctgaaggaatgccacgaccgggaagtgcagggactccaggtgaaggtcaccaaactcaagcaagaaagaatcctggacgcccagagactggaagaattcttcaccaagaaccagcagctgagagagcagcagaaagtgctgcacgagacaatcaaggttctggaagatagactgcgggccggcctgtgcgacagatgcgccgtgaccgaggaacacatgcgcaaaaagcagcaggagttcgagaacattagacagcaaaatctgaaattgatcacagagctgatgaacgagagaaacacactgcaggaggagaacaagaagctgagcgagcagctgcaacagaagatcgagaatgatcagcaacaccaggccgctgagctggaatgtgaagaggacgtgatccccgacagcccaatcacagctttcagcttttctggcgtgaacagactgaggcggaaggaaaacccccacgtgcggtacatcgagcagacccataccaagctggaacacagcgtgtgtgccaacgagatgagaaaggtgtccaagtcctccacccatccccagcacaaccctaacgaaaatgagatcctggtggctgatacctacgaccagtctcagagccctatggccaaggcccacggcaccagctcttatacccctgataagagctccttcaacctggccaccgtggtggccgagacactgggcctgggcgtgcaggaggaaagcgagacacagggcccaatgagccctctgggagatgagctgtaccactgcctggaaggcaaccacaagaaacagccttttgagtccggctccgagactcctggaacaagcgagagcgctacacctgagggcagccctaagagaaaggtgtccagcgccgagggcgctgccaaggaagagcctaaacggagaagcgccagactgagcgccaagccccccgccaaggtggaagccaagcctaagaaggccgccgctaaggacaagagcagcgataagaaagtccagaccaagggcaagcggggcgccaaaggcaaacaggccgaggtggccaaccaggagacaaaggaagatctgcctgctgagaacggcgaaaccaagaccgaggaatctccagcttctgacgaggccggagagaaggaggccaaaagcgacagcggctctgagacacctggaacaagcgagagcgccaccccggaatcctatgaacaacttgcaccacaaccgtgtgtgggagaaactttacattctagcctcccacgagacagtgaactgtttgtgcctgaagaggggagcagcgagaaggagagcgaggacgcgccaaaaacatctcctccgacgcctgggaaacatggtttggaacagactggggaggaaaaagtgatggtgactgttcctgacaaaaatccaccttgtccttgctgtggtacccgggtaaactctgtgttgaatctgattgaacatctgaaagtgtcacacgggaaaaggggggtttgttttcggtgtgcaaaatgtggaaaggaaaatagtaactatcacagtgttgtttgtcattttaagaaatgcaggggtccagagacggagaaagccccagctggggagtggatttgtgaggtatgcaacagagattttacaaccaaaattggcctgggacaacacaagagattggcacacccagcagtgagaaatcaggaaaggatcgttgcttcccaaccgaaagaaacatcaaatagaggtgctcacaaaaggtgctggacaaaggaggaggaagaattactaataagactggaggctcagttcgagggaaacaaaaatattaataagcttattgcagaacacataaccaccaaaacagctaagcagatcagtgacaaaaggcgattgctgtccagaaagccagcagaggagccacgtgaggagcctggaacgagtcatcacaccaggagagcagctgcgagcctgagaacggagcctgagatgagtcatcacgcccaggcagaggacagagataatggacctgggagacgccctctgccaggcagggcagctgccggagggagaacaatggacgagataagacgccaccctgataagggcaacggacagcagagacccaccaagcaaaaatcagaagaacagctgcaggcttactataaaaagacactagaggaacgactttcagctggggcacttaacaccttcccccgagcattcaagcaggtaatggaaggccgggatataaagctagtaatcaatcagacagcgcaggactgcttcggatgcctggaatccataagccaaataagaacggcaacccgagataaaaaggacacggtgacccgggagaaacacccaaagaaaccttttcagaagtggatgaagaagagagcaatcaaaaaaggtaattatcttcggttccagcgtttattttatcttgatagagggaaactggctaaaatcattttagatgatattgaatgcttgtcttgtgacataccactcagtgaaatttattcggtttttaaaacaagatgggaaacaactggtagctttaaaagccttggggactttaaaacttacgggaaggctgacaacactgccttcagagaattaattacggctaaagaaattgagaaaaatgtgcaggaaatgagcaaaggctcggctcccggtccagacgggattactcttggggacgtcgtaaagatggatcccgagttttcccggaccatggagattttcaatttatggttaacaactggtaaaatcccggacatggtgagggggtgcagaaccgttttgattccaaaatcatcaaagccggatcgtttgaaagacattaataactggagacctatcacgatcggttccatcttgctgagactgttctccaggattgtaacagctaggctgagcaaagcgtgccccctgaacccaaggcaaagaggctttatcagagcggcgggatgctctgaaaacttaaaactcctgcaaactataatttggtcggccaaaagagaacacagaccactgggtgttgtattcgtggacatcgccaaggcttttgacaccgtaagccaccagcacatcattcatgctttgcagcaaagagaggtggatccccacatcgtcggtctggtgagcaatatgtacgagaacatcagtacgtatatcaccacaaagaggaacacacacacagacaaaatccagatccgggttggagtaaagcagggtgacccgatgtcgccccttttatttaacctggcaatggaccctctattatgcaagctggaagagagtggcaaaggataccaccgaggacagagcagcatcacagcgatggcatttgcagacgatctggttttgctgagcgactcctgggaaaatatgaatacaaatattagcatactggagaccttctgcaatctgaccggactcaaaacacaggggcaaaagtgccacggcttttacatcaagccgacaaaggactcttacaccatcaatgactgcgctgcctggactatcaacggcacacccctgaacatgatcgaccccggcgaatctgagaaatacctcggcctgcagtttgacccgtggattggaatagcaaggtccggtctctccacaaaactagatttttggcttcagcggatcgatcaagcaccacttaaacctctgcagaaaactgatattctcaaaacatacaccatccctcggctgatctacatagctgaccactcagaagtgaaaagcgcactactcgaaacccttgaccagaagatccggacagcggtcaaggaatggcttcacctacctccgtgcacctgcgatgccatcctgtactcgagcacgagagacggcggtttgggcatcaccaaattggcaggactgatccccagcgtgcaggcccgtagactgcatcggatcgcacagtcatctgacgatacgatgaaatgcttcatggaaaaagagaaaatggaacagctgcataagaaattgtggattcaagctggaggggacagagagaacataccctcgatttgggaagcaccaccgtcgagtgaaccaccaaacaacgtgagcacaaattcggaatgggaagcaccgacccagaaagataaatttccaaagccttgcaattggaggaaaaacgaattcaaaaaatggaccaaattggcatcccaaggccgcggaattgtaaattttgaaagagacaaaattagtaaccattggatccaatactacagacgcatacctcacaggaaactcctcactgcactacaactcagggccaacgtttaccccacgagagaatttctagccaggggtagacaagaccaatacatcaaggcgtgtaggcactgcgatgcggacaacgaatcctgcgcccacatcatcggcaactgcccagtgacacaggacgcccgaatcaagaggcacaattacatctgcgaactgcttctcgaggaggcgaagaagaaggactgggtagtgttcaaggaaccgcacataagggattccaacaaggaactgtacaaacctgacctgatatttgtgaaggatgggcgtgcacttgtcgtggatgtgacagtacggtatgaagcagccaaatcatcgctggaggaagccgctgcagagaaagtgagaaagtacaaacacctggaaacggaagtaagacatctcacgaatgcaaaggacgttacttttgtgggctttcccctaggagcgcgggggaaatggcaccaagataactttaaacttttgactgagcttggcctctccaaatcgaggcaagtgaaaatggcagagactttttccacagtagcgctcttttcatctgtggacattgtacatatgtttgccagtagggccagaaaatctatggttatgtgataataggctgccttctgcggggcttgccttctggccatgcccttcttctctcccttgcacctgtacctcttggtctttgaataaagcctgagtaggaaggaccggtaaaaaaaaaaaaaaaaaaaaaaaaaaaaaaacgttgactaaaaaaaaaaaaaaaaaaaaaaaaaaaaaaaaaaaaaaaaaaaaaaaaaaaaaaaaaaaaaaaaaaaaaa

SEQ ID NO: 10661 - DNA, 5264 bp, synthetic construct
  source 1..5264: mol_type = other DNA
gaaataagagagaaaagaagagtaagaagaaatataagagaattcgccaccatggcccctaagaaaaagcggaaggtgaatatcagcggctctagctgcggcagccccaacagcgccgacaccagcagcgacttcaaggacctgtggaccaagctgaaggaatgccacgaccgggaagtgcagggactccaggtgaaggtcaccaaactcaagcaagaaagatgcctggacgcccagagactggaagaattcttcaccaagaaccagcagctgagagagcagcagaaagtgctgcacgagacaatcaaggttctggaagatagactgcgggccggcctgtgcgacagatgcgccgtgaccgaggaacacatgcgcaaaaagcagcaggagttcgagaacattagacagcaaaatctgaaattgatcacagagctgatgaacgagagaaacacactgcaggaggagaacaagaagctgagcgagcagctgcaacagaagatcgagaatgatcagcaacaccaggccgctgagctggaatgtgaagaggacgtgatccccgacagcccaatcacagctttcagcttttctggcgtgaacagactgaggcggaaggaaaacccccacgtgcggtacatcgagcagacccataccaagctggaacacagcgtgtgtgccaacgagatgagaaaggtgtccaagtcctccacccatccccagcacaaccctaacgaaaatgagatcctggtggctgatacctacgaccagtctcagagccctatggccaaggcccacggcaccagctcttatacccctgataagagctccttcaacctggccaccgtggtggccgagacactgggcctgggcgtgcaggaggaaagcgagacacagggcccaatgagccctctgggagatgagctgtaccactgcctggaaggcaaccacaagaaacagccttttgagtccggctccgagactcctggaacaagcgagagcgctacacctgagggcagccctaagagaaaggtgtccagcgccgagggcgctgccaaggaagagcctaaacggagaagcgccagactgagcgccaagccccccgccaaggtggaagccaagcctaagaaggccgccgctaaggacaagagcagcgataagaaagtccagaccaagggcaagcggggcgccaaaggcaaacaggccgaggtggccaaccaggagacaaaggaagatctgcctgctgagaacggcgaaaccaagaccgaggaatctccagcttctgacgaggccggagagaaggaggccaaaagcgacagcggctctgagacacctggaacaagcgagagcgccaccccggaatcctatgaacaacttgcaccacaaccgtgtgtgggagaaactttacattctagcctcccacgagacagtgaactgtttgtgcctgaagaggggagcagcgagaaggagagcgaggacgcgccaaaaacatctcctccgacgcctgggaaacatggtttggaacagactggggaggaaaaagtgatggtgactgttcctgacaaaaatccaccttgtccttgctgtggtacccgggtaaactctgtgttgaatctgattgaacatctgaaagtgtcacacgggaaaaggggggtttgttttcggtgtgcaaaatgtggaaaggaaaatagtaactatcacagtgttgtttgtcattttaagaaatgcaggggtccagagacggagaaagccccagctggggagtggatttgtgaggtatgcaacagagattttacaaccaaaattggcctgggacaacacaagagattggcacacccagcagtgagaaatcaggaaaggatcgttgcttcccaaccgaaagaaacatcaaatagaggtgctcacaaaaggtgctggacaaaggaggaggaagaattactaataagactggaggctcagttcgagggaaacaaaaatattaataagcttattgcagaacacataaccaccaaaacagctaagcagatcagtgacaaaaggcgattgctgtccagaaagccagcagaggagccacgtgaggagcctggaacgtgtcatcacaccaggagagcagctgcgagcctgagaacggagcctgagatgagtcatcacgcccaggcagaggacagagataatggacctgggagacgccctctgccaggcagggcagctgccggagggagaacaatggacgagataagacgccaccctgataagggcaacggacagcagagacccaccaagcaaaaatcagaagaacagctgcaggcttactataaaaagacactagaggaacgactttcagctggggcacttaacaccttcccccgagcattcaagcaggtaatggaaggccgggatataaagctagtaatcaatcagacagcgcaggactgcttcggatgcctggaatccataagccaaataagaacggcaacccgagataaaaaggacacggtgacccgggagaaacacccaaagaaaccttttcagaagtggatgaagaagagagcaatcaaaaaaggtaattatcttcggttccagcgtttattttatcttgatagagggaaactggctaaaatcattttagatgatattgaatgcttgtcttgtgacataccactcagtgaaatttattcggtttttaaaacaagatgggaaacaactggtagctttaaaagccttggggactttaaaacttacgggaaggctgacaacactgccttcagagaattaattacggctaaagaaattgagaaaaatgtgcaggaaatgagcaaaggctcggctcccggtccagacgggattactcttggggacgtcgtaaagatggatcccgagttttcccggaccatggagattttcaatttatggttaacaactggtaaaatcccggacatggtgagggggtgcagaaccgttttgattccaaaatcatcaaagccggatcgtttgaaagacattaataactggagacctatcacgatcggttccatcttgctgagactgttctccaggattgtaacagctaggctgagcaaagcgtgccccctgaacccaaggcaaagaggctttatcagagcggcgggatgctctgaaaacttaaaactcctgcaaactataatttggtcggccaaaagagaacacagaccactgggtgttgtattcgtggacatcgccaaggcttttgacaccgtaagccaccagcacatcattcatgctttgcagcaaagagaggtggatccccacatcgtcggtctggtgagcaatatgtacgagaacatcagtacgtatatcaccacaaagaggaacacacacacagacaaaatccagatccgggttggagtaaagcagggtgacccgatgtcgccccttttatttaacctggcaatggaccctctattatgcaagctggaagagagtggcaaaggataccaccgaggacagagcagcatcacagcgatggcatttgcagacgatctggttttgctgagcgactcctgggaaaatatgaatacaaatattagcatactggagaccttctgcaatctgaccggactcaaaacacaggggcaaaagtgccacggcttttacatcaagccgacaaaggactcttacaccatcaatgactgcgctgcctggactatcaacggcacacccctgaacatgatcgaccccggcgaatctgagaaatacctcggcctgcagtttgacccgtggattggaatagcaaggtccggtctctccacaaaactagatttttggcttcagcggatcgatcaagcaccacttaaacctctgcagaaaactgatattctcaaaacatacaccatccctcggctgatctacatagctgaccactcagaagtgaaaagcgcactactcgaaacccttgaccagaagatccggacagcggtcaaggaatggcttcacctacctccgtgcacctgcgatgccatcctgtactcgagcacgagagacggcggtttgggcatcaccaaattggcaggactgatccccagcgtgcaggcccgtagactgcatcggatcgcacagtcatctgacgatacgatgaaatgcttcatggaaaaagagaaaatggaacagctgcataagaaattgtggattcaagctggaggggacagagagaacataccctcgatttgggaagcaccaccgtcgagtgaaccaccaaacaacgtgagcacaaattcggaatgggaagcaccgacccagaaagataaatttccaaagccttgcaattggaggaaaaacgaattcaaaaaatggaccaaattggcatcccaaggccgcggaattgtaaattttgaaagagacaaaattagtaaccattggatccaatactacagacgcatacctcacaggaaactcctcactgcactacaactcagggccaacgtttaccccacgagagaatttctagccaggggtagacaagaccaatacatcaaggcgtgtaggcactgcgatgcggacaacgaatcctgcgcccacatcatcggcaactgcccagtgacacaggacgcccgaatcaagaggcacaattacatctgcgaactgcttctcgaggaggcgaagaagaaggactgggtagtgttcaaggaaccgcacataagggattccaacaaggaactgtacaaacctgacctgatatttgtgaaggatgggcgtgcacttgtcgtggatgtgacagtacggtatgaagcagccaaatcatcgctggaggaagccgctgcagagaaagtgagaaagtacaaacacctggaaacggaagtaagacatctcacgaatgcaaaggacgttacttttgtgggctttcccctaggagcgcgggggaaatggcaccaagataactttaaacttttgactgagcttggcctctccaaatcgaggcaagtgaaaatggcagagactttttccacagtagcgctcttttcatctgtggacattgtacatatgtttgccagtagggccagaaaatctatggttatgtgataataggctgccttctgcggggcttgccttctggccatgcccttcttctctcccttgcacctgtacctcttggtctttgaataaagcctgagtaggaaggaccggtaaaaaaaaaaaaaaaaaaaaaaaaaaaaaaacgttgactaaaaaaaaaaaaaaaaaaaaaaaaaaaaaaaaaaaaaaaaaaaaaaaaaaaaaaaaaaaaaaaaaaaaaa

SEQ ID NO: 10662 - DNA, 5264 bp, synthetic construct
  source 1..5264: mol_type = other DNA
gaaataagagagaaaagaagagtaagaagaaatataagagaattcgccaccatggcccctaagaaaaagcggaaggtgaatgccagcggctctagctgcggcagccccaacagcgccgacaccagcagcgacttcaaggacctgtggaccaagctgaaggaatgccacgaccgggaagtgcagggactccaggtgaaggtcaccaaactcaagcaagaaagaatcctggacgcccagagactggaagaattcttcaccaagaaccagcagctgagagagcagcagaaagtgctgcacgagacaatcaaggttctggaagatagactgcgggccggcctgtgcgacagatgcgccgtgaccgaggaacacatgcgcaaaaagcagcaggagttcgagaacattagacagcaaaatctgaaattgatcacagagctgatgaacgagagaaacacactgcaggaggagaacaagaagctgagcgagcagctgcaacagaagatcgagaatgatcagcaacaccaggccgctgagctggaatgtgaagaggacgtgatccccgacagcccaatcacagctttcagcttttctggcgtgaacagactgaggcggaaggaaaacccccacgtgcggtacatcgagcagacccataccaagctggaacacagcgtgtgtgccaacgagatgagaaaggtgtccaagtcctccacccatccccagcacaaccctaacgaaaatgagatcctggtggctgatacctacgaccagtctcagagccctatggccaaggcccacggcaccagctcttatacccctgataagagctccttcaacctggccaccgtggtggccgagacactgggcctgggcgtgcaggaggaaagcgagacacagggcccaatgagccctctgggagatgagctgtaccactgcctggaaggcaaccacaagaaacagccttttgagtccggctccgagactcctggaacaagcgagagcgctacacctgagggcagccctaagagaaaggtgtccagcgccgagggcgctgccaaggaagagcctaaacggagaagcgccagactgagcgccaagccccccgccaaggtggaagccaagcctaagaaggccgccgctaaggacaagagcagcgataagaaagtccagaccaagggcaagcggggcgccaaaggcaaacaggccgaggtggccaaccaggagacaaaggaagatctgcctgctgagaacggcgaaaccaagaccgaggaatctccagcttctgacgaggccggagagaaggaggccaaaagcgacagcggctctgagacacctggaacaagcgagagcgccaccccggaatcctatgaacaacttgcaccacaaccgtgtgtgggagaaactttacattctagcctcccacgagacagtgaactgtttgtgcctgaagaggggagcagcgagaaggagagcgaggacgcgccaaaaacatctcctccgacgcctgggaaacatggtttggaacagactggggaggaaaaagtgatggtgactgttcctgacaaaaatccaccttgtccttgctgtggtacccgggtaaactctgtgttgaatctgattgaacatctgaaagtgtcacacgggaaaaggggggtttgttttcggtgtgcaaaatgtggaaaggaaaatagtaactatcacagtgttgtttgtcattttaagaaatgcaggggtccagagacggagaaagccccagctggggagtggatttgtgaggtatgcaacagagattttacaaccaaaattggcctgggacaacacaagagattggcacacccagcagtgagaaatcaggaaaggatcgttgcttcccaaccgaaagaaacatcaaatagaggtgctcacaaaaggtgctggacaaaggaggaggaagaattactaataagactggaggctcagttcgagggaaacaaaaatattaataagcttattgcagaacacataaccaccaaaacagctaagcagatcagtgacaaaaggcgattgctgtccagaaagccagcagaggagccacgtgaggagcctggaacgtgtcatcacaccaggagagcagctgcgagcctgagaacggagcctgagatgagtcatcacgcccaggcagaggacagagataatggacctgggagacgccctctgccaggcagggcagctgccggagggagaacaatggacgagataagacgccaccctgataagggcaacggacagcagagacccaccaagcaaaaatcagaagaacagctgcaggcttactataaaaagacactagaggaacgactttcagctggggcacttaacaccttcccccgagcattcaagcaggtaatggaaggccgggatataaagctagtaatcaatcagacagcgcaggactgcttcggatgcctggaatccataagccaaataagaacggcaacccgagataaaaaggacacggtgacccgggagaaacacccaaagaaaccttttcagaagtggatgaagaagagagcaatcaaaaaaggtaattatcttcggttccagcgtttattttatcttgatagagggaaactggctaaaatcattttagatgatattgaatgcttgtcttgtgacataccactcagtgaaatttattcggtttttaaaacaagatgggaaacaactggtagctttaaaagccttggggactttaaaacttacgggaaggctgacaacactgccttcagagaattaattacggctaaagaaattgagaaaaatgtgcaggaaatgagcaaaggctcggctcccggtccagacgggattactcttggggacgtcgtaaagatggatcccgagttttcccggaccatggagattttcaatttatggttaacaactggtaaaatcccggacatggtgagggggtgcagaaccgttttgattccaaaatcatcaaagccggatcgtttgaaagacattaataactggagacctatcacgatcggttccatcttgctgagactgttctccaggattgtaacagctaggctgagcaaagcgtgccccctgaacccaaggcaaagaggctttatcagagcggcgggatgctctgaaaacttaaaactcctgcaaactataatttggtcggccaaaagagaacacagaccactgggtgttgtattcgtggacatcgccaaggcttttgacaccgtaagccaccagcacatcattcatgctttgcagcaaagagaggtggatccccacatcgtcggtctggtgagcaatatgtacgagaacatcagtacgtatatcaccacaaagaggaacacacacacagacaaaatccagatccgggttggagtaaagcagggtgacccgatgtcgccccttttatttaacctggcaatggaccctctattatgcaagctggaagagagtggcaaaggataccaccgaggacagagcagcatcacagcgatggcatttgcagacgatctggttttgctgagcgactcctgggaaaatatgaatacaaatattagcatactggagaccttctgcaatctgaccggactcaaaacacaggggcaaaagtgccacggcttttacatcaagccgacaaaggactcttacaccatcaatgactgcgctgcctggactatcaacggcacacccctgaacatgatcgaccccggcgaatctgagaaatacctcggcctgcagtttgacccgtggattggaatagcaaggtccggtctctccacaaaactagatttttggcttcagcggatcgatcaagcaccacttaaacctctgcagaaaactgatattctcaaaacatacaccatccctcggctgatctacatagctgaccactcagaagtgaaaagcgcactactcgaaacccttgaccagaagatccggacagcggtcaaggaatggcttcacctacctccgtgcacctgcgatgccatcctgtactcgagcacgagagacggcggtttgggcatcaccaaattggcaggactgatccccagcgtgcaggcccgtagactgcatcggatcgcacagtcatctgacgatacgatgaaatgcttcatggaaaaagagaaaatggaacagctgcataagaaattgtggattcaagctggaggggacagagagaacataccctcgatttgggaagcaccaccgtcgagtgaaccaccaaacaacgtgagcacaaattcggaatgggaagcaccgacccagaaagataaatttccaaagccttgcaattggaggaaaaacgaattcaaaaaatggaccaaattggcatcccaaggccgcggaattgtaaattttgaaagagacaaaattagtaaccattggatccaatactacagacgcatacctcacaggaaactcctcactgcactacaactcagggccaacgtttaccccacgagagaatttctagccaggggtagacaagaccaatacatcaaggcgtgtaggcactgcgatgcggacaacgaatcctgcgcccacatcatcggcaactgcccagtgacacaggacgcccgaatcaagaggcacaattacatctgcgaactgcttctcgaggaggcgaagaagaaggactgggtagtgttcaaggaaccgcacataagggattccaacaaggaactgtacaaacctgacctgatatttgtgaaggatgggcgtgcacttgtcgtggatgtgacagtacggtatgaagcagccaaatcatcgctggaggaagccgctgcagagaaagtgagaaagtacaaacacctggaaacggaagtaagacatctcacgaatgcaaaggacgttacttttgtgggctttcccctaggagcgcgggggaaatggcaccaagataactttaaacttttgactgagcttggcctctccaaatcgaggcaagtgaaaatggcagagactttttccacagtagcgctcttttcatctgtggacattgtacatatgtttgccagtagggccagaaaatctatggttatgtgataataggctgccttctgcggggcttgccttctggccatgcccttcttctctcccttgcacctgtacctcttggtctttgaataaagcctgagtaggaaggaccggtaaaaaaaaaaaaaaaaaaaaaaaaaaaaaaacgttgactaaaaaaaaaaaaaaaaaaaaaaaaaaaaaaaaaaaaaaaaaaaaaaaaaaaaaaaaaaaaaaaaaaaaaa

SEQ ID NO: 10663 - DNA, 5264 bp, synthetic construct
  source 1..5264: mol_type = other DNA
gaaataagagagaaaagaagagtaagaagaaatataagagaattcgccaccatggcccctaagaaaaagcggaaggtgaatatcagcggctctagctgcggcagccccaacagcgccgacaccagcagcgacttcaaggacctgtggaccaagctgaaggaatgccacgaccgggaagtgcagggactccaggtgaaggtcaccaaactcaagcaagaaagaatcctggacgcccagagactggaagaattcttcaccaagaaccagcagctgagagagcagcagaaagtgctgcacgagacaatcaaggttctggaagatagactgcgggccggcctgtgcgacagatgcgccgtgaccgaggaacacatgcgcaaaaagcagcaggagttcgagaacattagacagcaaaatctgaaattgatcacagagctgatgaacgagagaaacacactgcaggaggagaacaagaagctgagcgagcagctgcaacagaagatcgagaatgatcagcaacaccaggccgctgagctggaatgtgaagaggacgtgatccccgacagcccaatcacagctttcagcttttctggcgtgaacagactgaggcggaaggaaaacccccacgtgcggtacatcgagcagacccataccaagctggaacacagcgtgtgtgccaacgagatgagaaaggtgtccaagtcctccacccatccccagcacaaccctaacgaaaatgagatcctggtggctgatacctacgaccagtctcagagccctatggccaaggcccacggcaccagctcttatacccctgataagagctccttcaacctggccaccgtggtggccgagacactgggcctgggcgtgcaggaggaaagcgagacacagggcccaatgagccctctgggagatgagctgtaccactgcctggaaggcaaccacaagaaacagccttttgagtccggctccgagactcctggaacaagcgagagcgctacacctgagggcagccctaagagaaaggtgtccagcgccgagggcgctgccaaggaagagcctaaacggagaagcgccagactgagcgccaagccccccgccaaggtggaagccaagcctaagaaggccgccgctaaggacaagagcagcgataagaaagtccagaccaagggcaagcggggcgccaaaggcaaacaggccgaggtggccaaccaggagacaaaggaagatctgcctgctgagaacggcgaaaccaagaccgaggaatctccagcttctgacgaggccggagagaaggaggccaaaagcgacagcggctctgagacacctggaacaagcgagagcgccaccccggaatcctatgaacaacttgcaccacaaccgtgtgtgggagaaactttacattctagcctcccacgagacagtgaactgtttgtgcctgaagaggggagcagcgagaaggagagcgaggacgcgccaaaaacatctcctccgacgcctgggaaacatggtttggaacagactggggaggaaaaagtgatggtgactgttcctgacaaaaatccaccttgtccttgctgtggtacccgggtaaactctgtgttgaatctgattgaacatctgaaagtgtcacacgggaaaaggggggtttgttttcggtgtgcaaaatgtggaaaggaaaatagtaactatcacagtgttgtttgtcattttaagaaatgcaggggtccagagacggagaaagccccagctggggagtggatttgtgaggtatgcaacagagattttacaaccaaaattggcctgggacaacacaagagattggcacacccagcagtgagaaatcaggaaaggatcgttgcttcccaaccgaaagaaacatcaaatagaggtgctcacaaaaggtgctggacaaaggaggaggaagaattactaataagactggaggctcagttcgagggaaacaaaaatattaataagcttattgcagaacacataaccaccaaaacagctaagcagatcagtgacaaaaggcgattgctgtccagaaagccagcagaggagccacgtgaggagcctggaacgtgtcatcacaccaggagagcagctgcgagcctgagaacggagcctgagatgagtcatcacgcccaggcagaggacagagataatggacctgggagacgccctctgccaggcagggcagctgccggagggagaacaatggacgagataagacgccaccctgataagggcaacggacagcagagacccaccaagcaaaaatcagaagaacagctgcaggcttactataaaaagacactagaggaacgactttcagctggggcacttaacaccttcccccgagcattcaagcaggtaatggaaggccgggatataaagctagtaatcaatcagacagcgcaggactgcttcggatgcctggaatccataagccaaataagaacggcaacccgagataaaaaggacacggtgacccgggagaaacacccaaagaaaccttttcagaagtggatgaagaagagagcaatcaaaaaaggtaattatcttcggttccagcgtttattttatcttgatagagggaaactggctaaaatcattttagatgatattgaatgcttgtcttgtgacataccactcagtgaaatttattcggtttttaaaacaagatgggaaacaactggtagctttaaaagccttggggactttaaaacttacgggaaggctgacaacactgccttcagagaattaattacggctaaagaaattgagaaaaatgtgcaggaaatgagcaaaggctcggctcccggtccagacgggattactcttggggacgtcgtaaagatggatcccgagttttcccggaccatggagattttcaatttatggttaacaactggtaaaatcccggacatggtgagggggtgcagaaccgttttgattccaaaatcatcaaagccggatcgtttgaaagacattaataactggagacctatcacgatcggttccatcttgctgagactgttctccaggattgtaacagctaggctgagcaaagcgtgccccctgaacccaaggcaaagaggctttatcagagcggcgggatgctctgaaaacttaaaactcctgcaaactataatttggtcggccaaaagagaacacagaccactgggtgttgtattcgtggacatcgccaaggcttttgacaccgtaagccaccagcacatcattcatgctttgcagcaaagagaggtggatccccacatcgtcggtctggtgagcaatatgtacgagaacatcagtacgtatatcaccacaaagaggaacacacacacagacaaaatccagatccgggttggagtaaagcagggtgacccgatgtcgccccttttatttaacctggcaatggaccctctattatgcaagctggaagagagtggcaaaggataccaccgaggacagagcagcatcacagcgatggcatttgcagacgatctggttttgctgagcgactcctgggaaaatatgaatacaaatattagcatactggagaccttctgcaatctgaccggactcaaaacacaggggcaaaagtgccacggcttttacatcaagccgacaaagaagtcttacaccatcaatgactgcgctgcctggactatcaacggcacacccctgaacatgatcgaccccggcgaatctgagaaatacctcggcctgcagtttgacccgtggattggaatagcaaggtccggtctctccacaaaactagatttttggcttcagcggatcgatcaagcaccacttaaacctctgcagaaaactgatattctcaaaacatacaccatccctcggctgatctacatagctgaccactcagaagtgaaaagcgcactactcgaaacccttgaccagaagatccggacagcggtcaaggaatggcttcacctacctccgtgcacctgcgatgccatcctgtactcgagcacgagagacggcggtttgggcatcaccaaattggcaggactgatccccagcgtgcaggcccgtagactgcatcggatcgcacagtcatctgacgatacgatgaaatgcttcatggaaaaagagaaaatggaacagctgcataagaaattgtggattcaagctggaggggacagagagaacataccctcgatttgggaagcaccaccgtcgagtgaaccaccaaacaacgtgagcacaaattcggaatgggaagcaccgacccagaaaaacaaatttccaaagccttgcaattggaggaaaaacgaattcaaaaaatggaccaaattggcatcccaaggccgcggaattgtaaattttgaaagagacaaaattagtaaccattggatccaatactacagacgcatacctcacaggaaactcctcactgcactacaactcagggccaacgtttaccccacgagagaatttctagccaggggtagacaagaccaatacatcaaggcgtgtaggcactgcgatgcggacaacgaatcctgcgcccacatcatcggcaactgcccagtgacacaggacgcccgaatcaagaggcacaattacatctgcgaactgcttctcgaggaggcgaagaagaaggactgggtagtgttcaaggaaccgcacataagggattccaacaaggaactgtacaaacctgacctgatatttgtgaaggatgggcgtgcacttgtcgtggatgtgacagtacggtatgaagcagccaaatcatcgctggaggaagccgctgcagagaaagtgagaaagtacaaacacctggaaacggaagtaagacatctcacgaatgcaaaggacgttacttttgtgggctttcccctaggagcgcgggggaaatggcaccaagataactttaaacttttgactgagcttggcctctccaaatcgaggcaagtgaaaatggcagagactttttccacagtagcgctcttttcatctgtggacattgtacatatgtttgccagtagggccagaaaatctatggttatgtgataataggctgccttctgcggggcttgccttctggccatgcccttcttctctcccttgcacctgtacctcttggtctttgaataaagcctgagtaggaaggaccggtaaaaaaaaaaaaaaaaaaaaaaaaaaaaaaacgttgactaaaaaaaaaaaaaaaaaaaaaaaaaaaaaaaaaaaaaaaaaaaaaaaaaaaaaaaaaaaaaaaaaaaaaa

SEQ ID NO: 10664 - DNA, 5264 bp, synthetic construct
  source 1..5264: mol_type = other DNA
gaaataagagagaaaagaagagtaagaagaaatataagagaattcgccaccatggcccctaagaaaaagcggaaggtgaatatcagcggctctagctgcggcagccccaacagcgccgacaccagcagcgacttcaaggacctgtggaccaagctgaaggaatgccacgaccgggaagtgcagggactccaggtgaaggtcaccaaactcaagcaagaaagaatcctggacgcccagagactggaagaattcttcaccaagaaccagcagctgagagagcagcagaaagtgctgcacgagacaatcaaggttctggaagatagactgcgggccggcctgtgcgacagatgcgccgtgaccgaggaacacatgcgcaaaaagcagcaggagttcgagaacattagacagcaaaatctgaaattgatcacagagctgatgaacgagagaaacacactgcaggaggagaacaagaagctgagcgagcagctgcaacagaagatcgagaatgatcagcaacaccaggccgctgagctggaatgtgaagaggacgtgatccccgacagcccaatcacagctttcagcttttctggcgtgaacagactgaggcggaaggaaaacccccacgtgcggtacatcgagcagacccataccaagctggaacacagcgtgtgtgccaacgagatgagaaaggtgtccaagtcctccacccatccccagcacaaccctaacgaaaatgagatcctggtggctgatacctacgaccagtctcagagccctatggccaaggcccacggcaccagctcttatacccctgataagagctccttcaacctggccaccgtggtggccgagacactgggcctgggcgtgcaggaggaaagcgagacacagggcccaatgagccctctgggagatgagctgtaccactgcctggaaggcaaccacaagaaacagccttttgagtccggctccgagactcctggaacaagcgagagcgctacacctgagggcagccctaagagaaaggtgtccagcgccgagggcgctgccaaggaagagcctaaacggagaagcgccagactgagcgccaagccccccgccaaggtggaagccaagcctaagaaggccgccgctaaggacaagagcagcgataagaaagtccagaccaagggcaagcggggcgccaaaggcaaacaggccgaggtggccaaccaggagacaaaggaagatctgcctgctgagaacggcgaaaccaagaccgaggaatctccagcttctgacgaggccggagagaaggaggccaaaagcgacagcggctctgagacacctggaacaagcgagagcgccaccccggaatcctatgaacaacttgcaccacaaccgtgtgtgggagaaactttacattctagcctcccacgagacagtgaactgtttgtgcctgaagaggggagcagcgagaaggagagcgaggacgcgccaaaaacatctcctccgacgcctgggaaacatggtttggaacagactggggaggaaaaagtgatggtgactgttcctgacaaaaatccaccttgtccttgctgtggtacccgggtaaactctgtgttgaatctgattgaacatctgaaagtgtcacacgggaaaaggggggtttgttttcggtgtgcaaaatgtggaaaggaaaatagtaactatcacagtgttgtttgtcattttaagaaatgcaggggtccagagacggagaaagccccagctggggagtggatttgtgaggtatgcaacagagattttacaaccaaaattggcctgggacaacacaagagattggcacacccagcagtgagaaatcaggaaaggatcgttgcttcccaaccgaaagaaacatcaaatagaggtgctcacaaaaggtgctggacaaaggaggaggaagaattactaataagactggaggctcagttcgagggaaacaaaaatattaataagcttattgcagaacacataaccaccaaaacagctaagcagatcagtgacaaaaggcgattgctgtccagaaagccagcagaggagccacgtgaggagcctggaacgtgtcatcacaccaggagagcagctgcgagcctgagaacggagcctgagatgagtcatcacgcccaggcagaggacagagataatggacctgggagacgccctctgccaggcagggcagctgccggagggagaacaatggacgagataagacgccaccctgataagggcaacggacagcagagacccaccaagcaaaaatcagaagaacagctgcaggcttactataaaaagacactagaggaacgactttcagctggggcacttaacaccttcccccgagcattcaagcaggtaatggaaggccgggatataaagctagtaatcaatcagacagcgcaggactgcttcggatgcctggaatccataagccaaataagaacggcaacccgagataaaaaggacacggtgacccgggagaaacacccaaagaaaccttttcagaagtggatgaagaagagagcaatcaaaaaaggtaattatcttcggttccagcgtttattttatcttgatagagggaaactggctaaaatcattttagatgatattgaatgcttgtcttgtgacataccactcagtgaaatttattcggtttttaaaacaagatgggaaacaactggtagctttaaaagccttggggactttaaaacttacgggaaggctgacaacactgccttcagagaattaattacggctaaagaaattgagaaaaatgtgcaggaaatgagcaaaggctcggctcccggtccagacgggattactcttggggacgtcgtaaagatggatcccgagttttcccggaccatggagattttcaatttatggttaacaactggtaaaatcccggacatggtgagggggtgcagaaccgttttgattccaaaatcatcaaagccggatcgtttgaaagacattaataactggagacctatcacgatcggttccatcttgctgagactgttctccaggattgtaacagctaggctgagcaaagcgtgccccctgaacccaaggcaaagaggctttatcagagcggcgggatgctctgaaaacttaaaactcctgcaaactataatttggtcggccaaaagagaacacagaccactgggtgttgtattcgtggacatcgccaaggcttttgacaccgtaagccaccagcacatcattcatgctttgcagcaaagagaggtggatccccacatcgtcggtctggtgagcaatatgtacgagaacatcagtacgtatatcaccacaaagaggaacacacacacagacaaaatccagatccgggttggagtaaagcagggtgacccgatgtcgccccttttatttaacctggcaatggaccctctattatgcaagctggaagagagtggcaaaggataccaccgaggacagagcagcatcacagcgatggcatttgcagacgatctggttttgctgagcgactcctgggaaaatatgaatacaaatattagcatactggagaccttctgcaatctgaccggactcaaaacacaggggcaaaagtgccacggcttttacatcaagccgacaaagaagtcttacaccatcaatgactgcgctgcctggactatcaacggcacacccctgaagatgatcgaccccggcgaatctgagaaatacctcggcctgcagtttgacccgtggattggaatagcaaggtccggtctctccacaaaactagatttttggcttcagcggatcgatcaagcaccacttaaacctctgcagaaaactgatattctcaaaacatacaccatccctcggctgatctacatagctgaccactcagaagtgaaaagcgcactactcgaaacccttgaccagaagatccggacagcggtcaaggaatggcttcacctacctccgtgcacctgcgatgccatcctgtactcgagcacgagagacggcggtttgggcatcaccaaattggcaggactgatccccagcgtgcaggcccgtagactgcatcggatcgcacagtcatctgacgatacgatgaaatgcttcatggaaaaagagaaaatggaacagctgcataagaaattgtggattcaagctggaggggacagagagaacataccctcgatttgggaagcaccaccgtcgagtgaaccaccaaacaacgtgagcacaaattcggaatgggaagcaccgacccagaaagataaatttccaaagccttgcaattggaggaaaaacgaattcaaaaaatggaccaaattggcatcccaaggccgcggaattgtaaattttgaaagagacaaaattagtaaccattggatccaatactacagacgcatacctcacaggaaactcctcactgcactacaactcagggccaacgtttaccccacgagagaatttctagccaggggtagacaagaccaatacatcaaggcgtgtaggcactgcgatgcggacaacgaatcctgcgcccacatcatcggcaactgcccagtgacacaggacgcccgaatcaagaggcacaattacatctgcgaactgcttctcgaggaggcgaagaagaaggactgggtagtgttcaaggaaccgcacataagggattccaacaaggaactgtacaaacctgacctgatatttgtgaaggatgggcgtgcacttgtcgtggatgtgacagtacggtatgaagcagccaaatcatcgctggaggaagccgctgcagagaaagtgagaaagtacaaacacctggaaacggaagtaagacatctcacgaatgcaaaggacgttacttttgtgggctttcccctaggagcgcgggggaaatggcaccaagataactttaaacttttgactgagcttggcctctccaaatcgaggcaagtgaaaatggcagagactttttccacagtagcgctcttttcatctgtggacattgtacatatgtttgccagtagggccagaaaatctatggttatgtgataataggctgccttctgcggggcttgccttctggccatgcccttcttctctcccttgcacctgtacctcttggtctttgaataaagcctgagtaggaaggaccggtaaaaaaaaaaaaaaaaaaaaaaaaaaaaaaacgttgactaaaaaaaaaaaaaaaaaaaaaaaaaaaaaaaaaaaaaaaaaaaaaaaaaaaaaaaaaaaaaaaaaaaaaa

SEQ ID NO: 10665 - DNA, 5264 bp, synthetic construct
  source 1..5264: mol_type = other DNA
gaaataagagagaaaagaagagtaagaagaaatataagagaattcgccaccatggcccctaagaaaaagcggaaggtgaatatcagcggctctagctgcggcagccccaacagcgccgacaccagcagcgacttcaaggacctgtggaccaagctgaaggaatgccacgaccgggaagtgcagggactccaggtgaaggtcaccaaactcaagcaagaaagaatcctggacgcccagagactggaagaattcttcaccaagaaccagcagctgagagagcagcagaaagtgctgcacgagacaatcaaggttctggaagatagactgcgggccggcctgtgcgacagatgcgccgtgaccgaggaacacatgcgcaaaaagcagcaggagttcgagaacattagacagcaaaatctgaaattgatcacagagctgatgaacgagagaaacacactgcaggaggagaacaagaagctgagcgagcagctgcaacagaagatcgagaatgatcagcaacaccaggccgctgagctggaatgtgaagaggacgtgatccccgacagcccaatcacagctttcagcttttctggcgtgaacagactgaggcggaaggaaaacccccacgtgcggtacatcgagcagacccataccaagctggaacacagcgtgtgtgccaacgagatgagaaaggtgtccaagtcctccacccatccccagcacaaccctaacgaaaatgagatcctggtggctgatacctacgaccagtctcagagccctatggccaaggcccacggcaccagctcttatacccctgataagagctccttcaacctggccaccgtggtggccgagacactgggcctgggcgtgcaggaggaaagcgagacacagggcccaatgagccctctgggagatgagctgtaccactgcctggaaggcaaccacaagaaacagccttttgagtccggctccgagactcctggaacaagcgagagcgctacacctgagggcagccctaagagaaaggtgtccagcgccgagggcgctgccaaggaagagcctaaacggagaagcgccagactgagcgccaagccccccgccaaggtggaagccaagcctaagaaggccgccgctaaggacaagagcagcgataagaaagtccagaccaagggcaagcggggcgccaaaggcaaacaggccgaggtggccaaccaggagacaaaggaagatctgcctgctgagaacggcgaaaccaagaccgaggaatctccagcttctgacgaggccggagagaaggaggccaaaagcgacagcggctctgagacacctggaacaagcgagagcgccaccccggaatcctatgaacaacttgcaccacaaccgtgtgtgggagaaactttacattctagcctcccacgagacagtgaactgtttgtgcctgaagaggggagcagcgagaaggagagcgaggacgcgccaaaaacatctcctccgacgcctgggaaacatggtttggaacagactggggaggaaaaagtgatggtgactgttcctgacaaaaatccaccttgtccttgctgtggtacccgggtaaactctgtgttgaatctgattgaacatctgaaagtgtcacacgggaaaaggggggtttgttttcggtgtgcaaaatgtggaaaggaaaatagtaactatcacagtgttgtttgtcattttaagaaatgcaggggtccagagacggagaaagccccagctggggagtggatttgtgaggtatgcaacagagattttacaaccaaaattggcctgggacaacacaagagattggcacacccagcagtgagaaatcaggaaaggatcgttgcttcccaaccgaaagaaacatcaaatagaggtgctcacaaaaggtgctggacaaaggaggaggaagaattactaataagactggaggctcagttcgagggaaacaaaaatattaataagcttattgcagaacacataaccaccaaaacagctaagcagatcagtgacaaaaggcgattgctgtccagaaagccagcagaggagccacgtgaggagcctggaacgtgtcatcacaccaggagagcagctgcgagcctgagaacggagcctgagatgagtcatcacgcccaggcagaggacagagataatggacctgggagacgccctctgccaggcagggcagctgccggagggagaacaatggacgagataagacgccaccctgataagggcaacggacagcagagacccaccaagcaaaaatcagaagaacagctgcaggcttactataaaaagacactagaggaacgactttcagctggggcacttaacaccttcccccgagcattcaagcaggtaatggaaggccgggatataaagctagtaatcaatcagacagcgcaggactgcttcggatgcctggaatccataagccaaataagaacggcaacccgagataaaaaggacacggtgacccgggagaaacacccaaagaaaccttttcagaagtggatgaagaagagagcaatcaaaaaaggtaattatcttcggttccagcgtttattttatcttgatagagggaaactggctaaaatcattttagatgatattgaatgcttgtcttgtgacataccactcagtgaaatttattcggtttttaaaacaagatgggaaacaactggtagctttaaaagccttggggactttaaaacttacgggaaggctgacaacactgccttcagagaattaattacggctaaagaaattgagaaaaatgtgcaggaaatgagcaaaggctcggctcccggtccagacgggattactcttggggacgtcgtaaagatggatcccgagttttcccggaccatggagattttcaatttatggttaacaactggtaaaatcccggacatggtgagggggtgcagaaccgttttgattccaaaatcatcaaagccggatcgtttgaaagacattaataactggagacctatcacgatcggttccatcttgctgagactgttctccaggattgtaacaaagaggctgagcaaagcgtgccccctgaacccaaggcaaagaggctttatcagagcggcgggatgctctgaaaacttaaaactcctgcaaactataatttggtcggccaaaagagaacacagaccactgggtgttgtattcgtggacatcgccaaggcttttgacaccgtaagccaccagcacatcattcatgctttgcagcaaagagaggtggatccccacatcgtcggtctggtgagcaatatgtacgagaacatcagtacgtatatcaccacaaagaggaacacacacacagacaaaatccagatccgggttggagtaaagcagggtgacccgatgtcgccccttttatttaacctggcaatggaccctctattatgcaagctggaagagagtggcaaaggataccaccgaggacagagcagcatcacagcgatggcatttgcagacgatctggttttgctgagcgactcctgggaaaatatgaatacaaatattagcatactggagaccttctgcaatctgaccggactcaaaacacaggggcaaaagtgccacggcttttacatcaagccgacaaagaagtcttacaccatcaatgactgcgctgcctggactatcaacggcacacccctgaacatgatcgaccccggcgaatctgagaaatacctcggcctgcagtttgacccgtggattggaatagcaaggtccggtctctccacaaaactagatttttggcttcagcggatcgatcaagcaccacttaaacctctgcagaaaactgatattctcaaaacatacaccatccctcggctgatctacatagctgaccactcagaagtgaaaagcgcactactcgaaacccttgaccagaagatccggacagcggtcaaggaatggcttcacctacctccgtgcacctgcgatgccatcctgtactcgagcacgagagacggcggtttgggcatcaccaaattggcaggactgatccccagcgtgcaggcccgtagactgcatcggatcgcacagtcatctgacgatacgatgaaatgcttcatggaaaaagagaaaatggaacagctgcataagaaattgtggattcaagctggaggggacagagagaacataccctcgatttgggaagcaccaccgtcgagtgaaccaccaaacaacgtgagcacaaattcggaatgggaagcaccgacccagaaagataaatttccaaagccttgcaattggaggaaaaacgaattcaaaaaatggaccaaattggcatcccaaggccgcggaattgtaaattttgaaagagacaaaattagtaaccattggatccaatactacagacgcatacctcacaggaaactcctcactgcactacaactcagggccaacgtttaccccacgagagaatttctagccaggggtagacaagaccaatacatcaaggcgtgtaggcactgcgatgcggacaacgaatcctgcgcccacatcatcggcaactgcccagtgacacaggacgcccgaatcaagaggcacaattacatctgcgaactgcttctcgaggaggcgaagaagaaggactgggtagtgttcaaggaaccgcacataagggattccaacaaggaactgtacaaacctgacctgatatttgtgaaggatgggcgtgcacttgtcgtggatgtgacagtacggtatgaagcagccaaatcatcgctggaggaagccgctgcagagaaagtgagaaagtacaaacacctggaaacggaagtaagacatctcacgaatgcaaaggacgttacttttgtgggctttcccctaggagcgcgggggaaatggcaccaagataactttaaacttttgactgagcttggcctctccaaatcgaggcaagtgaaaatggcagagactttttccacagtagcgctcttttcatctgtggacattgtacatatgtttgccagtagggccagaaaatctatggttatgtgataataggctgccttctgcggggcttgccttctggccatgcccttcttctctcccttgcacctgtacctcttggtctttgaataaagcctgagtaggaaggaccggtaaaaaaaaaaaaaaaaaaaaaaaaaaaaaaacgttgactaaaaaaaaaaaaaaaaaaaaaaaaaaaaaaaaaaaaaaaaaaaaaaaaaaaaaaaaaaaaaaaaaaaaaa

SEQ ID NO: 10666 - DNA, 5264 bp, synthetic construct
  source 1..5264: mol_type = other DNA
gaaataagagagaaaagaagagtaagaagaaatataagagaattcgccaccatggcccctaagaaaaagcggaaggtgaatatcagcggctctagctgcggcagccccaacagcgccgacaccagcagcgacttcaaggacctgtggaccaagctgaaggaatgccacgaccgggaagtgcagggactccaggtgaaggtcaccaaactcaagcaagaaagaatcctggacgcccagagactggaagaattcttcaccaagaaccagcagctgagagagcagcagaaagtgctgcacgagacaatcaaggttctggaagatagactgcgggccggcctgtgcgacagatgcgccgtgaccgaggaacacatgcgcaaaaagcagcaggagttcgagaacattagacagcaaaatctgaaattgatcacagagctgatgaacgagagaaacacactgcaggaggagaacaagaagctgagcgagcagctgcaacagaagatcgagaatgatcagcaacaccaggccgctgagctggaatgtgaagaggacgtgatccccgacagcccaatcacagctttcagcttttctggcgtgaacagactgaggcggaaggaaaacccccacgtgcggtacatcgagcagacccataccaagctggaacacagcgtgtgtgccaacgagatgagaaaggtgtccaagtcctccacccatccccagcacaaccctaacgaaaatgagatcctggtggctgatacctacgaccagtctcagagccctatggccaaggcccacggcaccagctcttatacccctgataagagctccttcaacctggccaccgtggtggccgagacactgggcctgggcgtgcaggaggaaagcgagacacagggcccaatgagccctctgggagatgagctgtaccactgcctggaaggcaaccacaagaaacagccttttgagtccggctccgagactcctggaacaagcgagagcgctacacctgagggcagccctaagagaaaggtgtccagcgccgagggcgctgccaaggaagagcctaaacggagaagcgccagactgagcgccaagccccccgccaaggtggaagccaagcctaagaaggccgccgctaaggacaagagcagcgataagaaagtccagaccaagggcaagcggggcgccaaaggcaaacaggccgaggtggccaaccaggagacaaaggaagatctgcctgctgagaacggcgaaaccaagaccgaggaatctccagcttctgacgaggccggagagaaggaggccaaaagcgacagcggctctgagacacctggaacaagcgagagcgccaccccggaatcctatgaacaacttgcaccacaaccgtgtgtgggagaaactttacattctagcctcccacgagacagtgaactgtttgtgcctgaagaggggagcagcgagaaggagagcgaggacgcgccaaaaacatctcctccgacgcctgggaaacatggtttggaacagactggggaggaaaaagtgatggtgactgttcctgacaaaaatccaccttgtccttgctgtggtacccgggtaaactctgtgttgaatctgattgaacatctgaaagtgtcacacgggaaaaggggggtttgttttcggtgtgcaaaatgtggaaaggaaaatagtaactatcacagtgttgtttgtcattttaagaaatgcaggggtccagagacggagaaagccccagctggggagtggatttgtgaggtatgcaacagagattttacaaccaaaattggcctgggacaacacaagagattggcacacccagcagtgagaaatcaggaaaggatcgttgcttcccaaccgaaagaaacatcaaatagaggtgctcacaaaaggtgctggacaaaggaggaggaagaattactaataagactggaggctcagttcgagggaaacaaaaatattaataagcttattgcagaacacataaccaccaaaacagctaagcagatcagtgacaaaaggcgattgctgtccagaaagccagcagaggagccacgtgaggagcctggaacgtgtcatcacaccaggagagcagctgcgagcctgagaacggagcctgagatgagtcatcacgcccaggcagaggacagagataatggacctgggagacgccctctgccaggcagggcagctgccggagggagaacaatggacgagataagacgccaccctgataagggcaacggacagcagagacccaccaagcaaaaatcagaagaacagctgcaggcttactataaaaagacactagaggaacgactttcagctggggcacttaacaccttcccccgagcattcaagcaggtaatggaaggccgggatataaagctagtaatcaatcagacagcgcaggactgcttcggatgcctggaatccataagccaaataagaacggcaacccgagataaaaaggacacggtgacccgggagaaacacccaaagaaaccttttcagaagtggatgaagaagagagcaatcaaaaaaggtaattatcttcggttccagcgtttattttatcttgatagagggaaactggctaaaatcattttagatgatattgaatgcttgtcttgtgacataccactcagtgaaatttattcggtttttaaaacaagatgggaaacaactggtagctttaaaagccttggggactttaaaacttacgggaaggctgacaacactgccttcagagaattaattacggctaaagaaattgagaaaaatgtgcaggaaatgagcaaaggctcggctcccggtccagacgggattactcttggggacgtcgtaaagatggatcccgagttttcccggaccatggagattttcaatttatggttaacaactggtaaaatcccggacatggtgagggggtgcagaaccgttttgattccaaaatcatcaaagccggatcgtttgaaagacattaataactggagacctatcacgatcggttccatcttgctgagactgttctccaggattgtaacagctaggctgagcaaagcgtgccccctgaacccaaggcaaagaggctttatcagagcggcgggatgctctgaaaacttaaaactcctgcaaactataatttggtcggccaaaagagaacacagaccactgggtgttgtattcgtggacatcgccaaggcttttgacaccgtaagccaccagcacatcattcatgctttgcagcaaagagaggtggatccccacatcgtcggtctggtgagcaatatgtacgagaacatcagtacgtatatcaccacaaagaggaacacacacacagacaaaatccagatccgggttggagtaaagcagggtgacccgatgtcgccccttttatttaacctggcaatggaccctctattatgcaagctggaagagagtggcaaaggataccaccgaggacagagcagcatcacagcgctcgcatttgcagacgatctggttttgctgagcgactcctgggaaaatatgaatacaaatattagcatactggagaccttctgcaatctgaccggactcaaaacacaggggcaaaagtgccacggcttttacatcaagccgacaaagaagtcttacaccatcaatgactgcgctgcctggactatcaacggcacacccctgaacatgatcgaccccggcgaatctgagaaatacctcggcctgcagtttgacccgtggattggaatagcaaggtccggtctctccacaaaactagatttttggcttcagcggatcgatcaagcaccacttaaacctctgcagaaaactgatattctcaaaacatacaccatccctcggctgatctacatagctgaccactcagaagtgaaaagcgcactactcgaaacccttgaccagaagatccggacagcggtcaaggaatggcttcacctacctccgtgcacctgcgatgccatcctgtactcgagcacgagagacggcggtttgggcatcaccaaattggcaggactgatccccagcgtgcaggcccgtagactgcatcggatcgcacagtcatctgacgatacgatgaaatgcttcatggaaaaagagaaaatggaacagctgcataagaaattgtggattcaagctggaggggacagagagaacataccctcgatttgggaagcaccaccgtcgagtgaaccaccaaacaacgtgagcacaaattcggaatgggaagcaccgacccagaaagataaatttccaaagccttgcaattggaggaaaaacgaattcaaaaaatggaccaaattggcatcccaaggccgcggaattgtaaattttgaaagagacaaaattagtaaccattggatccaatactacagacgcatacctcacaggaaactcctcactgcactacaactcagggccaacgtttaccccacgagagaatttctagccaggggtagacaagaccaatacatcaaggcgtgtaggcactgcgatgcggacaacgaatcctgcgcccacatcatcggcaactgcccagtgacacaggacgcccgaatcaagaggcacaattacatctgcgaactgcttctcgaggaggcgaagaagaaggactgggtagtgttcaaggaaccgcacataagggattccaacaaggaactgtacaaacctgacctgatatttgtgaaggatgggcgtgcacttgtcgtggatgtgacagtacggtatgaagcagccaaatcatcgctggaggaagccgctgcagagaaagtgagaaagtacaaacacctggaaacggaagtaagacatctcacgaatgcaaaggacgttacttttgtgggctttcccctaggagcgcgggggaaatggcaccaagataactttaaacttttgactgagcttggcctctccaaatcgaggcaagtgaaaatggcagagactttttccacagtagcgctcttttcatctgtggacattgtacatatgtttgccagtagggccagaaaatctatggttatgtgataataggctgccttctgcggggcttgccttctggccatgcccttcttctctcccttgcacctgtacctcttggtctttgaataaagcctgagtaggaaggaccggtaaaaaaaaaaaaaaaaaaaaaaaaaaaaaaacgttgactaaaaaaaaaaaaaaaaaaaaaaaaaaaaaaaaaaaaaaaaaaaaaaaaaaaaaaaaaaaaaaaaaaaaaa

SEQ ID NO: 10667 - DNA, 5264 bp, synthetic construct
  source 1..5264: mol_type = other DNA
gaaataagagagaaaagaagagtaagaagaaatataagagaattcgccaccatggcccctaagaaaaagcggaaggtgaatatcagcggctctagctgcggcagccccaacagcgccgacaccagcagcgacttcaaggacctgtggaccaagctgaaggaatgccacgaccgggaagtgcagggactccaggtgaaggtcaccaaactcaagcaagaaagaatcctggacgcccagagactggaagaattcttcaccaagaaccagcagctgagagagcagcagaaagtgctgcacgagacaatcaaggttctggaagatagactgcgggccggcctgtgcgacagatgcgccgtgaccgaggaacacatgcgcaaaaagcagcaggagttcgagaacattagacagcaaaatctgaaattgatcacagagctgatgaacgagagaaacacactgcaggaggagaacaagaagctgagcgagcagctgcaacagaagatcgagaatgatcagcaacaccaggccgctgagctggaatgtgaagaggacgtgatccccgacagcccaatcacagctttcagcttttctggcgtgaacagactgaggcggaaggaaaacccccacgtgcggtacatcgagcagacccataccaagctggaacacagcgtgtgtgccaacgagatgagaaaggtgtccaagtcctccacccatccccagcacaaccctaacgaaaatgagatcctggtggctgatacctacgaccagtctcagagccctatggccaaggcccacggcaccagctcttatacccctgataagagctccttcaacctggccaccgtggtggccgagacactgggcctgggcgtgcaggaggaaagcgagacacagggcccaatgagccctctgggagatgagctgtaccactgcctggaaggcaaccacaagaaacagccttttgagtccggctccgagactcctggaacaagcgagagcgctacacctgagggcagccctaagagaaaggtgtccagcgccgagggcgctgccaaggaagagcctaaacggagaagcgccagactgagcgccaagccccccgccaaggtggaagccaagcctaagaaggccgccgctaaggacaagagcagcgataagaaagtccagaccaagggcaagcggggcgccaaaggcaaacaggccgaggtggccaaccaggagacaaaggaagatctgcctgctgagaacggcgaaaccaagaccgaggaatctccagcttctgacgaggccggagagaaggaggccaaaagcgacagcggctctgagacacctggaacaagcgagagcgccaccccggaatcctatgaacaacttgcaccacaaccgtgtgtgggagaaactttacattctagcctcccacgagacagtgaactgtttgtgcctgaagaggggagcagcgagaaggagagcgaggacgcgccaaaaacatctcctccgacgcctgggaaacatggtttggaacagactggggaggaaaaagtgatggtgactgttcctgacaaaaatccaccttgtccttgctgtggtacccgggtaaactctgtgttgaatctgattgaacatctgaaagtgtcacacgggaaaaggggggtttgttttcggtgtgcaaaatgtggaaaggaaaatagtaactatcacagtgttgtttgtcattttaagaaatgcaggggtccagagacggagaaagccccagctggggagtggatttgtgaggtatgcaacagagattttacaaccaaaattggcctgggacaacacaagagattggcacacccagcagtgagaaatcaggaaaggatcgttgcttcccaaccgaaagaaacatcaaatagaggtgctcacaaaaggtgctggacaaaggaggaggaagaattactaataagactggaggctcagttcgagggaaacaaaaatattaataagcttattgcagaacacataaccaccaaaacagctaagcagatcagtgacaaaaggcgattgctgtccagaaagccagcagaggagccacgtgaggagcctggaacgtgtcatcacaccaggagagcagctgcgagcctgagaacggagcctgagatgagtcatcacgcccaggcagaggacagagataatggacctgggagacgccctctgccaggcagggcagctgccggagggagaacaatggacgagataagacgccaccctgataagggcaacggacagcagagacccaccaagcaaaaatcagaagaacagctgcaggcttactataaaaagacactagaggaacgactttcagctggggcacttaacaccttcccccgagcattcaagcaggtaatggaaggccgggatataaagctagtaatcaatcagacagcgcaggactgcttcggatgcctggaatccataagccaaataagaacggcaacccgagataaaaaggacacggtgacccgggagaaacacccaaagaaaccttttcagaagtggatgaagaagagagcaatcaaaaaaggtaattatcttcggttccagcgtttattttatcttgatagagggaaactggctaaaatcattttagatgatattgaatgcttgtcttgtgacataccactcagtgaaatttattcggtttttaaaacaagatgggaaacaactggtagctttaaaagccttggggactttaaaacttacgggaaggctgacaacactgccttcagagaattaattacggctaaagaaattgagaaaaatgtgcaggaaatgagcaaaggctcgagccccggtccagacgggattactcttggggacgtcgtaaagatggatcccgagttttcccggaccatggagattttcaatttatggttaacaactggtaaaatcccggacatggtgagggggtgcagaaccgttttgattccaaaatcatcaaagccggatcgtttgaaagacattaataactggagacctatcacgatcggttccatcttgctgagactgttctccaggattgtaacagctaggctgagcaaagcgtgccccctgaacccaaggcaaagaggctttatcagagcggcgggatgctctgaaaacttaaaactcctgcaaactataatttggtcggccaaaagagaacacagaccactgggtgttgtattcgtggacatcgccaaggcttttgacaccgtaagccaccagcacatcattcatgctttgcagcaaagagaggtggatccccacatcgtcggtctggtgagcaatatgtacgagaacatcagtacgtatatcaccacaaagaggaacacacacacagacaaaatccagatccgggttggagtaaagcagggtgacccgatgtcgccccttttatttaacctggcactcgaccctctattatgcaagctggaagagagtggcaaaggataccaccgaggacagagcagcatcacagcgatggcatttgcagacgatctggttttgctgagcgactcctgggaaaatatgaatacaaatattagcatactggagaccttctgcaatctgaccggactcaaaacacaggggcaaaagtgccacggcttttacatcaagccgacaaagaagtcttacaccatcaatgactgcgctgcctggactatcaacggcacacccctgaacatgatcgaccccggcgaatctgagaaatacctcggcctgcagtttgacccgtggattggaatagcaaggtccggtctctccacaaaactagatttttggcttcagcggatcgatcaagcaccacttaaacctctgcagaaaactgatattctcaaaacatacaccatccctcggctgatctacatagctgaccactcagaagtgaaaagcgcactactcgaaacccttgaccagaagatccggacagcggtcaaggaatggcttcacctacctccgtgcacctgcgatgccatcctgtactcgagcacgagagacggcggtttgggcatcaccaaattggcaggactgatccccagcgtgcaggcccgtagactgcatcggatcgcacagtcatctgacgatacgatgaaatgcttcatggaaaaagagaaaatggaacagctgcataagaaattgtggattcaagctggaggggacagagagaacataccctcgatttgggaagcaccaccgtcgagtgaaccaccaaacaacgtgagcacaaattcggaatgggaagcaccgacccagaaagataaatttccaaagccttgcaattggaggaaaaacgaattcaaaaaatggaccaaattggcatcccaaggccgcggaattgtaaattttgaaagagacaaaattagtaaccattggatccaatactacagacgcatacctcacaggaaactcctcactgcactacaactcagggccaacgtttaccccacgagagaatttctagccaggggtagacaagaccaatacatcaaggcgtgtaggcactgcgatgcggacaacgaatcctgcgcccacatcatcggcaactgcccagtgacacaggacgcccgaatcaagaggcacaattacatctgcgaactgcttctcgaggaggcgaagaagaaggactgggtagtgttcaaggaaccgcacataagggattccaacaaggaactgtacaaacctgacctgatatttgtgaaggatgggcgtgcacttgtcgtggatgtgacagtacggtatgaagcagccaaatcatcgctggaggaagccgctgcagagaaagtgagaaagtacaaacacctggaaacggaagtaagacatctcacgaatgcaaaggacgttacttttgtgggctttcccctaggagcgcgggggaaatggcaccaagataactttaaacttttgactgagcttggcctctccaaatcgaggcaagtgaaaatggcagagactttttccacagtagcgctcttttcatctgtggacattgtacatatgtttgccagtagggccagaaaatctatggttatgtgataataggctgccttctgcggggcttgccttctggccatgcccttcttctctcccttgcacctgtacctcttggtctttgaataaagcctgagtaggaaggaccggtaaaaaaaaaaaaaaaaaaaaaaaaaaaaaaacgttgactaaaaaaaaaaaaaaaaaaaaaaaaaaaaaaaaaaaaaaaaaaaaaaaaaaaaaaaaaaaaaaaaaaaaaa

SEQ ID NO: 10668 - DNA, 6530 bp, synthetic construct
  source 1..6530: mol_type = other DNA
gaaataagagagaaaagaagagtaagaagaaatataagagaattcgccaccatggcccctaagaaaaagcggaaggtgagcgccagccaggacagcagaagccgggacaacggccctgacggaatggagcctgagggagtgatcgaatccaactggaacgagatcgtggacagcttcgacgacatgaacctgagcgagagcctgctgagaggcatctacgcttacggcttcgagaagcctagcgccatccagcaaagagcaatcctgccatgcatcaagggctacgacgtcatcgcccaggcccagagcggcaccggcaaaaccgccaccttcgccatctctatcctgcagcagatcgagctggatctgaaagccacacaagcgttggtgctggcccccacaagagagctggcccagcagatccagaaggtggtgatggctctgggcgactacatgggcgcctcttgtcatgcctgcatcggcggcaccaatgtgcgggctgaagtgcagaagctccagatggaagctccccacatcattgtgggaacaccaggcagggtgttcgatatgctgaatcgccggtacctgtctcctaagtatatcaagatgttcgtgctggacgaggccgacgaaatgctgtctagaggtttcaaggaccagatctacgacatttttcagaaactgaacagcaacacccaggttgtgctgctgtcagccaccatgcctagcgatgtgctcgaggtgaccaagaagttcatgcgggaccctatcagaatcctggtgaagaaagaggagctgactctggagggcatcagacagttctacatcaacgtggaaagagaggaatggaagctggacaccctgtgcgacctgtatgagacactgaccatcacccaggccgtgatctttatcaataccagaagaaaggtcgactggctgacagagaagatgcacgcccgggacttcaccgtgtccgccatgcacggcgatatggaccaaaaggaacgggatgtgattatgagagagttccggtccggcagcagccgggtgctgatcacaacagatctgctggctagaggaatcgatgtgcagcaggtgagcctggtcatcaactacgatctgcctaccaacagagaaaattacatccacagaatcggcagaggcggaagattcggcagaaagggcgtggccataaacatggtgacagaggaagataagcggacccttagagacatcgaaaccttttacaacaccagcatcgaggaaatgcccctgaacgtggccgacctgatctccggctccgagactcctggaacaagcgagagcgctacacctgagggcagcaatatcagcggctctagctgcggcagccccaacagcgccgacaccagcagcgacttcaaggacctgtggaccaagctgaaggaatgccacgaccgggaagtgcagggactccaggtgaaggtcaccaaactcaagcaagaaagaatcctggacgcccagagactggaagaattcttcaccaagaaccagcagctgagagagcagcagaaagtgctgcacgagacaatcaaggttctggaagatagactgcgggccggcctgtgcgacagatgcgccgtgaccgaggaacacatgcgcaaaaagcagcaggagttcgagaacattagacagcaaaatctgaaattgatcacagagctgatgaacgagagaaacacactgcaggaggagaacaagaagctgagcgagcagctgcaacagaagatcgagaatgatcagcaacaccaggccgctgagctggaatgtgaagaggacgtgatccccgacagcccaatcacagctttcagcttttctggcgtgaacagactgaggcggaaggaaaacccccacgtgcggtacatcgagcagacccataccaagctggaacacagcgtgtgtgccaacgagatgagaaaggtgtccaagtcctccacccatccccagcacaaccctaacgaaaatgagatcctggtggctgatacctacgaccagtctcagagccctatggccaaggcccacggcaccagctcttatacccctgataagagctccttcaacctggccaccgtggtggccgagacactgggcctgggcgtgcaggaggaaagcgagacacagggcccaatgagccctctgggagatgagctgtaccactgcctggaaggcaaccacaagaaacagccttttgagtccggctccgagactcctggaacaagcgagagcgctacacctgagggcagccctaagagaaaggtgtccagcgccgagggcgctgccaaggaagagcctaaacggagaagcgccagactgagcgccaagccccccgccaaggtggaagccaagcctaagaaggccgccgctaaggacaagagcagcgataagaaagtccagaccaagggcaagcggggcgccaaaggcaaacaggccgaggtggccaaccaggagacaaaggaagatctgcctgctgagaacggcgaaaccaagaccgaggaatctccagcttctgacgaggccggagagaaggaggccaaaagcgacagcggctctgagacacctggaacaagcgagagcgccaccccggaatcctatgaacaacttgcaccacaaccgtgtgtgggagaaactttacattctagcctcccacgagacagtgaactgtttgtgcctgaagaggggagcagcgagaaggagagcgaggacgcgccaaaaacatctcctccgacgcctgggaaacatggtttggaacagactggggaggaaaaagtgatggtgactgttcctgacaaaaatccaccttgtccttgctgtggtacccgggtaaactctgtgttgaatctgattgaacatctgaaagtgtcacacgggaaaaggagggtttgttttcggtgtgcaaaatgtggaaaggaaaatagtaactatcacagtgttgtttgtcattttaagaaatgcaggggtccagagacggagaaagccccagctggggagtggatttgtgaggtatgcaacagagattttacaaccaaaattggcctgggacaacacaagagattggcacacccagcagtgagaaatcaggaaaggatcgttgcttcccaaccgaaagaaacatcaaatagaggtgctcacaaaaggtgctggacaaaggaggaggaagaattactaataagactggaggctcagttcgagggacacaaaaatattaataagcttattgcagaacacataaccaccaaaacagctaagcagatcagtgacaaaaggcgattgctgtccagaaagccagcagaggagccacgtatggagcctggaacgtgtcatcacaccaggagagcagctgcgagcctgagaacggagcctgagatgagtcatcaggcccaggcagaggacagagataatggacctgggagacgccctctgccaggcaggcccgctgccggagggagaacaatggacgagataagacgccaccctgataagggcaacggacagcagagacccaccaagcaaaaatcagaagaacagctgcaggcttactataaaaagacactagaggaacgactttcagctggggcacttaacaccttcccccgagcattcaagcaggtaatggaaggccgggatataaagctagtaatcaatcagacagcgcaggactgcttcggatgcctggaatccataagccaaataagaacggcaacccgagataaaaagtacacgggcacccgggagaaacacccaaagaggccttttcagaagtggatgaagaagagagcaatcaaaaaaggtaattatcttcggttccagcgtttattttatcttgatagagggaaactggctaaaatcattttagatgatattgaatgcttgtcttgtgacataccactcagtgaaatttattcggtttttaaaacaagatgggaaacaactggtagctttaaaagccttggggactttaaaacttacgggaaggctgacaacactgccttcagagaattaattacggctaaagaaattgagaaaaatgtgcaggaaatgagcaaaggctcggctcccggtccagacgggattactcttggggacgtcgtaaagatggatcccgagttttccctgaccatggagattttcaatttatggttaacaactggtaaaatcccggacatggtgagggggtgcagaaccgttttgattccaaaatcatcaaagccggatcgtttgaaagacattaataactggagacctatcacgatcggttccatcttgctgagactgttctccaggattgtaacagctaggctgagcaaagcgtgccccctgaacccaaggcaaagaggctttatcagagcggcgggatgctctgaaaacttaaaactcctgcaaactataatttggtcggccaaaagagaacacagaccactgggtgttgtattcgtggacatcgccaaggcttttgacaccgtaagccaccagcacatcattcatgctttgcagcaaagagaggtggatccccacatcgtcggtctggtgagcaatatgtacgagaacatcagtacgtatatcaccacaaagaggaacacacacacagacaaaatccagatccgggttggagtaaagcagggtgacccgatgtcgccccttttatttaacctggcaatggaccctctattatgcaagctggaagagagtggcaaaggataccaccgaggacagagcagcatcacagcgatggcatttgcagacgatctggttttgctgagcgactcctgggaaggcatgaatacaaatattagcatactggagaccttctgcaatctgaccggactcaaaacacaggggcaaaagtgccacggcttttacatcaagccgacaaaggactcttacaccatcaatgactgcgctgcctggactatcaacggcacacccctgaacatgatcgaccccggcgaatctgagaaatacctcggcctgcagtttgacccgtggattggaatagcaaggtccggtctctccacaaaactagatgagtggcttcagcggatcgatcaagcaccacttaaacctctgcagaaaactgatattctcaaaacatacaccatccctcggctgatctacatagctgaccactcagaagtgaaagccgcactactcgaaacccttgacaggaagatccggacagcggtcaaggaatggcttcacctacctccgtgcacctgcgatgccatcctgtactcgagcacgagagacggcggtttgggcatcaccaaattggcaggactgatccccagcgtgcaggcccgtagactgcatcggatcgcacagtcatctgacgatacgatgaaatgcttcatggaaaaagagaggatggaacagctgcataagaaattgtggattcaagctggaggggacagagagaacataccctcgatttgggaagcaccaccgtcgagtgaaccaccaaacaacgtgagcacaaattcggaatgggaagcaccgacccagaaacccaaatttccaaagccttgcaattggaggaaaaacgaattcaaaaaatggaccaaattggcatcccaaggccgcggaattgtaaattttgaaagagacaaaattagtaaccattggatccaatactacagaggcatacctcacaggaaactcctcactgcactacaactcagggccaacgtttaccccacgagagaatttctagccaggggtagacaagaccaatacatcaaggcgtgtaggcactgcgatgcggacattgaatcctgcgcccacatcatcggcaactgcccagtgacacaggacgcccgaatcaagaggcacaataagatctgcgaactgcttctcgaggaggcgaagaagaaggactgggtagtgttcaaggaaccgcacataagggattccaacaaggaactgtacaaacctgacctgatatttgtgaaggatggccgtgcacttgtcgtggatgtgacagtacggtatgaagcagccaaatcatcgctggaggaagccgctgcagagaaagtgagaaagtacaaacacctggaaacggaagtaagacatctcacgaatgcaaaggacgttacttttgtgggctttcccctaggagcgcgggggaaatggcaccaagataactttaaacttttgactgagcttggcctctccaaatcgaggcaagtgaaaatggcagagactttttccacagtagcgctcttttcatctgtggacattgtacatatgtttgccagtagggccagaaaatctatggttatgtgataataggctgccttctgcggggcttgccttctggccatgcccttcttctctcccttgcacctgtacctcttggtctttgaataaagcctgagtaggaaggaccggtaaaaaaaaaaaaaaaaaaaaaaaaaaaaaaacgttgactaaaaaaaaaaaaaaaaaaaaaaaaaaaaaaaaaaaaaaaaaaaaaaaaaaaaaaaaaaaaaaaaaaaaaa

SEQ ID NO: 10669 - DNA, 5278 bp, synthetic construct
  source 1..5278: mol_type = other DNA
gggaaataagagagaaaagaagagtaagaagaaatataagagccaccatggcccctaagaaaaagcggaaggtgaatatcagcggctctagctgcggcagccccaacagcgccgacaccagcagcgacttcaaggacctgtggaccaagctgaaggaatgccacgaccgggaagtgcagggactccaggtgaaggtcaccaaactcaagcaagaaagaatcctggacgcccagagactggaagaattcttcaccaagaaccagcagctgagagagcagcagaaagtgctgcacgagacaatcaaggttctggaagatagactgcgggccggcctgtgcgacagatgcgccgtgaccgaggaacacatgcgcaaaaagcagcaggagttcgagaacattagacagcaaaatctgaaattgatcacagagctgatgaacgagagaaacacactgcaggaggagaacaagaagctgagcgagcagctgcaacagaagatcgagaatgatcagcaacaccaggccgctgagctggaatgtgaagaggacgtgatccccgacagcccaatcacagctttcagcttttctggcgtgaacagactgaggcggaaggaaaacccccacgtgcggtacatcgagcagacccataccaagctggaacacagcgtgtgtgccaacgagatgagaaaggtgtccaagtcctccacccatccccagcacaaccctaacgaaaatgagatcctggtggctgatacctacgaccagtctcagagccctatggccaaggcccacggcaccagctcttatacccctgataagagctccttcaacctggccaccgtggtggccgagacactgggcctgggcgtgcaggaggaaagcgagacacagggcccaatgagccctctgggagatgagctgtaccactgcctggaaggcaaccacaagaaacagccttttgagtccggctccgagactcctggaacaagcgagagcgctacacctgagggcagccctaagagaaaggtgtccagcgccgagggcgctgccaaggaagagcctaaacggagaagcgccagactgagcgccaagccccccgccaaggtggaagccaagcctaagaaggccgccgctaaggacaagagcagcgataagaaagtccagaccaagggcaagcggggcgccaaaggcaaacaggccgaggtggccaaccaggagacaaaggaagatctgcctgctgagaacggcgaaaccaagaccgaggaatctccagcttctgacgaggccggagagaaggaggccaaaagcgacagcggctctgagacacctggaacaagcgagagcgccaccccggaatcctatgaacaacttgcaccacaaccgtgtgtgggagaaactttacattctagcctcccacgagacagtgaactgtttgtgcctgaagaggggagcagcgagaaggagagcgaggacgcgccaaaaacatctcctccgacgcctgggaaacatggtttggaacagactggggaggaaaaagtgatggtgactgttcctgacaaaaatccaccttgtccttgctgtggtacccgggtaaactctgtgttgaatctgattgaacatctgaaagtgtcacacgggaaaaggggggtttgttttcggtgtgcaaaatgtggaaaggaaaatagtaactatcacagtgttgtttgtcattttaagaaatgcaggggtccagagacggagaaagccccagctggggagtggatttgtgaggtatgcaacagagattttacaaccaaaattggcctgggacaacacaagagattggcacacccagcagtgagaaatcaggaaaggatcgttgcttcccaaccgaaagaaacatcaaatagaggtgctcacaaaaggtgctggacaaaggaggaggaagaattactaataagactggaggctcagttcgagggaaacaaaaatattaataagcttattgcagaacacataaccaccaaaacagctaagcagatcagtgacaaaaggcgattgctgtccagaaagccagcagaggagccacgtgaggagcctggaacgtgtcatcacaccaggagagcagctgcgagcctgagaacggagcctgagatgagtcatcacgcccaggcagaggacagagataatggacctgggagacgccctctgccaggcagggcagctgccggagggagaacaatggacgagataagacgccaccctgataagggcaacggacagcagagacccaccaagcaaaaatcagaagaacagctgcaggcttactataaaaagacactagaggaacgactttcagctggggcacttaacaccttcccccgagcattcaagcaggtaatggaaggccgggatataaagctagtaatcaatcagacagcgcaggactgcttcggatgcctggaatccataagccaaataagaacggcaacccgagataaaaaggacacggtgacccgggagaaacacccaaagaaaccttttcagaagtggatgaagaagagagcaatcaaaaaaggtaattatcttcggttccagcgtttattttatcttgatagagggaaactggctaaaatcattttagatgatattgaatgcttgtcttgtgacataccactcagtgaaatttattcggtttttaaaacaagatgggaaacaactggtagctttaaaagccttggggactttaaaacttacgggaaggctgacaacactgccttcagagaattaattacggctaaagaaattgagaaaaatgtgcaggaaatgagcaaaggctcggctcccggtccagacgggattactcttggggacgtcgtaaagatggatcccgagttttcccggaccatggagattttcaatttatggttaacaactggtaaaatcccggacatggtgagggggtgcagaaccgttttgattccaaaatcatcaaagccggatcgtttgaaagacattaataactggagacctatcacgatcggttccatcttgctgagactgttctccaggattgtaacagctaggctgagcaaagcgtgccccctgaacccaaggcaaagaggctttatcagagcggcgggatgctctgaaaacttaaaactcctgcaaactataatttggtcggccaaaagagaacacagaccactgggtgttgtattcgtggacatcgccaaggcttttgacaccgtaagccaccagcacatcattcatgctttgcagcaaagagaggtggatccccacatcgtcggtctggtgagcaatatgtacgagaacatcagtacgtatatcaccacaaagaggaacacacacacagacaaaatccagatccgggttggagtaaagcagggtgacccgatgtcgccccttttatttaacctggcaatggaccctctattatgcaagctggaagagagtggcaaaggataccaccgaggacagagcagcatcacagcgatggcatttgcagacgatctggttttgctgagcgactcctgggaaaatatgaatacaaatattagcatactggagaccttctgcaatctgaccggactcaaaacacaggggcaaaagtgccacggcttttacatcaagccgacaaaggactcttacaccatcaatgactgcgctgcctggactatcaacggcacacccctgaacatgatcgaccccggcgaatctgagaaatacctcggcctgcagtttgacccgtggattggaatagcaaggtccggtctctccacaaaactagatttttggcttcagcggatcgatcaagcaccacttaaacctctgcagaaaactgatattctcaaaacatacaccatccctcggctgatctacatagctgaccactcagaagtgaaaagcgcactactcgaaacccttgaccagaagatccggacagcggtcaaggaatggcttcacctacctccgtgcacctgcgatgccatcctgtactcgagcacgagagacggcggtttgggcatcaccaaattggcaggactgatccccagcgtgcaggcccgtagactgcatcggatcgcacagtcatctgacgatacgatgaaatgcttcatggaaaaagagaaaatggaacagctgcataagaaattgtggattcaagctggaggggacagagagaacataccctcgatttgggaagcaccaccgtcgagtgaaccaccaaacaacgtgagcacaaattcggaatgggaagcaccgacccagaaagataaatttccaaagccttgcaattggaggaaaaacgaattcaaaaaatggaccaaattggcatcccaaggccgcggaattgtaaattttgaaagagacaaaattagtaaccattggatccaatactacagacgcatacctcacaggaaactcctcactgcactacaactcagggccaacgtttaccccacgagagaatttctagccaggggtagacaagaccaatacatcaaggcgtgtaggcactgcgatgcggacaacgaatcctgcgcccacatcatcggcaactgcccagtgacacaggacgcccgaatcaagaggcacaattacatctgcgaactgcttctcgaggaggcgaagaagaaggactgggtagtgttcaaggaaccgcacataagggattccaacaaggaactgtacaaacctgacctgatatttgtgaaggatgggcgtgcacttgtcgtggatgtgacagtacggtatgaagcagccaaatcatcgctggaggaagccgctgcagagaaagtgagaaagtacaaacacctggaaacggaagtaagacatctcacgaatgcaaaggacgttacttttgtgggctttcccctaggagcgcgggggaaatggcaccaagataactttaaacttttgactgagcttggcctctccaaatcgaggcaagtgaaaatggcagagactttttccacagtagcgctcttttcatctgtggacattgtacatatgtttgccagtagggccagaaaatctatggttatgtgataataggctggagcctcggtggccatgcttcttgccccttgggcctccccccagcccctcctccccttcctgcacccgtacccccgtggtctttgaataaagtctgagtgggcggcagaccggtaaaaaaaaaaaaaaaaaaaaaaaaaaaaaaacgttgactaaaaaaaaaaaaaaaaaaaaaaaaaaaaaaaaaaaaaaaaaaaaaaaaaaaaaaaaaaaaaaaaaaaaaa

SEQ ID NO: 10670 - DNA, 3955 bp, synthetic construct
  source 1..3955: mol_type = other DNA
ggtctagttacaactgggcatcgctgcagagatcgcacctcctcgtggtcccgctggtagcccttcgaagggtgactaagtcgatctctgccccaggtacggagccgttgggactcaccagtccaacgtaactcctgcctaaattcggtgaaacaaattcctcggtaaaaagccccatggctgaaaaagtgatggtgactgttcctgacaaaaatccaccttgtccttgctgtggtacccgggtaaactctgtgttgaatctgattgaacatctgaaagtgtcacacgggaaaaggggggtttgttttcggtgtgcaaaatgtggaaaggaaaatagtaactatcacagtgttgtttgtcattttccaaaatgcaggggtccagagacggagaaagccccagctggggagtggatttgtgaggtatgcaacagagattttacaaccaaaattggcctgggacaacacaagagattggcacacccagcagtgagaaatcaggaaaggatcgttgcttcccaaccgaaagaaacatcaaatagaggtgctcacaaaaggtgctggacaaaggaggaggaagaattactaataagactggaggctcagttcgagggaaacaaaaatattaataagcttattgcagaacacataaccaccaaaacagctaagcagatcagtgacaaaaggcgattgctgtccagaaagccagcagaggagccacgtgaggagcctggaacgtgtcatcacaccaggagagcagctgcgagcctgagaacggagcctgagatgagtcatcacgcccaggcagaggacagagataatggacctgggagacgccctctgccaggcagggcagctgccggagggagaacaatggacgagataagacgccaccctgataagggcaacggacagcagagacccaccaagcaaaaatcagaagaacagctgcaggcttactataaaaagacactagaggaacgactttcagctggggcacttaacaccttcccccgagcattcaagcaggtaatggaaggccgggatataaagctagtaatcaatcagacagcgcaggactgcttcggatgcctggaatccataagccaaataagaacggcaacccgagataaaaaggacacggtgacccgggagaaacacccaaagaaaccttttcagaagtggatgaaggacagagcaatcaaaaaaggtaattatcttcggttccagcgtttattttatcttgatagagggaaactggctaaaatcattttagatgatattgaatgcttgtcttgtgacataccactcagtgaaatttattcggtttttaaaacaagatgggaaacaactggtagctttaaaagccttggggactttaaaacttacgggaaggctgacaacactgccttcagagaattaattacggctaaagaaattgagaaaaatgtgcaggaaatgagcaaaggctcggctcccggtccagacgggattactcttggggacgtcgtaaagatggatcccgagttttcccggaccatggagattttcaatttatggttaacaactggtaaaatcccggacatggtgagggggtgcagaaccgttttgattccaaaatcatcaaagccggatcgtttgaaagacattaataactggagacctatcacgatcggttccatcttgctgagactgttctccaggattgtaacagctaggctgagcaaagcgtgccccctgaacccaaggcaaagaggctttatcagagcggcgggatgctctgaaaacttaaaactcctgcaaactataatttggtcggccaaaagagaacacagaccactgggtgttgtattcgtggacatcgccaaggcttttgacaccgtaagccaccagcacatcattcatgctttgcagcaaagagaggtggatccccacatcgtcggtctggtgagcaatatgtacgagaacatcagtacgtatatcaccacaaagaggaacacacacacagacaaaatccagatccgggttggagtaaagcagggtgacccgatgtcgccccttttatttaacctggcaatggaccctctattatgcaagctggaagagagtggcaaaggataccaccgaggacagagcagcatcacagcgatggcatttgcagacgatctggttttgctgagcgactcctgggaaaatatgaatacaaatattagcatactggagaccttctgcaatctgaccggactcaaaacacaggggcaaaagtgccacggcttttacatcaagccgacaaaggactcttacaccatcaatgactgcgctgcctggactatcaacggcacacccctgaacatgatcgaccccggcgaatctgagaaatacctcggcctgcagtttgacccgtggattggaatagcaaggtccggtctctccacaaaactagatttttggcttcagcggatcgatcaagcaccacttaaacctctgcagaaaactgatattctcaaaacatacaccatccctcggctgatctacatagctgaccactcagaagtgaaaactgcactactcgaaacccttgaccagaagatccggacagcggtcaaggaatggcttcacctacctccgtgcacctgcgatgccatcctgtactcgagcacgagagacggcggtttgggcatcaccaaattggcaggactgatccccagcgtgcaggcccgtagactgcatcggatcgcacagtcatctgacgatacgatgaaatgcttcatggaaaaagagaaaatggaacagctgcataagaaattgtggattcaagctggaggggacagagagaacataccctcgatttgggaagcaccaccgtcgagtgaaccaccaaacaacgtgagcacaaattcggaatgggaagcaccgacccagaaagataaatttccaaagccttgcaattggaggaaaaacgaattcaaaaaatggaccaaattggcatcccaaggccgcggaattgtaaattttgaaagagacaaaattagtaaccattggatccaatactacagacgcatacctcacaggaaactcctcactgcactacaactcagggccaacgtttaccccacgagagaatttctagccaggggtagacaagaccaatacatcaaggcgtgtaggcactgcgatgcggacattgaatcctgcgcccacatcatcggcaactgcccagtgacacaggacgcccgaatcaagaggcacaattacatctgcgaactgcttctcgaggaggcgaagaagaaggactgggtagtgttcaaggaaccgcacataagggattccaacaaggaactgtacaaacctgacctgatatttgtgaaggatgcccgtgcacttgtcgtggatgtgacagtacggtatgaagcagccaaatcatcgctggaggaagccgctgcagagaaagtgagaaagtacaaacacctggaaacggaagtaagacatctcacgaatgcaaaggacgttacttttgtgggctttcccctaggagcgcgggggaaatggcaccaagataactttaaacttttgactgagcttggcctctccaaatcgaggcaagtgaaaatggcagagactttttccacagtagcgctcttttcatctgtggacattgtacatatgtttgccagtagggccagaaaatctatggttatgtaaaccggtagacatgataagatacattgatgagtttggacaaaccacaactagaatgcagtgaaaaaaatgctttatttgtgaaatttgtgatgctattgctttatttgtaaccattataagctgcaataaacaagttaacaacaacaaaaaaaaaaaaaaaaaaaaaaaaaaaaaaacgttgactaaaaaaaaaaaaaaaaaaaaaaaaaaaaaaaaaaaaaaaaaaaaaaaaaaaaaaaaaaaaaaaaaaaaaa

SEQ ID NO: 10671 - DNA, 5093 bp, synthetic construct
  source 1..5093: mol_type = other DNA
gaaataagagagaaaagaagagtaagaagaaatataagagaattcgccaccatggcccctaagaaaaagcggaaggtgaatatcagcggctctagctgcggcagccccaacagcgccgacaccagcagcgacttcaaggacctgtggaccaagctgaaggaatgccacgaccgggaagtgcagggactccaggtgaaggtcaccaaactcaagcaagaaagaatcctggacgcccagagactggaagaattcttcaccaagaaccagcagctgagagagcagcagaaagtgctgcacgagacaatcaaggttctggaagatagactgcgggccggcctgtgcgacagatgcgccgtgaccgaggaacacatgcgcaaaaagcagcaggagttcgagaacattagacagcaaaatctgaaattgatcacagagctgatgaacgagagaaacacactgcaggaggagaacaagaagctgagcgagcagctgcaacagaagatcgagaatgatcagcaacaccaggccgctgagctggaatgtgaagaggacgtgatccccgacagcccaatcacagctttcagcttttctggcgtgaacagactgaggcggaaggaaaacccccacgtgcggtacatcgagcagacccataccaagctggaacacagcgtgtgtgccaacgagatgagaaaggtgtccaagtcctccacccatccccagcacaaccctaacgaaaatgagatcctggtggctgatacctacgaccagtctcagagccctatggccaaggcccacggcaccagctcttatacccctgataagagctccttcaacctggccaccgtggtggccgagacactgggcctgggcgtgcaggaggaaagcgagacacagggcccaatgagccctctgggagatgagctgtaccactgcctggaaggcaaccacaagaaacagccttttgagtccggctccgagactcctggaacaagcgagagcgctacacctgagggcagccctaagagaaaggtgtccagcgccgagggcgctgccaaggaagagcctaaacggagaagcgccagactgagcgccaagccccccgccaaggtggaagccaagcctaagaaggccgccgctaaggacaagagcagcgataagaaagtccagaccaagggcaagcggggcgccaaaggcaaacaggccgaggtggccaaccaggagacaaaggaagatctgcctgctgagaacggcgaaaccaagaccgaggaatctccagcttctgacgaggccggagagaaggaggccaaaagcgacagcggctctgagacacctggaacaagcgagagcgccaccccggaatccgaaaaagtgatggtgactgttcctgacaaaaatccaccttgtccttgctgtggtacccgggtaaactctgtgttgaatctgattgaacatctgaaagtgtcacacgggaaaaggggggtttgttttcggtgtgcaaaatgtggaaaggaaaatagtaactatcacagtgttgtttgtcattttaagaaatgcaggggtccagagacggagaaagccccagctggggagtggatttgtgaggtatgcaacagagattttacaaccaaaattggcctgggacaacacaagagattggcacacccagcagtgagaaatcaggaaaggatcgttgcttcccaaccgaaagaaacatcaaatagaggtgctcacaaaaggtgctggacaaaggaggaggaagaattactaataagactggaggctcagttcgagggaaacaaaaatattaataagcttattgcagaacacataaccaccaaaacagctaagcagatcagtgacaaaaggcgattgctgtccagaaagccagcagaggagccacgtgaggagcctggaacgtgtcatcacaccaggagagcagctgcgagcctgagaacggagcctgagatgagtcatcacgcccaggcagaggacagagataatggacctgggagacgccctctgccaggcagggcagctgccggagggagaacaatggacgagataagacgccaccctgataagggcaacggacagcagagacccaccaagcaaaaatcagaagaacagctgcaggcttactataaaaagacactagaggaacgactttcagctggggcacttaacaccttcccccgagcattcaagcaggtaatggaaggccgggatataaagctagtaatcaatcagacagcgcaggactgcttcggatgcctggaatccataagccaaataagaacggcaacccgagataaaaaggacacggtgacccgggagaaacacccaaagaaaccttttcagaagtggatgaagaagagagcaatcaaaaaaggtaattatcttcggttccagcgtttattttatcttgatagagggaaactggctaaaatcattttagatgatattgaatgcttgtcttgtgacataccactcagtgaaatttattcggtttttaaaacaagatgggaaacaactggtagctttaaaagccttggggactttaaaacttacgggaaggctgacaacactgccttcagagaattaattacggctaaagaaattgagaaaaatgtgcaggaaatgagcaaaggctcggctcccggtccagacgggattactcttggggacgtcgtaaagatggatcccgagttttcccggaccatggagattttcaatttatggttaacaactggtaaaatcccggacatggtgagggggtgcagaaccgttttgattccaaaatcatcaaagccggatcgtttgaaagacattaataactggagacctatcacgatcggttccatcttgctgagactgttctccaggattgtaacagctaggctgagcaaagcgtgccccctgaacccaaggcaaagaggctttatcagagcggcgggatgctctgaaaacttaaaactcctgcaaactataatttggtcggccaaaagagaacacagaccactgggtgttgtattcgtggacatcgccaaggcttttgacaccgtaagccaccagcacatcattcatgctttgcagcaaagagaggtggatccccacatcgtcggtctggtgagcaatatgtacgagaacatcagtacgtatatcaccacaaagaggaacacacacacagacaaaatccagatccgggttggagtaaagcagggtgacccgatgtcgccccttttatttaacctggcaatggaccctctattatgcaagctggaagagagtggcaaaggataccaccgaggacagagcagcatcacagcgatggcatttgcagacgatctggttttgctgagcgactcctgggaaaatatgaatacaaatattagcatactggagaccttctgcaatctgaccggactcaaaacacaggggcaaaagtgccacggcttttacatcaagccgacaaagaagtcttacaccatcaatgactgcgctgcctggactatcaacggcacacccctgaacatgatcgaccccggcgaatctgagaaatacctcggcctgcagtttgacccgtggattggaatagcaaggtccggtctctccacaaaactagatttttggcttcagcggatcgatcaagcaccacttaaacctctgcagaaaactgatattctcaaaacatacaccatccctcggctgatctacatagctgaccactcagaagtgaaaagcgcactactcgaaacccttgaccagaagatccggacagcggtcaaggaatggcttcacctacctccgtgcacctgcgatgccatcctgtactcgagcacgagagacggcggtttgggcatcaccaaattggcaggactgatccccagcgtgcaggcccgtagactgcatcggatcgcacagtcatctgacgatacgatgaaatgcttcatggaaaaagagaaaatggaacagctgcataagaaattgtggattcaagctggaggggacagagagaacataccctcgatttgggaagcaccaccgtcgagtgaaccaccaaacaacgtgagcacaaattcggaatgggaagcaccgacccagaaagataaatttccaaagccttgcaattggaggaaaaacgaattcaaaaaatggaccaaattggcatcccaaggccgcggaattgtaaattttgaaagagacaaaattagtaaccattggatccaatactacagacgcatacctcacaggaaactcctcactgcactacaactcagggccaacgtttaccccacgagagaatttctagccaggggtagacaagaccaatacatcaaggcgtgtaggcactgcgatgcggacaacgaatcctgcgcccacatcatcggcaactgcccagtgacacaggacgcccgaatcaagaggcacaattacatctgcgaactgcttctcgaggaggcgaagaagaaggactgggtagtgttcaaggaaccgcacataagggattccaacaaggaactgtacaaacctgacctgatatttgtgaaggatgggcgtgcacttgtcgtggatgtgacagtacggtatgaagcagccaaatcatcgctggaggaagccgctgcagagaaagtgagaaagtacaaacacctggaaacggaagtaagacatctcacgaatgcaaaggacgttacttttgtgggctttcccctaggagcgcgggggaaatggcaccaagataactttaaacttttgactgagcttggcctctccaaatcgaggcaagtgaaaatggcagagactttttccacagtagcgctcttttcatctgtggacattgtacatatgtttgccagtagggccagaaaatctatggttatgtgataataggctgccttctgcggggcttgccttctggccatgcccttcttctctcccttgcacctgtacctcttggtctttgaataaagcctgagtaggaaggaccggtaaaaaaaaaaaaaaaaaaaaaaaaaaaaaaacgttgactaaaaaaaaaaaaaaaaaaaaaaaaaaaaaaaaaaaaaaaaaaaaaaaaaaaaaaaaaaaaaaaaaaaaaa

SEQ ID NO: 10672 - DNA, 4603 bp, synthetic construct
  source 1..4603: mol_type = other DNA
ggtctagttacaactgggcatcgctgcagagatcgcacctcctcgtggtcccgctggtagcccttcgaagggtgactaagtcgatctctgccccaggtacggagccgttgggactcaccagtccaacgtaactcctgcctaaattcggtgaaacaaattcctcggtaaaaagccccatggcttcttgcccgaaacctggccccccggtttcagcaggggcaatgagtttggaaagtggactgaccacccactccgttctcgccatcgaacgtggtcccaattcgttggcaaattccggatcagactttgggggggggggtctggggctaccgttacgcctattgagggtatcggtcggcactcagacctcccgctccgactgggtagacctggtgtcctggagccacccaggacccacgtctaagtcccagcaggttgacctggtgtctttatttcctaaacaccgggttgacctgttatccaaaaacgaccaggtagacctggtggctcaatttttaccatctaaatttccccccaatttggcagaaaatgatttggctttgctggtgaacttagagttctacagatcggatttgcatgtgtatgagtgtgttcattttgctgcacattgggagggattaagtggtttgcctgaggtgtatgaacaacttgcaccacaaccgtgtgtgggagaaactttacattctagcctcccacgagacagtgaactgtttgtgcctgaagaggggagcagcgagaaggagagcgaggacgcgccaaaaacatctcctccgacgcctgggaaacatggtttggaacagactggggaggaaaaagtgatggtgactgttcctgacaaaaatccaccttgtccttgctgtggtacccgggtaaactctgtgttgaatctgattgaacatctgaaagtgtcacacgggaaaaggggggtttgttttcggtgtgcaaaatgtggaaaggaaaatagtaactatcacagtgttgtttgtcattttccaaaatgcaggggtccagagacggagaaagccccagctggggagtggatttgtgaggtatgcaacagagattttacaaccaaaattggcctgggacaacacaagagattggcacacccagcagtgagaaatcaggaaaggatcgttgcttcccaaccgaaagaaacatcaaatagaggtgctcacaaaaggtgctggacaaaggaggaggaagaattactaataagactggaggctcagttcgagggaaacaaaaatattaataagcttattgcagaacacataaccaccaaaacagctaagcagatcagtgacaaaaggcgattgctgtccagaaagccagcagaggagccacgtgaggagcctggaacgtgtcatcacaccaggagagcagctgcgagcctgagaacggagcctgagatgagtcatcacgcccaggcagaggacagagataatggacctgggagacgccctctgccaggcagggcagctgccggagggagaacaatggacgagataagacgccaccctgataagggcaacggacagcagagacccaccaagcaaaaatcagaagaacagctgcaggcttactataaaaagacactagaggaacgactttcagctggggcacttaacaccttcccccgagcattcaagcaggtaatggaaggccgggatataaagctagtaatcaatcagacagcgcaggactgcttcggatgcctggaatccataagccaaataagaacggcaacccgagataaaaaggacacggtgacccgggagaaacacccaaagaaaccttttcagaagtggatgaaggacagagcaatcaaaaaaggtaattatcttcggttccagcgtttattttatcttgatagagggaaactggctaaaatcattttagatgatattgaatgcttgtcttgtgacataccactcagtgaaatttattcggtttttaaaacaagatgggaaacaactggtagctttaaaagccttggggactttaaaacttacgggaaggctgacaacactgccttcagagaattaattacggctaaagaaattgagaaaaatgtgcaggaaatgagcaaaggctcggctcccggtccagacgggattactcttggggacgtcgtaaagatggatcccgagttttcccggaccatggagattttcaatttatggttaacaactggtaaaatcccggacatggtgagggggtgcagaaccgttttgattccaaaatcatcaaagccggatcgtttgaaagacattaataactggagacctatcacgatcggttccatcttgctgagactgttctccaggattgtaacagctaggctgagcaaagcgtgccccctgaacccaaggcaaagaggctttatcagagcggcgggatgctctgaaaacttaaaactcctgcaaactataatttggtcggccaaaagagaacacagaccactgggtgttgtattcgtggacatcgccaaggcttttgacaccgtaagccaccagcacatcattcatgctttgcagcaaagagaggtggatccccacatcgtcggtctggtgagcaatatgtacgagaacatcagtacgtatatcaccacaaagaggaacacacacacagacaaaatccagatccgggttggagtaaagcagggtgacccgatgtcgccccttttatttaacctggcaatggaccctctattatgcaagctggaagagagtggcaaaggataccaccgaggacagagcagcatcacagcgatggcatttgcagacgatctggttttgctgagcgactcctgggaaaatatgaatacaaatattagcatactggagaccttctgcaatctgaccggactcaaaacacaggggcaaaagtgccacggcttttacatcaagccgacaaaggactcttacaccatcaatgactgcgctgcctggactatcaacggcacacccctgaacatgatcgaccccggcgaatctgagaaatacctcggcctgcagtttgacccgtggattggaatagcaaggtccggtctctccacaaaactagatttttggcttcagcggatcgatcaagcaccacttaaacctctgcagaaaactgatattctcaaaacatacaccatccctcggctgatctacatagctgaccactcagaagtgaaaactgcactactcgaaacccttgaccagaagatccggacagcggtcaaggaatggcttcacctacctccgtgcacctgcgatgccatcctgtactcgagcacgagagacggcggtttgggcatcaccaaattggcaggactgatccccagcgtgcaggcccgtagactgcatcggatcgcacagtcatctgacgatacgatgaaatgcttcatggaaaaagagaaaatggaacagctgcataagaaattgtggattcaagctggaggggacagagagaacataccctcgatttgggaagcaccaccgtcgagtgaaccaccaaacaacgtgagcacaaattcggaatgggaagcaccgacccagaaagataaatttccaaagccttgcaattggaggaaaaacgaattcaaaaaatggaccaaattggcatcccaaggccgcggaattgtaaattttgaaagagacaaaattagtaaccattggatccaatactacagacgcatacctcacaggaaactcctcactgcactacaactcagggccaacgtttaccccacgagagaatttctagccaggggtagacaagaccaatacatcaaggcgtgtaggcactgcgatgcggacattgaatcctgcgcccacatcatcggcaactgcccagtgacacaggacgcccgaatcaagaggcacaattacatctgcgaactgcttctcgaggaggcgaagaagaaggactgggtagtgttcaaggaaccgcacataagggattccaacaaggaactgtacaaacctgacctgatatttgtgaaggatgcccgtgcacttgtcgtggatgtgacagtacggtatgaagcagccaaatcatcgctggaggaagccgctgcagagaaagtgagaaagtacaaacacctggaaacggaagtaagacatctcacgaatgcaaaggacgttacttttgtgggctttcccctaggagcggccgggaaatggcaccaagataactttaaacttttgactgagcttggcctctccaaatcgaggcaagtgaaaatggcagagactttttccacagtagcgctcttttcatctgtggacattgtacatatgtttgccagtagggccagaaaatctatggttatgtaaaccggtagacatgataagatacattgatgagtttggacaaaccacaactagaatgcagtgaaaaaaatgctttatttgtgaaatttgtgatgctattgctttatttgtaaccattataagctgcaataaacaagttaacaacaacaaaaaaaaaaaaaaaaaaaaaaaaaaaaaaacgttgactaaaaaaaaaaaaaaaaaaaaaaaaaaaaaaaaaaaaaaaaaaaaaaaaaaaaaaaaaaaaaaaaaaaaaa

SEQ ID NO: 10673 - DNA, 4603 bp, synthetic construct
  source 1..4603: mol_type = other DNA
ggtctagttacaactgggcatcgctgcagagatcgcacctcctcgtggtcccgctggtagcccttcgaagggtgactaagtcgatctctgccccaggtacggagccgttgggactcaccagtccaacgtaactcctgcctaaattcggtgaaacaaattcctcggtaaaaagccccatggcttcttgcccgaaacctggccccccggtttcagcaggggcaatgagtttggaaagtggactgaccacccactccgttctcgccatcgaacgtggtcccaattcgttggcaaattccggatcagactttgggggggggggtctggggctaccgttacgcctattgagggtatcggtcggcactcagacctcccgctccgactgggtagacctggtgtcctggagccacccaggacccacgtctaagtcccagcaggttgacctggtgtctttatttcctaaacaccgggttgacctgttatccaaaaacgaccaggtagacctggtggctcaatttttaccatctaaatttccccccaatttggcagaaaatgatttggctttgctggtgaacttagagttctacagatcggatttgcatgtgtatgagtgtgttcattttgctgcacattgggagggattaagtggtttgcctgaggtgtatgaacaacttgcaccacaaccgtgtgtgggagaaactttacattctagcctcccacgagacagtgaactgtttgtgcctgaagaggggagcagcgagaaggagagcgaggacgcgccaaaaacatctcctccgacgcctgggaaacatggtttggaacagactggggaggaaaaagtgatggtgactgttcctgacaaaaatccaccttgtccttgctgtggtacccgggtaaactctgtgttgaatctgattgaacatctgaaagtgtcacacgggaaaaggggggtttgttttcggtgtgcaaaatgtggaaaggaaaatagtaactatcacagtgttgtttgtcattttccaaaatgcaggggtccagagacggagaaagccccagctggggagtggatttgtgaggtatgcaacagagattttacaaccaaaattggcctgggacaacacaagagattggcacacccagcagtgagaaatcaggaaaggatcgttgcttcccaaccgaaagaaacatcaaatagaggtgctcacaaaaggtgctggacaaaggaggaggaagaattactaataagactggaggctcagttcgagggaaacaaaaatattaataagcttattgcagaacacataaccaccaaaacagctaagcagatcagtgacaaaaggcgattgctgtccagaaagccagcagaggagccacgtgaggagcctggaacgtgtcatcacaccaggagagcagctgcgagcctgagaacggagcctgagatgagtcatcacgcccaggcagaggacagagataatggacctgggagacgccctctgccaggcagggcagctgccggagggagaacaatggacgagataagacgccaccctgataagggcaacggacagcagagacccaccaagcaaaaatcagaagaacagctgcaggcttactataaaaagacactagaggaacgactttcagctggggcacttaacaccttcccccgagcattcaagcaggtaatggaaggccgggatataaagctagtaatcaatcagacagcgcaggactgcttcggatgcctggaatccataagccaaataagaacggcaacccgagataaaaaggacacggtgacccgggagaaacacccaaagaaaccttttcagaagtggatgaaggacagagcaatcaaaaaaggtaattatcttcggttccagcgtttattttatcttgatagagggaaactggctaaaatcattttagatgatattgaatgcttgtcttgtgacataccactcagtgaaatttattcggtttttaaaacaagatgggaaacaactggtagctttaaaagccttggggactttaaaacttacgggaaggctgacaacactgccttcagagaattaattacggctaaagaaattgagaaaaatgtgcaggaaatgagcaaaggctcggctcccggtccagacgggattactcttggggacgtcgtaaagatggatcccgagttttcccggaccatggagattttcaatttatggttaacaactggtaaaatcccggacatggtgagggggtgcagaaccgttttgattccaaaatcatcaaagccggatcgtttgaaagacattaataactggagacctatcacgatcggttccatcttgctgagactgttctccaggattgtaacagctaggctgagcaaagcgtgccccctgaacccaaggcaaagaggctttatcagagcggcgggatgctctgaaaacttaaaactcctgcaaactataatttggtcggccaaaagagaacacagaccactgggtgttgtattcgtggacatcgccaaggcttttgacaccgtaagccaccagcacatcattcatgctttgcagcaaagagaggtggatccccacatcgtcggtctggtgagcaatatgtacgagaacatcagtacgtatatcaccacaaagaggaacacacacacagacaaaatccagatccgggttggagtaaagcagggtgacccgatgtcgccccttttatttaacctggcaatggaccctctattatgcaagctggaagagagtggcaaaggataccaccgaggacagagcagcatcacagcgatggcatttgcagacgatctggttttgctgagcgactcctgggaaaatatgaatacaaatattagcatactggagaccttctgcaatctgaccggactcaaaacacaggggcaaaagtgccacggcttttacatcaagccgacaaaggactcttacaccatcaatgactgcgctgcctggactatcaacggcacacccctgaacatgatcgaccccggcgaatctgagaaatacctcggcctgcagtttgacccgtggattggaatagcaaggtccggtctctccacaaaactagatttttggcttcagcggatcgatcaagcaccacttaaacctctgcagaaaactgatattctcaaaacatacaccatccctcggctgatctacatagctgaccactcagaagtgaaaactgcactactcgaaacccttgaccagaagatccggacagcggtcaaggaatggcttcacctacctccgtgcacctgcgatgccatcctgtactcgagcacgagagacggcggtttgggcatcaccaaattggcaggactgatccccagcgtgcaggcccgtagactgcatcggatcgcacagtcatctgacgatacgatgaaatgcttcatggaaaaagagaaaatggaacagctgcataagaaattgtggattcaagctggaggggacagagagaacataccctcgatttgggaagcaccaccgtcgagtgaaccaccaaacaacgtgagcacaaattcggaatgggaagcaccgacccagaaagataaatttccaaagccttgcaattggaggaaaaacgaattcaaaaaatggaccaaattggcatcccaaggccgcggaattgtaaattttgaaagagacaaaattagtaaccattggatccaatactacagacgcatacctcacaggaaactcctcactgcactacaactcagggccaacgtttaccccacgagagaatttctagccaggggtagacaagaccaatacatcaaggcgtgtaggcactgcgatgcggacattgaatcctgcgcccacatcatcggcaactgcccagtgacacaggacgcccgaatcaagagggccaattacatctgcgaactgcttctcgaggaggcgaagaagaaggactgggtagtgttcaaggaaccgcacataagggattccaacaaggaactgtacaaacctgacctgatatttgtgaaggatgcccgtgcacttgtcgtggatgtgacagtacggtatgaagcagccaaatcatcgctggaggaagccgctgcagagaaagtgagaaagtacaaacacctggaaacggaagtaagacatctcacgaatgcaaaggacgttacttttgtgggctttcccctaggagcggccgggaaatggcaccaagataactttaaacttttgactgagcttggcctctccaaatcgaggcaagtgaaaatggcagagactttttccacagtagcgctcttttcatctgtggacattgtacatatgtttgccagtagggccagaaaatctatggttatgtaaaccggtagacatgataagatacattgatgagtttggacaaaccacaactagaatgcagtgaaaaaaatgctttatttgtgaaatttgtgatgctattgctttatttgtaaccattataagctgcaataaacaagttaacaacaacaaaaaaaaaaaaaaaaaaaaaaaaaaaaaaacgttgactaaaaaaaaaaaaaaaaaaaaaaaaaaaaaaaaaaaaaaaaaaaaaaaaaaaaaaaaaaaaaaaaaaaaaa

SEQ ID NO: 10674 - DNA, 4603 bp, synthetic construct
  source 1..4603: mol_type = other DNA
ggtctagttacaactgggcatcgctgcagagatcgcacctcctcgtggtcccgctggtagcccttcgaagggtgactaagtcgatctctgccccaggtacggagccgttgggactcaccagtccaacgtaactcctgcctaaattcggtgaaacaaattcctcggtaaaaagccccatggcttcttgcccgaaacctggccccccggtttcagcaggggcaatgagtttggaaagtggactgaccacccactccgttctcgccatcgaacgtggtcccaattcgttggcaaattccggatcagactttgggggggggggtctggggctaccgttacgcctattgagggtatcggtcggcactcagacctcccgctccgactgggtagacctggtgtcctggagccacccaggacccacgtctaagtcccagcaggttgacctggtgtctttatttcctaaacaccgggttgacctgttatccaaaaacgaccaggtagacctggtggctcaatttttaccatctaaatttccccccaatttggcagaaaatgatttggctttgctggtgaacttagagttctacagatcggatttgcatgtgtatgagtgtgttcattttgctgcacattgggagggattaagtggtttgcctgaggtgtatgaacaacttgcaccacaaccgtgtgtgggagaaactttacattctagcctcccacgagacagtgaactgtttgtgcctgaagaggggagcagcgagaaggagagcgaggacgcgccaaaaacatctcctccgacgcctgggaaacatggtttggaacagactggggaggaaaaagtgatggtgactgttcctgacaaaaatccaccttgtccttgctgtggtacccgggtaaactctgtgttgaatctgattgaacatctgaaagtgtcacacgggaaaaggggggtttgttttcggtgtgcaaaatgtggaaaggaaaatagtaactatcacagtgttgtttgtcattttccaaaatgcaggggtccagagacggagaaagccccagctggggagtggatttgtgaggtatgcaacagagattttacaaccaaaattggcctgggacaacacaagagattggcacacccagcagtgagaaatcaggaaaggatcgttgcttcccaaccgaaagaaacatcaaatagaggtgctcacaaaaggtgctggacaaaggaggaggaagaattactaataagactggaggctcagttcgagggaaacaaaaatattaataagcttattgcagaacacataaccaccaaaacagctaagcagatcagtgacaaaaggcgattgctgtccagaaagccagcagaggagccacgtgaggagcctggaacgtgtcatcacaccaggagagcagctgcgagcctgagaacggagcctgagatgagtcatcacgcccaggcagaggacagagataatggacctgggagacgccctctgccaggcagggcagctgccggagggagaacaatggacgagataagacgccaccctgataagggcaacggacagcagagacccaccaagcaaaaatcagaagaacagctgcaggcttactataaaaagacactagaggaacgactttcagctggggcacttaacaccttcccccgagcattcaagcaggtaatggaaggccgggatataaagctagtaatcaatcagacagcgcaggactgcttcggatgcctggaatccataagccaaataagaacggcaacccgagataaaaaggacacggtgacccgggagaaacacccaaagaaaccttttcagaagtggatgaaggacagagcaatcaaaaaaggtaattatcttcggttccagcgtttattttatcttgatagagggaaactggctaaaatcattttagatgatattgaatgcttgtcttgtgacataccactcagtgaaatttattcggtttttaaaacaagatgggaaacaactggtagctttaaaagccttggggactttaaaacttacgggaaggctgacaacactgccttcagagaattaattacggctaaagaaattgagaaaaatgtgcaggaaatgagcaaaggctcggctcccggtccagacgggattactcttggggacgtcgtaaagatggatcccgagttttcccggaccatggagattttcaatttatggttaacaactggtaaaatcccggacatggtgagggggtgcagaaccgttttgattccaaaatcatcaaagccggatcgtttgaaagacattaataactggagacctatcacgatcggttccatcttgctgagactgttctccaggattgtaacagctaggctgagcaaagcgtgccccctgaacccaaggcaaagaggctttatcagagcggcgggatgctctgaaaacttaaaactcctgcaaactataatttggtcggccaaaagagaacacagaccactgggtgttgtattcgtggacatcgccaaggcttttgacaccgtaagccaccagcacatcattcatgctttgcagcaaagagaggtggatccccacatcgtcggtctggtgagcaatatgtacgagaacatcagtacgtatatcaccacaaagaggaacacacacacagacaaaatccagatccgggttggagtaaagcagggtgacccgatgtcgccccttttatttaacctggcaatggaccctctattatgcaagctggaagagagtggcaaaggataccaccgaggacagagcagcatcacagcgatggcatttgcagacgatctggttttgctgagcgactcctgggaaaatatgaatacaaatattagcatactggagaccttctgcaatctgaccggactcaaaacacaggggcaaaagtgccacggcttttacatcaagccgacaaaggactcttacaccatcaatgactgcgctgcctggactatcaacggcacacccctgaacatgatcgaccccggcgaatctgagaaatacctcggcctgcagtttgacccgtggattggaatagcaaggtccggtctctccacaaaactagatttttggcttcagcggatcgatcaagcaccacttaaacctctgcagaaaactgatattctcaaaacatacaccatccctcggctgatctacatagctgaccactcagaagtgaaaactgcactactcgaaacccttgaccagaagatccggacagcggtcaaggaatggcttcacctacctccgtgcacctgcgatgccatcctgtactcgagcacgagagacggcggtttgggcatcaccaaattggcaggactgatccccagcgtgcaggcccgtagactgcatcggatcgcacagtcatctgacgatacgatgaaatgcttcatggaaaaagagaaaatggaacagctgcataagaaattgtggattcaagctggaggggacagagagaacataccctcgatttgggaagcaccaccgtcgagtgaaccaccaaacaacgtgagcacaaattcggaatgggaagcaccgacccagaaagataaatttccaaagccttgcaattggaggaaaaacgaattcaaaaaatggaccaaattggcatcccaaggccgcggaattgtaaattttgaaagagacaaaattagtaaccattggatccaatactacagacgcatacctcacaggaaactcctcactgcactacaactcagggccaacgtttaccccacgagagaatttctagccaggggtagacaagaccaatacatcaaggcgtgtaggcactgcgatgcggacattgaatcctgcgcccacatcatcggcaactgcccagtgacacaggacgcccgaatcaagagggccaattacatctgcgaactgcttctcgaggaggcgaagaagaaggactgggtagtgttcaaggaaccgcacataagggattccaacaaggaactgtacaaacctgacctgatatttgtgaaggatgcccgtgcacttgtcgtggatgtgacagtacggtatgaagcagccaaatcatcgctggaggaagccgctgcagagaaagtgagaaaggccaaacacctggaaacggaagtaagacatctcacgaatgcaaaggacgttacttttgtgggctttcccctaggagcgcgggggaaatggcaccaagataactttaaacttttgactgagcttggcctctccaaatcgaggcaagtgaaaatggcagagactttttccacagtagcgctcttttcatctgtggacattgtacatatgtttgccagtagggccagaaaatctatggttatgtaaaccggtagacatgataagatacattgatgagtttggacaaaccacaactagaatgcagtgaaaaaaatgctttatttgtgaaatttgtgatgctattgctttatttgtaaccattataagctgcaataaacaagttaacaacaacaaaaaaaaaaaaaaaaaaaaaaaaaaaaaaacgttgactaaaaaaaaaaaaaaaaaaaaaaaaaaaaaaaaaaaaaaaaaaaaaaaaaaaaaaaaaaaaaaaaaaaaaa

SEQ ID NO: 10675 - DNA, 6509 bp, synthetic construct
  source 1..6509: mol_type = other DNA
gaaataagagagaaaagaagagtaagaagaaatataagagaattcgccaccatggcccctaagaaaaagcggaaggtggacagaaagacaagactgtctgagcctccaaccctggccctgagactgaagccctacaagaccgccatccagcagctgagaagcgtcatcagagccctgaaggaaaataccaccgttacattcctgcctacacccagcctgatcctgcagacagtgcgcagccactgcgtgtctaagatcacatttaattctagctgcctgtatatcaccgacaagtctttccagcctaagaccatcaacaacagcacccctctgctgggcaactttatgtacctgacctccagcaaggacctgactaaattctacgtgcaagacatctccgatctgagcgccaagatctctatgtgcgcccctgatttcaacatggaattcagcagcgcctgtgtgcatggccaggacatcgtcagagagagcgagaacagcgctgtgcacgtggacctggacttcggcgtggtggctgatctgctcaaatggatcggcccccacaccagagtgaagcggaacgtgaagaaagccccttgtcctacaggcacagtgcagatcctggtgcacgccggaccacctgctatcaagttcatccttacaaacggcagcgagctggaattcaccgccaacaaccgggtgtccttccacggcgtgaaaaacatgcggattaacgtgcaactgaaaaatttttaccagaccctgctgaactgcgccgtgaccaagctgccctgcaccctcaggattgtgaccgagcacgacaccctgctgtacgtcgccagcagaaacggcctgttcgccgtggagaacttcctgaccgaggaaccctttcagcggggtgatcctttcgacaagaactacgtgggaaatagcggcaagagcagatccggctccgagactcctggaacaagcgagagcgctacacctgagggcagcaatatcagcggctctagctgcggcagccccaacagcgccgacaccagcagcgacttcaaggacctgtggaccaagctgaaggaatgccacgaccgggaagtgcagggactccaggtgaaggtcaccaaactcaagcaagaaagaatcctggacgcccagagactggaagaattcttcaccaagaaccagcagctgagagagcagcagaaagtgctgcacgagacaatcaaggttctggaagatagactgcgggccggcctgtgcgacagatgcgccgtgaccgaggaacacatgcgcaaaaagcagcaggagttcgagaacattagacagcaaaatctgaaattgatcacagagctgatgaacgagagaaacacactgcaggaggagaacaagaagctgagcgagcagctgcaacagaagatcgagaatgatcagcaacaccaggccgctgagctggaatgtgaagaggacgtgatccccgacagcccaatcacagctttcagcttttctggcgtgaacagactgaggcggaaggaaaacccccacgtgcggtacatcgagcagacccataccaagctggaacacagcgtgtgtgccaacgagatgagaaaggtgtccaagtcctccacccatccccagcacaaccctaacgaaaatgagatcctggtggctgatacctacgaccagtctcagagccctatggccaaggcccacggcaccagctcttatacccctgataagagctccttcaacctggccaccgtggtggccgagacactgggcctgggcgtgcaggaggaaagcgagacacagggcccaatgagccctctgggagatgagctgtaccactgcctggaaggcaaccacaagaaacagccttttgagtccggctccgagactcctggaacaagcgagagcgctacacctgagggcagccctaagagaaaggtgtccagcgccgagggcgctgccaaggaagagcctaaacggagaagcgccagactgagcgccaagccccccgccaaggtggaagccaagcctaagaaggccgccgctaaggacaagagcagcgataagaaagtccagaccaagggcaagcggggcgccaaaggcaaacaggccgaggtggccaaccaggagacaaaggaagatctgcctgctgagaacggcgaaaccaagaccgaggaatctccagcttctgacgaggccggagagaaggaggccaaaagcgacagcggctctgagacacctggaacaagcgagagcgccaccccggaatcctatgaacaacttgcaccacaaccgtgtgtgggagaaactttacattctagcctcccacgagacagtgaactgtttgtgcctgaagaggggagcagcgagaaggagagcgaggacgcgccaaaaacatctcctccgacgcctgggaaacatggtttggaacagactggggaggaaaaagtgatggtgactgttcctgacaaaaatccaccttgtccttgctgtggtacccgggtaaactctgtgttgaatctgattgaacatctgaaagtgtcacacgggaaaaggggggtttgttttcggtgtgcaaaatgtggaaaggaaaatagtaactatcacagtgttgtttgtcattttaagaaatgcaggggtccagagacggagaaagccccagctggggagtggatttgtgaggtatgcaacagagattttacaaccaaaattggcctgggacaacacaagagattggcacacccagcagtgagaaatcaggaaaggatcgttgcttcccaaccgaaagaaacatcaaatagaggtgctcacaaaaggtgctggacaaaggaggaggaagaattactaataagactggaggctcagttcgagggaaacaaaaatattaataagcttattgcagaacacataaccaccaaaacagctaagcagatcagtgacaaaaggcgattgctgtccagaaagccagcagaggagccacgtgaggagcctggaacgtgtcatcacaccaggagagcagctgcgagcctgagaacggagcctgagatgagtcatcacgcccaggcagaggacagagataatggacctgggagacgccctctgccaggcagggcagctgccggagggagaacaatggacgagataagacgccaccctgataagggcaacggacagcagagacccaccaagcaaaaatcagaagaacagctgcaggcttactataaaaagacactagaggaacgactttcagctggggcacttaacaccttcccccgagcattcaagcaggtaatggaaggccgggatataaagctagtaatcaatcagacagcgcaggactgcttcggatgcctggaatccataagccaaataagaacggcaacccgagataaaaaggacacggtgacccgggagaaacacccaaagaaaccttttcagaagtggatgaagaagagagcaatcaaaaaaggtaattatcttcggttccagcgtttattttatcttgatagagggaaactggctaaaatcattttagatgatattgaatgcttgtcttgtgacataccactcagtgaaatttattcggtttttaaaacaagatgggaaacaactggtagctttaaaagccttggggactttaaaacttacgggaaggctgacaacactgccttcagagaattaattacggctaaagaaattgagaaaaatgtgcaggaaatgagcaaaggctcggctcccggtccagacgggattactcttggggacgtcgtaaagatggatcccgagttttcccggaccatggagattttcaatttatggttaacaactggtaaaatcccggacatggtgagggggtgcagaaccgttttgattccaaaatcatcaaagccggatcgtttgaaagacattaataactggagacctatcacgatcggttccatcttgctgagactgttctccaggattgtaacagctaggctgagcaaagcgtgccccctgaacccaaggcaaagaggctttatcagagcggcgggatgctctgaaaacttaaaactcctgcaaactataatttggtcggccaaaagagaacacagaccactgggtgttgtattcgtggacatcgccaaggcttttgacaccgtaagccaccagcacatcattcatgctttgcagcaaagagaggtggatccccacatcgtcggtctggtgagcaatatgtacgagaacatcagtacgtatatcaccacaaagaggaacacacacacagacaaaatccagatccgggttggagtaaagcagggtgacccgatgtcgccccttttatttaacctggcaatggaccctctattatgcaagctggaagagagtggcaaaggataccaccgaggacagagcagcatcacagcgatggcatttgcagacgatctggttttgctgagcgactcctgggaaaatatgaatacaaatattagcatactggagaccttctgcaatctgaccggactcaaaacacaggggcaaaagtgccacggcttttacatcaagccgacaaagaagtcttacaccatcaatgactgcgctgcctggactatcaacggcacacccctgaacatgatcgaccccggcgaatctgagaaatacctcggcctgcagtttgacccgtggattggaatagcaaggtccggtctctccacaaaactagatttttggcttcagcggatcgatcaagcaccacttaaacctctgcagaaaactgatattctcaaaacatacaccatccctcggctgatctacatagctgaccactcagaagtgaaaagcgcactactcgaaacccttgaccagaagatccggacagcggtcaaggaatggcttcacctacctccgtgcacctgcgatgccatcctgtactcgagcacgagagacggcggtttgggcatcaccaaattggcaggactgatccccagcgtgcaggcccgtagactgcatcggatcgcacagtcatctgacgatacgatgaaatgcttcatggaaaaagagaaaatggaacagctgcataagaaattgtggattcaagctggaggggacagagagaacataccctcgatttgggaagcaccaccgtcgagtgaaccaccaaacaacgtgagcacaaattcggaatgggaagcaccgacccagaaagataaatttccaaagccttgcaattggaggaaaaacgaattcaaaaaatggaccaaattggcatcccaaggccgcggaattgtaaattttgaaagagacaaaattagtaaccattggatccaatactacagacgcatacctcacaggaaactcctcactgcactacaactcagggccaacgtttaccccacgagagaatttctagccaggggtagacaagaccaatacatcaaggcgtgtaggcactgcgatgcggacaacgaatcctgcgcccacatcatcggcaactgcccagtgacacaggacgcccgaatcaagaggcacaattacatctgcgaactgcttctcgaggaggcgaagaagaaggactgggtagtgttcaaggaaccgcacataagggattccaacaaggaactgtacaaacctgacctgatatttgtgaaggatgggcgtgcacttgtcgtggatgtgacagtacggtatgaagcagccaaatcatcgctggaggaagccgctgcagagaaagtgagaaagtacaaacacctggaaacggaagtaagacatctcacgaatgcaaaggacgttacttttgtgggctttcccctaggagcgcgggggaaatggcaccaagataactttaaacttttgactgagcttggcctctccaaatcgaggcaagtgaaaatggcagagactttttccacagtagcgctcttttcatctgtggacattgtacatatgtttgccagtagggccagaaaatctatggttatgagcggctctgagacacctggaacaagcgagagcgccaccccggaatccaacaagagcaagaaccagaaacctaagcctcaaagaggccccagaggcagagtgcggggccagtctagaagcggccctgtggtgttccccagcggcgctgtgctggtgggcggaagatacatccctccacctaaaaaggccatcagaggaccacggcggggcctggtccaggcccctaagtctagcgagcggaccagccccagaaagcgcagatctggcggctcaaaacggacagccgacggaagcgagttcgagtcaccaaagaagaagcggaaagtctgataataggctgccttctgcggggcttgccttctggccatgcccttcttctctcccttgcacctgtacctcttggtctttgaataaagcctgagtaggaaggaccggtaaaaaaaaaaaaaaaaaaaaaaaaaaaaaaacgttgactaaaaaaaaaaaaaaaaaaaaaaaaaaaaaaaaaaaaaaaaaaaaaaaaaaaaaaaaaaaaaaaaaaaaaa

SEQ ID NO: 10676 - DNA, 5264 bp, synthetic construct
  source 1..5264: mol_type = other DNA
gaaataagagagaaaagaagagtaagaagaaatataagagaattcgccaccatggcccctaagaaaaagcggaaggtgaatatcagcggctctagctgcggcagccccaacagcgccgacaccagcagcgacttcaaggacctgtggaccaagctgaaggaatgccacgaccgggaagtgcagggactccaggtgaaggtcaccaaactcaagcaagaaagaatcctggacgcccagagactggaagaattcttcaccaagaaccagcagctgagagagcagcagaaagtgctgcacgagacaatcaaggttctggaagatagactgcgggccggcctgtgcgacagatgcgccgtgaccgaggaacacatgcgcaaaaagcagcaggagttcgagaacattagacagcaaaatctgaaattgatcacagagctgatgaacgagagaaacacactgcaggaggagaacaagaagctgagcgagcagctgcaacagaagatcgagaatgatcagcaacaccaggccgctgagctggaatgtgaagaggacgtgatccccgacagcccaatcacagctttcagcttttctggcgtgaacagactgaggcggaaggaaaacccccacgtgcggtacatcgagcagacccataccaagctggaacacagcgtgtgtgccaacgagatgagaaaggtgtccaagtcctccacccatccccagcacaaccctaacgaaaatgagatcctggtggctgatacctacgaccagtctcagagccctatggccaaggcccacggcaccagctcttatacccctgataagagctccttcaacctggccaccgtggtggccgagacactgggcctgggcgtgcaggaggaaagcgagacacagggcccaatgagccctctgggagatgagctgtaccactgcctggaaggcaaccacaagaaacagccttttgagtccggctccgagactcctggaacaagcgagagcgctacacctgagggcagccctaagagaaaggtgtccagcgccgagggcgctgccaaggaagagcctaaacggagaagcgccagactgagcgccaagccccccgccaaggtggaagccaagcctaagaaggccgccgctaaggacaagagcagcgataagaaagtccagaccaagggcaagcggggcgccaaaggcaaacaggccgaggtggccaaccaggagacaaaggaagatctgcctgctgagaacggcgaaaccaagaccgaggaatctccagcttctgacgaggccggagagaaggaggccaaaagcgacagcggctctgagacacctggaacaagcgagagcgccaccccggaatcctatgaacaacttgcaccacaaccgtgtgtgggagaaactttacattctagcctcccacgagacagtgaactgtttgtgcctgaagaggggagcagcgagaaggagagcgaggacgcgccaaaaacatctcctccgacgcctgggaaacatggtttggaacagactggggaggaaaaagtgatggtgactgttcctgacaaaaatccaccttgtccttgctgtggtacccgggtaaactctgtgttgaatctgattgaacatctgaaagtgtcacacgggaaaaggggggtttgttttcggtgtgcaaaatgtggaaaggaaaatagtaactatcacagtgttgtttgtcattttaagaaatgcaggggtccagagacggagaaagccccagctggggagtggatttgtgaggtatgcaacagagattttacaaccaaaattggcctgggacaacacaagagattggcacacccagcagtgagaaatcaggaaaggatcgttgcttcccaaccgaaagaaacatcaaatagaggtgctcacaaaaggtgctggacaaaggaggaggaagaattactaataagactggaggctcagttcgagggaaacaaaaatattaataagcttattgcagaacacataaccaccaaaacagctaagcagatcagtgacaaaaggcgattgctgtccagaaagccagcagaggagccacgtgaggagcctggaacgtgtcatcacaccaggagagcagctgcgagcctgagaacggagcctgagatgagtcatcacgcccaggcagaggacagagataatggacctgggagacgccctctgccaggcagggcagctgccggagggagaacaatggacgagataagacgccaccctgataagggcaacggacagcagagacccaccaagcaaaaatcagaagaacagctgcaggcttactataaaaagacactagaggaacgactttcagctggggcacttaacaccttcccccgagcattcaagcaggtaatggaaggccgggatataaagctagtaatcaatcagacagcgcaggactgcttcggatgcctggaatccataagccaaataagaacggcaacccgagataaaaaggacacggtgacccgggagaaacacccacagaccacaatcagagaatactacaagaagagagcaatcaaaaaaggtaattatcttcggttccagcgtttattttatcttgatagagggaaactggctaaaatcattttagatgatattgaatgcttgtcttgtgacataccactcagtgaaatttattcggtttttaaaacaagatgggaaacaactggtagctttaaaagccttggggactttaaaacttacgggaaggctgacaacactgccttcagagaattaattacggctaaagaaattgagaaaaatgtgcaggaaatgagcaaaggctcggctcccggtccagacgggattactcttggggacgtcgtaaagatggatcccgagttttcccggaccatggagattttcaatttatggttaacaactggtaaaatcccggacatggtgagggggtgcagaaccgttttgattccaaaatcatcaaagccggatcgtttgaaagacattaataactggagacctatcacgatcggttccatcttgctgagactgttctccaggattgtaacagctaggctgagcaaagcgtgccccctgaacccaaggcaaagaggctttatcagagcggcgggatgctctgaaaacttaaaactcctgcaaactataatttggtcggccaaaagagaacacagaccactgggtgttgtattcgtggacatcgccaaggcttttgacaccgtaagccaccagcacatcattcatgctttgcagcaaagagaggtggatccccacatcgtcggtctggtgagcaatatgtacgagaacatcagtacgtatatcaccacaaagaggaacacacacacagacaaaatccagatccgggttggagtaaagcagggtgacccgatgtcgccccttttatttaacctggcaatggaccctctattatgcaagctggaagagagtggcaaaggataccaccgaggacagagcagcatcacagcgatggcatttgcagacgatctggttttgctgagcgactcctgggaaaatatgaatacaaatattagcatactggagaccttctgcaatctgaccggactcaaaacacaggggcaaaagtgccacggcttttacatcaagccgacaaagaagtcttacaccatcaatgactgcgctgcctggactatcaacggcacacccctgaacatgatcgaccccggcgaatctgagaaatacctcggcctgcagtttgacccgtggattggaatagcaaggtccggtctctccacaaaactagatttttggcttcagcggatcgatcaagcaccacttaaacctctgcagaaaactgatattctcaaaacatacaccatccctcggctgatctacatagctgaccactcagaagtgaaaagcgcactactcgaaacccttgaccagaagatccggacagcggtcaaggaatggcttcacctacctccgtgcacctgcgatgccatcctgtactcgagcacgagagacggcggtttgggcatcaccaaattggcaggactgatccccagcgtgcaggcccgtagactgcatcggatcgcacagtcatctgacgatacgatgaaatgcttcatggaaaaagagaaaatggaacagctgcataagaaattgtggattcaagctggaggggacagagagaacataccctcgatttgggaagcaccaccgtcgagtgaaccaccaaacaacgtgagcacaaattcggaatgggaagcaccgacccagaaagataaatttccaaagccttgcaattggaggaaaaacgaattcaaaaaatggaccaaattggcatcccaaggccgcggaattgtaaattttgaaagagacaaaattagtaaccattggatccaatactacagacgcatacctcacaggaaactcctcactgcactacaactcagggccaacgtttaccccacgagagaatttctagccaggggtagacaagaccaatacatcaaggcgtgtaggcactgcgatgcggacaacgaatcctgcgcccacatcatcggcaactgcccagtgacacaggacgcccgaatcaagaggcacaattacatctgcgaactgcttctcgaggaggcgaagaagaaggactgggtagtgttcaaggaaccgcacataagggattccaacaaggaactgtacaaacctgacctgatatttgtgaaggatgggcgtgcacttgtcgtggatgtgacagtacggtatgaagcagccaaatcatcgctggaggaagccgctgcagagaaagtgagaaagtacaaacacctggaaacggaagtaagacatctcacgaatgcaaaggacgttacttttgtgggctttcccctaggagcgcgggggaaatggcaccaagataactttaaacttttgactgagcttggcctctccaaatcgaggcaagtgaaaatggcagagactttttccacagtagcgctcttttcatctgtggacattgtacatatgtttgccagtagggccagaaaatctatggttatgtgataataggctgccttctgcggggcttgccttctggccatgcccttcttctctcccttgcacctgtacctcttggtctttgaataaagcctgagtaggaaggaccggtaaaaaaaaaaaaaaaaaaaaaaaaaaaaaaacgttgactaaaaaaaaaaaaaaaaaaaaaaaaaaaaaaaaaaaaaaaaaaaaaaaaaaaaaaaaaaaaaaaaaaaaaa

SEQ ID NO: 10677 - DNA, 5282 bp, synthetic construct
  source 1..5282: mol_type = other DNA
gaaataagagagaaaagaagagtaagaagaaatataagagaattcgccaccatggctcctgctgccaagagggtcaagttggactctggcggctcaaatatcagcggctctagctgcggcagccccaacagcgccgacaccagcagcgacttcaaggacctgtggaccaagctgaaggaatgccacgaccgggaagtgcagggactccaggtgaaggtcaccaaactcaagcaagaaagaatcctggacgcccagagactggaagaattcttcaccaagaaccagcagctgagagagcagcagaaagtgctgcacgagacaatcaaggttctggaagatagactgcgggccggcctgtgcgacagatgcgccgtgaccgaggaacacatgcgcaaaaagcagcaggagttcgagaacattagacagcaaaatctgaaattgatcacagagctgatgaacgagagaaacacactgcaggaggagaacaagaagctgagcgagcagctgcaacagaagatcgagaatgatcagcaacaccaggccgctgagctggaatgtgaagaggacgtgatccccgacagcccaatcacagctttcagcttttctggcgtgaacagactgaggcggaaggaaaacccccacgtgcggtacatcgagcagacccataccaagctggaacacagcgtgtgtgccaacgagatgagaaaggtgtccaagtcctccacccatccccagcacaaccctaacgaaaatgagatcctggtggctgatacctacgaccagtctcagagccctatggccaaggcccacggcaccagctcttatacccctgataagagctccttcaacctggccaccgtggtggccgagacactgggcctgggcgtgcaggaggaaagcgagacacagggcccaatgagccctctgggagatgagctgtaccactgcctggaaggcaaccacaagaaacagccttttgagtccggctccgagactcctggaacaagcgagagcgctacacctgagggcagccctaagagaaaggtgtccagcgccgagggcgctgccaaggaagagcctaaacggagaagcgccagactgagcgccaagccccccgccaaggtggaagccaagcctaagaaggccgccgctaaggacaagagcagcgataagaaagtccagaccaagggcaagcggggcgccaaaggcaaacaggccgaggtggccaaccaggagacaaaggaagatctgcctgctgagaacggcgaaaccaagaccgaggaatctccagcttctgacgaggccggagagaaggaggccaaaagcgacagcggctctgagacacctggaacaagcgagagcgccaccccggaatcctatgaacaacttgcaccacaaccgtgtgtgggagaaactttacattctagcctcccacgagacagtgaactgtttgtgcctgaagaggggagcagcgagaaggagagcgaggacgcgccaaaaacatctcctccgacgcctgggaaacatggtttggaacagactggggaggaaaaagtgatggtgactgttcctgacaaaaatccaccttgtccttgctgtggtacccgggtaaactctgtgttgaatctgattgaacatctgaaagtgtcacacgggaaaaggggggtttgttttcggtgtgcaaaatgtggaaaggaaaatagtaactatcacagtgttgtttgtcattttaagaaatgcaggggtccagagacggagaaagccccagctggggagtggatttgtgaggtatgcaacagagattttacaaccaaaattggcctgggacaacacaagagattggcacacccagcagtgagaaatcaggaaaggatcgttgcttcccaaccgaaagaaacatcaaatagaggtgctcacaaaaggtgctggacaaaggaggaggaagaattactaataagactggaggctcagttcgagggaaacaaaaatattaataagcttattgcagaacacataaccaccaaaacagctaagcagatcagtgacaaaaggcgattgctgtccagaaagccagcagaggagccacgtgaggagcctggaacgtgtcatcacaccaggagagcagctgcgagcctgagaacggagcctgagatgagtcatcacgcccaggcagaggacagagataatggacctgggagacgccctctgccaggcagggcagctgccggagggagaacaatggacgagataagacgccaccctgataagggcaacggacagcagagacccaccaagcaaaaatcagaagaacagctgcaggcttactataaaaagacactagaggaacgactttcagctggggcacttaacaccttcccccgagcattcaagcaggtaatggaaggccgggatataaagctagtaatcaatcagacagcgcaggactgcttcggatgcctggaatccataagccaaataagaacggcaacccgagataaaaaggacacggtgacccgggagaaacacccaaagaaaccttttcagaagtggatgaagaagagagcaatcaaaaaaggtaattatcttcggttccagcgtttattttatcttgatagagggaaactggctaaaatcattttagatgatattgaatgcttgtcttgtgacataccactcagtgaaatttattcggtttttaaaacaagatgggaaacaactggtagctttaaaagccttggggactttaaaacttacgggaaggctgacaacactgccttcagagaattaattacggctaaagaaattgagaaaaatgtgcaggaaatgagcaaaggctcggctcccggtccagacgggattactcttggggacgtcgtaaagatggatcccgagttttcccggaccatggagattttcaatttatggttaacaactggtaaaatcccggacatggtgagggggtgcagaaccgttttgattccaaaatcatcaaagccggatcgtttgaaagacattaataactggagacctatcacgatcggttccatcttgctgagactgttctccaggattgtaacagctaggctgagcaaagcgtgccccctgaacccaaggcaaagaggctttatcagagcggcgggatgctctgaaaacttaaaactcctgcaaactataatttggtcggccaaaagagaacacagaccactgggtgttgtattcgtggacatcgccaaggcttttgacaccgtaagccaccagcacatcattcatgctttgcagcaaagagaggtggatccccacatcgtcggtctggtgagcaatatgtacgagaacatcagtacgtatatcaccacaaagaggaacacacacacagacaaaatccagatccgggttggagtaaagcagggtgacccgatgtcgccccttttatttaacctggcaatggaccctctattatgcaagctggaagagagtggcaaaggataccaccgaggacagagcagcatcacagcgatggcatttgcagacgatctggttttgctgagcgactcctgggaaaatatgaatacaaatattagcatactggagaccttctgcaatctgaccggactcaaaacacaggggcaaaagtgccacggcttttacatcaagccgacaaagaagtcttacaccatcaatgactgcgctgcctggactatcaacggcacacccctgaacatgatcgaccccggcgaatctgagaaatacctcggcctgcagtttgacccgtggattggaatagcaaggtccggtctctccacaaaactagatttttggcttcagcggatcgatcaagcaccacttaaacctctgcagaaaactgatattctcaaaacatacaccatccctcggctgatctacatagctgaccactcagaagtgaaaagcgcactactcgaaacccttgaccagaagatccggacagcggtcaaggaatggcttcacctacctccgtgcacctgcgatgccatcctgtactcgagcacgagagacggcggtttgggcatcaccaaattggcaggactgatccccagcgtgcaggcccgtagactgcatcggatcgcacagtcatctgacgatacgatgaaatgcttcatggaaaaagagaaaatggaacagctgcataagaaattgtggattcaagctggaggggacagagagaacataccctcgatttgggaagcaccaccgtcgagtgaaccaccaaacaacgtgagcacaaattcggaatgggaagcaccgacccagaaagataaatttccaaagccttgcaattggaggaaaaacgaattcaaaaaatggaccaaattggcatcccaaggccgcggaattgtaaattttgaaagagacaaaattagtaaccattggatccaatactacagacgcatacctcacaggaaactcctcactgcactacaactcagggccaacgtttaccccacgagagaatttctagccaggggtagacaagaccaatacatcaaggcgtgtaggcactgcgatgcggacaacgaatcctgcgcccacatcatcggcaactgcccagtgacacaggacgcccgaatcaagaggcacaattacatctgcgaactgcttctcgaggaggcgaagaagaaggactgggtagtgttcaaggaaccgcacataagggattccaacaaggaactgtacaaacctgacctgatatttgtgaaggatgggcgtgcacttgtcgtggatgtgacagtacggtatgaagcagccaaatcatcgctggaggaagccgctgcagagaaagtgagaaagtacaaacacctggaaacggaagtaagacatctcacgaatgcaaaggacgttacttttgtgggctttcccctaggagcgcgggggaaatggcaccaagataactttaaacttttgactgagcttggcctctccaaatcgaggcaagtgaaaatggcagagactttttccacagtagcgctcttttcatctgtggacattgtacatatgtttgccagtagggccagaaaatctatggttatgtgataataggctgccttctgcggggcttgccttctggccatgcccttcttctctcccttgcacctgtacctcttggtctttgaataaagcctgagtaggaaggaccggtaaaaaaaaaaaaaaaaaaaaaaaaaaaaaaacgttgactaaaaaaaaaaaaaaaaaaaaaaaaaaaaaaaaaaaaaaaaaaaaaaaaaaaaaaaaaaaaaaaaaaaaaa

SEQ ID NO: 10678 - DNA, 5495 bp, synthetic construct
  source 1..5495: mol_type = other DNA
gaaataagagagaaaagaagagtaagaagaaatataagagaattcgccaccatggcccctaagaaaaagcggaaggtgtggaagcctggagatgagtgcttcgccctgtactgggaggacaacaagttttatagagccgaggtggaagctctgcactctagcggcatgaccgccgtggtgaaattcatcgactacggcaattacgaggaagtcctgctgagcaacatcaagcccatccagacagaggcctgggaagagtccggctccgagactcctggaacaagcgagagcgctacacctgagggcagcaatatcagcggctctagctgcggcagccccaacagcgccgacaccagcagcgacttcaaggacctgtggaccaagctgaaggaatgccacgaccgggaagtgcagggactccaggtgaaggtcaccaaactcaagcaagaaagaatcctggacgcccagagactggaagaattcttcaccaagaaccagcagctgagagagcagcagaaagtgctgcacgagacaatcaaggttctggaagatagactgcgggccggcctgtgcgacagatgcgccgtgaccgaggaacacatgcgcaaaaagcagcaggagttcgagaacattagacagcaaaatctgaaattgatcacagagctgatgaacgagagaaacacactgcaggaggagaacaagaagctgagcgagcagctgcaacagaagatcgagaatgatcagcaacaccaggccgctgagctggaatgtgaagaggacgtgatccccgacagcccaatcacagctttcagcttttctggcgtgaacagactgaggcggaaggaaaacccccacgtgcggtacatcgagcagacccataccaagctggaacacagcgtgtgtgccaacgagatgagaaaggtgtccaagtcctccacccatccccagcacaaccctaacgaaaatgagatcctggtggctgatacctacgaccagtctcagagccctatggccaaggcccacggcaccagctcttatacccctgataagagctccttcaacctggccaccgtggtggccgagacactgggcctgggcgtgcaggaggaaagcgagacacagggcccaatgagccctctgggagatgagctgtaccactgcctggaaggcaaccacaagaaacagccttttgagtccggctccgagactcctggaacaagcgagagcgctacacctgagggcagccctaagagaaaggtgtccagcgccgagggcgctgccaaggaagagcctaaacggagaagcgccagactgagcgccaagccccccgccaaggtggaagccaagcctaagaaggccgccgctaaggacaagagcagcgataagaaagtccagaccaagggcaagcggggcgccaaaggcaaacaggccgaggtggccaaccaggagacaaaggaagatctgcctgctgagaacggcgaaaccaagaccgaggaatctccagcttctgacgaggccggagagaaggaggccaaaagcgacagcggctctgagacacctggaacaagcgagagcgccaccccggaatcctatgaacaacttgcaccacaaccgtgtgtgggagaaactttacattctagcctcccacgagacagtgaactgtttgtgcctgaagaggggagcagcgagaaggagagcgaggacgcgccaaaaacatctcctccgacgcctgggaaacatggtttggaacagactggggaggaaaaagtgatggtgactgttcctgacaaaaatccaccttgtccttgctgtggtacccgggtaaactctgtgttgaatctgattgaacatctgaaagtgtcacacgggaaaaggggggtttgttttcggtgtgcaaaatgtggaaaggaaaatagtaactatcacagtgttgtttgtcattttaagaaatgcaggggtccagagacggagaaagccccagctggggagtggatttgtgaggtatgcaacagagattttacaaccaaaattggcctgggacaacacaagagattggcacacccagcagtgagaaatcaggaaaggatcgttgcttcccaaccgaaagaaacatcaaatagaggtgctcacaaaaggtgctggacaaaggaggaggaagaattactaataagactggaggctcagttcgagggaaacaaaaatattaataagcttattgcagaacacataaccaccaaaacagctaagcagatcagtgacaaaaggcgattgctgtccagaaagccagcagaggagccacgtgaggagcctggaacgtgtcatcacaccaggagagcagctgcgagcctgagaacggagcctgagatgagtcatcacgcccaggcagaggacagagataatggacctgggagacgccctctgccaggcagggcagctgccggagggagaacaatggacgagataagacgccaccctgataagggcaacggacagcagagacccaccaagcaaaaatcagaagaacagctgcaggcttactataaaaagacactagaggaacgactttcagctggggcacttaacaccttcccccgagcattcaagcaggtaatggaaggccgggatataaagctagtaatcaatcagacagcgcaggactgcttcggatgcctggaatccataagccaaataagaacggcaacccgagataaaaaggacacggtgacccgggagaaacacccaaagaaaccttttcagaagtggatgaagaagagagcaatcaaaaaaggtaattatcttcggttccagcgtttattttatcttgatagagggaaactggctaaaatcattttagatgatattgaatgcttgtcttgtgacataccactcagtgaaatttattcggtttttaaaacaagatgggaaacaactggtagctttaaaagccttggggactttaaaacttacgggaaggctgacaacactgccttcagagaattaattacggctaaagaaattgagaaaaatgtgcaggaaatgagcaaaggctcggctcccggtccagacgggattactcttggggacgtcgtaaagatggatcccgagttttcccggaccatggagattttcaatttatggttaacaactggtaaaatcccggacatggtgagggggtgcagaaccgttttgattccaaaatcatcaaagccggatcgtttgaaagacattaataactggagacctatcacgatcggttccatcttgctgagactgttctccaggattgtaacagctaggctgagcaaagcgtgccccctgaacccaaggcaaagaggctttatcagagcggcgggatgctctgaaaacttaaaactcctgcaaactataatttggtcggccaaaagagaacacagaccactgggtgttgtattcgtggacatcgccaaggcttttgacaccgtaagccaccagcacatcattcatgctttgcagcaaagagaggtggatccccacatcgtcggtctggtgagcaatatgtacgagaacatcagtacgtatatcaccacaaagaggaacacacacacagacaaaatccagatccgggttggagtaaagcagggtgacccgatgtcgccccttttatttaacctggcaatggaccctctattatgcaagctggaagagagtggcaaaggataccaccgaggacagagcagcatcacagcgatggcatttgcagacgatctggttttgctgagcgactcctgggaaaatatgaatacaaatattagcatactggagaccttctgcaatctgaccggactcaaaacacaggggcaaaagtgccacggcttttacatcaagccgacaaaggactcttacaccatcaatgactgcgctgcctggactatcaacggcacacccctgaacatgatcgaccccggcgaatctgagaaatacctcggcctgcagtttgacccgtggattggaatagcaaggtccggtctctccacaaaactagatttttggcttcagcggatcgatcaagcaccacttaaacctctgcagaaaactgatattctcaaaacatacaccatccctcggctgatctacatagctgaccactcagaagtgaaaagcgcactactcgaaacccttgaccagaagatccggacagcggtcaaggaatggcttcacctacctccgtgcacctgcgatgccatcctgtactcgagcacgagagacggcggtttgggcatcaccaaattggcaggactgatccccagcgtgcaggcccgtagactgcatcggatcgcacagtcatctgacgatacgatgaaatgcttcatggaaaaagagaaaatggaacagctgcataagaaattgtggattcaagctggaggggacagagagaacataccctcgatttgggaagcaccaccgtcgagtgaaccaccaaacaacgtgagcacaaattcggaatgggaagcaccgacccagaaagataaatttccaaagccttgcaattggaggaaaaacgaattcaaaaaatggaccaaattggcatcccaaggccgcggaattgtaaattttgaaagagacaaaattagtaaccattggatccaatactacagacgcatacctcacaggaaactcctcactgcactacaactcagggccaacgtttaccccacgagagaatttctagccaggggtagacaagaccaatacatcaaggcgtgtaggcactgcgatgcggacaacgaatcctgcgcccacatcatcggcaactgcccagtgacacaggacgcccgaatcaagaggcacaattacatctgcgaactgcttctcgaggaggcgaagaagaaggactgggtagtgttcaaggaaccgcacataagggattccaacaaggaactgtacaaacctgacctgatatttgtgaaggatgggcgtgcacttgtcgtggatgtgacagtacggtatgaagcagccaaatcatcgctggaggaagccgctgcagagaaagtgagaaagtacaaacacctggaaacggaagtaagacatctcacgaatgcaaaggacgttacttttgtgggctttcccctaggagcgcgggggaaatggcaccaagataactttaaacttttgactgagcttggcctctccaaatcgaggcaagtgaaaatggcagagactttttccacagtagcgctcttttcatctgtggacattgtacatatgtttgccagtagggccagaaaatctatggttatgtgataataggctgccttctgcggggcttgccttctggccatgcccttcttctctcccttgcacctgtacctcttggtctttgaataaagcctgagtaggaaggaccggtaaaaaaaaaaaaaaaaaaaaaaaaaaaaaaacgttgactaaaaaaaaaaaaaaaaaaaaaaaaaaaaaaaaaaaaaaaaaaaaaaaaaaaaaaaaaaaaaaaaaaaaaa

SEQ ID NO: 10679 - DNA, 5369 bp, synthetic construct
  source 1..5369: mol_type = other DNA
gaaataagagagaaaagaagagtaagaagaaatataagagaattcgccaccatggccagcaagcaggagatggccagcgccagcagcagccagaggggcaggagcggcagcggcaacttcggcggcggcaggggcggcggcttcggcggcaacgacaacttccctaagaaaaagcggaaggtgaatatcagcggctctagctgcggcagccccaacagcgccgacaccagcagcgacttcaaggacctgtggaccaagctgaaggaatgccacgaccgggaagtgcagggactccaggtgaaggtcaccaaactcaagcaagaaagaatcctggacgcccagagactggaagaattcttcaccaagaaccagcagctgagagagcagcagaaagtgctgcacgagacaatcaaggttctggaagatagactgcgggccggcctgtgcgacagatgcgccgtgaccgaggaacacatgcgcaaaaagcagcaggagttcgagaacattagacagcaaaatctgaaattgatcacagagctgatgaacgagagaaacacactgcaggaggagaacaagaagctgagcgagcagctgcaacagaagatcgagaatgatcagcaacaccaggccgctgagctggaatgtgaagaggacgtgatccccgacagcccaatcacagctttcagcttttctggcgtgaacagactgaggcggaaggaaaacccccacgtgcggtacatcgagcagacccataccaagctggaacacagcgtgtgtgccaacgagatgagaaaggtgtccaagtcctccacccatccccagcacaaccctaacgaaaatgagatcctggtggctgatacctacgaccagtctcagagccctatggccaaggcccacggcaccagctcttatacccctgataagagctccttcaacctggccaccgtggtggccgagacactgggcctgggcgtgcaggaggaaagcgagacacagggcccaatgagccctctgggagatgagctgtaccactgcctggaaggcaaccacaagaaacagccttttgagtccggctccgagactcctggaacaagcgagagcgctacacctgagggcagccctaagagaaaggtgtccagcgccgagggcgctgccaaggaagagcctaaacggagaagcgccagactgagcgccaagccccccgccaaggtggaagccaagcctaagaaggccgccgctaaggacaagagcagcgataagaaagtccagaccaagggcaagcggggcgccaaaggcaaacaggccgaggtggccaaccaggagacaaaggaagatctgcctgctgagaacggcgaaaccaagaccgaggaatctccagcttctgacgaggccggagagaaggaggccaaaagcgacagcggctctgagacacctggaacaagcgagagcgccaccccggaatcctatgaacaacttgcaccacaaccgtgtgtgggagaaactttacattctagcctcccacgagacagtgaactgtttgtgcctgaagaggggagcagcgagaaggagagcgaggacgcgccaaaaacatctcctccgacgcctgggaaacatggtttggaacagactggggaggaaaaagtgatggtgactgttcctgacaaaaatccaccttgtccttgctgtggtacccgggtaaactctgtgttgaatctgattgaacatctgaaagtgtcacacgggaaaaggggggtttgttttcggtgtgcaaaatgtggaaaggaaaatagtaactatcacagtgttgtttgtcattttaagaaatgcaggggtccagagacggagaaagccccagctggggagtggatttgtgaggtatgcaacagagattttacaaccaaaattggcctgggacaacacaagagattggcacacccagcagtgagaaatcaggaaaggatcgttgcttcccaaccgaaagaaacatcaaatagaggtgctcacaaaaggtgctggacaaaggaggaggaagaattactaataagactggaggctcagttcgagggaaacaaaaatattaataagcttattgcagaacacataaccaccaaaacagctaagcagatcagtgacaaaaggcgattgctgtccagaaagccagcagaggagccacgtgaggagcctggaacgtgtcatcacaccaggagagcagctgcgagcctgagaacggagcctgagatgagtcatcacgcccaggcagaggacagagataatggacctgggagacgccctctgccaggcagggcagctgccggagggagaacaatggacgagataagacgccaccctgataagggcaacggacagcagagacccaccaagcaaaaatcagaagaacagctgcaggcttactataaaaagacactagaggaacgactttcagctggggcacttaacaccttcccccgagcattcaagcaggtaatggaaggccgggatataaagctagtaatcaatcagacagcgcaggactgcttcggatgcctggaatccataagccaaataagaacggcaacccgagataaaaaggacacggtgacccgggagaaacacccaaagaaaccttttcagaagtggatgaagaagagagcaatcaaaaaaggtaattatcttcggttccagcgtttattttatcttgatagagggaaactggctaaaatcattttagatgatattgaatgcttgtcttgtgacataccactcagtgaaatttattcggtttttaaaacaagatgggaaacaactggtagctttaaaagccttggggactttaaaacttacgggaaggctgacaacactgccttcagagaattaattacggctaaagaaattgagaaaaatgtgcaggaaatgagcaaaggctcggctcccggtccagacgggattactcttggggacgtcgtaaagatggatcccgagttttcccggaccatggagattttcaatttatggttaacaactggtaaaatcccggacatggtgagggggtgcagaaccgttttgattccaaaatcatcaaagccggatcgtttgaaagacattaataactggagacctatcacgatcggttccatcttgctgagactgttctccaggattgtaacagctaggctgagcaaagcgtgccccctgaacccaaggcaaagaggctttatcagagcggcgggatgctctgaaaacttaaaactcctgcaaactataatttggtcggccaaaagagaacacagaccactgggtgttgtattcgtggacatcgccaaggcttttgacaccgtaagccaccagcacatcattcatgctttgcagcaaagagaggtggatccccacatcgtcggtctggtgagcaatatgtacgagaacatcagtacgtatatcaccacaaagaggaacacacacacagacaaaatccagatccgggttggagtaaagcagggtgacccgatgtcgccccttttatttaacctggcaatggaccctctattatgcaagctggaagagagtggcaaaggataccaccgaggacagagcagcatcacagcgatggcatttgcagacgatctggttttgctgagcgactcctgggaaaatatgaatacaaatattagcatactggagaccttctgcaatctgaccggactcaaaacacaggggcaaaagtgccacggcttttacatcaagccgacaaagaagtcttacaccatcaatgactgcgctgcctggactatcaacggcacacccctgaacatgatcgaccccggcgaatctgagaaatacctcggcctgcagtttgacccgtggattggaatagcaaggtccggtctctccacaaaactagatttttggcttcagcggatcgatcaagcaccacttaaacctctgcagaaaactgatattctcaaaacatacaccatccctcggctgatctacatagctgaccactcagaagtgaaaagcgcactactcgaaacccttgaccagaagatccggacagcggtcaaggaatggcttcacctacctccgtgcacctgcgatgccatcctgtactcgagcacgagagacggcggtttgggcatcaccaaattggcaggactgatccccagcgtgcaggcccgtagactgcatcggatcgcacagtcatctgacgatacgatgaaatgcttcatggaaaaagagaaaatggaacagctgcataagaaattgtggattcaagctggaggggacagagagaacataccctcgatttgggaagcaccaccgtcgagtgaaccaccaaacaacgtgagcacaaattcggaatgggaagcaccgacccagaaagataaatttccaaagccttgcaattggaggaaaaacgaattcaaaaaatggaccaaattggcatcccaaggccgcggaattgtaaattttgaaagagacaaaattagtaaccattggatccaatactacagacgcatacctcacaggaaactcctcactgcactacaactcagggccaacgtttaccccacgagagaatttctagccaggggtagacaagaccaatacatcaaggcgtgtaggcactgcgatgcggacaacgaatcctgcgcccacatcatcggcaactgcccagtgacacaggacgcccgaatcaagaggcacaattacatctgcgaactgcttctcgaggaggcgaagaagaaggactgggtagtgttcaaggaaccgcacataagggattccaacaaggaactgtacaaacctgacctgatatttgtgaaggatgggcgtgcacttgtcgtggatgtgacagtacggtatgaagcagccaaatcatcgctggaggaagccgctgcagagaaagtgagaaagtacaaacacctggaaacggaagtaagacatctcacgaatgcaaaggacgttacttttgtgggctttcccctaggagcgcgggggaaatggcaccaagataactttaaacttttgactgagcttggcctctccaaatcgaggcaagtgaaaatggcagagactttttccacagtagcgctcttttcatctgtggacattgtacatatgtttgccagtagggccagaaaatctatggttatgtgataataggctgccttctgcggggcttgccttctggccatgcccttcttctctcccttgcacctgtacctcttggtctttgaataaagcctgagtaggaaggaccggtaaaaaaaaaaaaaaaaaaaaaaaaaaaaaaacgttgactaaaaaaaaaaaaaaaaaaaaaaaaaaaaaaaaaaaaaaaaaaaaaaaaaaaaaaaaaaaaaaaaaaaaaa

SEQ ID NO: 10680 - DNA, 5432 bp, synthetic construct
  source 1..5432: mol_type = other DNA
gaaataagagagaaaagaagagtaagaagaaatataagagaattcgccaccatggccaactacaacaaccagagcagcaacttcggccccatgaagggcggcaacttcggcggcaggagcagcggcccctacggcggcggcggccagtacttcgccaagcccaggaaccagggcggctacggcggcagcagcagcagcagcagctacggcagcggcaggaggttccctaagaaaaagcggaaggtgaatatcagcggctctagctgcggcagccccaacagcgccgacaccagcagcgacttcaaggacctgtggaccaagctgaaggaatgccacgaccgggaagtgcagggactccaggtgaaggtcaccaaactcaagcaagaaagaatcctggacgcccagagactggaagaattcttcaccaagaaccagcagctgagagagcagcagaaagtgctgcacgagacaatcaaggttctggaagatagactgcgggccggcctgtgcgacagatgcgccgtgaccgaggaacacatgcgcaaaaagcagcaggagttcgagaacattagacagcaaaatctgaaattgatcacagagctgatgaacgagagaaacacactgcaggaggagaacaagaagctgagcgagcagctgcaacagaagatcgagaatgatcagcaacaccaggccgctgagctggaatgtgaagaggacgtgatccccgacagcccaatcacagctttcagcttttctggcgtgaacagactgaggcggaaggaaaacccccacgtgcggtacatcgagcagacccataccaagctggaacacagcgtgtgtgccaacgagatgagaaaggtgtccaagtcctccacccatccccagcacaaccctaacgaaaatgagatcctggtggctgatacctacgaccagtctcagagccctatggccaaggcccacggcaccagctcttatacccctgataagagctccttcaacctggccaccgtggtggccgagacactgggcctgggcgtgcaggaggaaagcgagacacagggcccaatgagccctctgggagatgagctgtaccactgcctggaaggcaaccacaagaaacagccttttgagtccggctccgagactcctggaacaagcgagagcgctacacctgagggcagccctaagagaaaggtgtccagcgccgagggcgctgccaaggaagagcctaaacggagaagcgccagactgagcgccaagccccccgccaaggtggaagccaagcctaagaaggccgccgctaaggacaagagcagcgataagaaagtccagaccaagggcaagcggggcgccaaaggcaaacaggccgaggtggccaaccaggagacaaaggaagatctgcctgctgagaacggcgaaaccaagaccgaggaatctccagcttctgacgaggccggagagaaggaggccaaaagcgacagcggctctgagacacctggaacaagcgagagcgccaccccggaatcctatgaacaacttgcaccacaaccgtgtgtgggagaaactttacattctagcctcccacgagacagtgaactgtttgtgcctgaagaggggagcagcgagaaggagagcgaggacgcgccaaaaacatctcctccgacgcctgggaaacatggtttggaacagactggggaggaaaaagtgatggtgactgttcctgacaaaaatccaccttgtccttgctgtggtacccgggtaaactctgtgttgaatctgattgaacatctgaaagtgtcacacgggaaaaggggggtttgttttcggtgtgcaaaatgtggaaaggaaaatagtaactatcacagtgttgtttgtcattttaagaaatgcaggggtccagagacggagaaagccccagctggggagtggatttgtgaggtatgcaacagagattttacaaccaaaattggcctgggacaacacaagagattggcacacccagcagtgagaaatcaggaaaggatcgttgcttcccaaccgaaagaaacatcaaatagaggtgctcacaaaaggtgctggacaaaggaggaggaagaattactaataagactggaggctcagttcgagggaaacaaaaatattaataagcttattgcagaacacataaccaccaaaacagctaagcagatcagtgacaaaaggcgattgctgtccagaaagccagcagaggagccacgtgaggagcctggaacgtgtcatcacaccaggagagcagctgcgagcctgagaacggagcctgagatgagtcatcacgcccaggcagaggacagagataatggacctgggagacgccctctgccaggcagggcagctgccggagggagaacaatggacgagataagacgccaccctgataagggcaacggacagcagagacccaccaagcaaaaatcagaagaacagctgcaggcttactataaaaagacactagaggaacgactttcagctggggcacttaacaccttcccccgagcattcaagcaggtaatggaaggccgggatataaagctagtaatcaatcagacagcgcaggactgcttcggatgcctggaatccataagccaaataagaacggcaacccgagataaaaaggacacggtgacccgggagaaacacccaaagaaaccttttcagaagtggatgaagaagagagcaatcaaaaaaggtaattatcttcggttccagcgtttattttatcttgatagagggaaactggctaaaatcattttagatgatattgaatgcttgtcttgtgacataccactcagtgaaatttattcggtttttaaaacaagatgggaaacaactggtagctttaaaagccttggggactttaaaacttacgggaaggctgacaacactgccttcagagaattaattacggctaaagaaattgagaaaaatgtgcaggaaatgagcaaaggctcggctcccggtccagacgggattactcttggggacgtcgtaaagatggatcccgagttttcccggaccatggagattttcaatttatggttaacaactggtaaaatcccggacatggtgagggggtgcagaaccgttttgattccaaaatcatcaaagccggatcgtttgaaagacattaataactggagacctatcacgatcggttccatcttgctgagactgttctccaggattgtaacagctaggctgagcaaagcgtgccccctgaacccaaggcaaagaggctttatcagagcggcgggatgctctgaaaacttaaaactcctgcaaactataatttggtcggccaaaagagaacacagaccactgggtgttgtattcgtggacatcgccaaggcttttgacaccgtaagccaccagcacatcattcatgctttgcagcaaagagaggtggatccccacatcgtcggtctggtgagcaatatgtacgagaacatcagtacgtatatcaccacaaagaggaacacacacacagacaaaatccagatccgggttggagtaaagcagggtgacccgatgtcgccccttttatttaacctggcaatggaccctctattatgcaagctggaagagagtggcaaaggataccaccgaggacagagcagcatcacagcgatggcatttgcagacgatctggttttgctgagcgactcctgggaaaatatgaatacaaatattagcatactggagaccttctgcaatctgaccggactcaaaacacaggggcaaaagtgccacggcttttacatcaagccgacaaagaagtcttacaccatcaatgactgcgctgcctggactatcaacggcacacccctgaacatgatcgaccccggcgaatctgagaaatacctcggcctgcagtttgacccgtggattggaatagcaaggtccggtctctccacaaaactagatttttggcttcagcggatcgatcaagcaccacttaaacctctgcagaaaactgatattctcaaaacatacaccatccctcggctgatctacatagctgaccactcagaagtgaaaagcgcactactcgaaacccttgaccagaagatccggacagcggtcaaggaatggcttcacctacctccgtgcacctgcgatgccatcctgtactcgagcacgagagacggcggtttgggcatcaccaaattggcaggactgatccccagcgtgcaggcccgtagactgcatcggatcgcacagtcatctgacgatacgatgaaatgcttcatggaaaaagagaaaatggaacagctgcataagaaattgtggattcaagctggaggggacagagagaacataccctcgatttgggaagcaccaccgtcgagtgaaccaccaaacaacgtgagcacaaattcggaatgggaagcaccgacccagaaagataaatttccaaagccttgcaattggaggaaaaacgaattcaaaaaatggaccaaattggcatcccaaggccgcggaattgtaaattttgaaagagacaaaattagtaaccattggatccaatactacagacgcatacctcacaggaaactcctcactgcactacaactcagggccaacgtttaccccacgagagaatttctagccaggggtagacaagaccaatacatcaaggcgtgtaggcactgcgatgcggacaacgaatcctgcgcccacatcatcggcaactgcccagtgacacaggacgcccgaatcaagaggcacaattacatctgcgaactgcttctcgaggaggcgaagaagaaggactgggtagtgttcaaggaaccgcacataagggattccaacaaggaactgtacaaacctgacctgatatttgtgaaggatgggcgtgcacttgtcgtggatgtgacagtacggtatgaagcagccaaatcatcgctggaggaagccgctgcagagaaagtgagaaagtacaaacacctggaaacggaagtaagacatctcacgaatgcaaaggacgttacttttgtgggctttcccctaggagcgcgggggaaatggcaccaagataactttaaacttttgactgagcttggcctctccaaatcgaggcaagtgaaaatggcagagactttttccacagtagcgctcttttcatctgtggacattgtacatatgtttgccagtagggccagaaaatctatggttatgtgataataggctgccttctgcggggcttgccttctggccatgcccttcttctctcccttgcacctgtacctcttggtctttgaataaagcctgagtaggaaggaccggtaaaaaaaaaaaaaaaaaaaaaaaaaaaaaaacgttgactaaaaaaaaaaaaaaaaaaaaaaaaaaaaaaaaaaaaaaaaaaaaaaaaaaaaaaaaaaaaaaaaaaaaaa

SEQ ID NO: 10681 - DNA, 5996 bp, synthetic construct
  source 1..5996: mol_type = other DNA
gaaataagagagaaaagaagagtaagaagaaatataagagaattcgccaccatgggcgacgaggactgggaggccgagatcaacccccacatgagcagctacgtgcccatcttcgagaaggacaggtacagcggcgagaacggcgacaacttcaacaggacccccgccagcagcagcgagatggacgacggccccagcaggagggaccacttcatgaagagcggcttcgccagcggcaggaacttcggcaacagggacgccggcgagtgcaacaagagggacaacaccagcaccatgggcggcttcggcgtgggcaagagcttcggcaacaggggcttcagcaacagcaggttcgaggacggcgacagcagcggcttctggagggagagcagcaacgactgcgaggacaaccccaccaggaacaggggcttcagcaagaggggcggctacagggacggcaacaacagcgaggccagcggcccctacaggaggggcggcaggggcagcttcaggggctgcaggggcggcttcggcctgggcagccccaacaacgacctggaccccgacgagtgcatgcagaggaccggcggcctgttcggcagcaggaggcccgtgctgagcggcaccggcaacggcgacaccagccagagcaggagcggcagcggcagcgagaggggcggctacaagggcctgaacgaggaggtgatcaccggcagcggcaagaacagctggaagagcgaggccgagggcggcgagagcagcgacacccagggccccaaggtgacctaccctaagaaaaagcggaaggtgaatatcagcggctctagctgcggcagccccaacagcgccgacaccagcagcgacttcaaggacctgtggaccaagctgaaggaatgccacgaccgggaagtgcagggactccaggtgaaggtcaccaaactcaagcaagaaagaatcctggacgcccagagactggaagaattcttcaccaagaaccagcagctgagagagcagcagaaagtgctgcacgagacaatcaaggttctggaagatagactgcgggccggcctgtgcgacagatgcgccgtgaccgaggaacacatgcgcaaaaagcagcaggagttcgagaacattagacagcaaaatctgaaattgatcacagagctgatgaacgagagaaacacactgcaggaggagaacaagaagctgagcgagcagctgcaacagaagatcgagaatgatcagcaacaccaggccgctgagctggaatgtgaagaggacgtgatccccgacagcccaatcacagctttcagcttttctggcgtgaacagactgaggcggaaggaaaacccccacgtgcggtacatcgagcagacccataccaagctggaacacagcgtgtgtgccaacgagatgagaaaggtgtccaagtcctccacccatccccagcacaaccctaacgaaaatgagatcctggtggctgatacctacgaccagtctcagagccctatggccaaggcccacggcaccagctcttatacccctgataagagctccttcaacctggccaccgtggtggccgagacactgggcctgggcgtgcaggaggaaagcgagacacagggcccaatgagccctctgggagatgagctgtaccactgcctggaaggcaaccacaagaaacagccttttgagtccggctccgagactcctggaacaagcgagagcgctacacctgagggcagccctaagagaaaggtgtccagcgccgagggcgctgccaaggaagagcctaaacggagaagcgccagactgagcgccaagccccccgccaaggtggaagccaagcctaagaaggccgccgctaaggacaagagcagcgataagaaagtccagaccaagggcaagcggggcgccaaaggcaaacaggccgaggtggccaaccaggagacaaaggaagatctgcctgctgagaacggcgaaaccaagaccgaggaatctccagcttctgacgaggccggagagaaggaggccaaaagcgacagcggctctgagacacctggaacaagcgagagcgccaccccggaatcctatgaacaacttgcaccacaaccgtgtgtgggagaaactttacattctagcctcccacgagacagtgaactgtttgtgcctgaagaggggagcagcgagaaggagagcgaggacgcgccaaaaacatctcctccgacgcctgggaaacatggtttggaacagactggggaggaaaaagtgatggtgactgttcctgacaaaaatccaccttgtccttgctgtggtacccgggtaaactctgtgttgaatctgattgaacatctgaaagtgtcacacgggaaaaggggggtttgttttcggtgtgcaaaatgtggaaaggaaaatagtaactatcacagtgttgtttgtcattttaagaaatgcaggggtccagagacggagaaagccccagctggggagtggatttgtgaggtatgcaacagagattttacaaccaaaattggcctgggacaacacaagagattggcacacccagcagtgagaaatcaggaaaggatcgttgcttcccaaccgaaagaaacatcaaatagaggtgctcacaaaaggtgctggacaaaggaggaggaagaattactaataagactggaggctcagttcgagggaaacaaaaatattaataagcttattgcagaacacataaccaccaaaacagctaagcagatcagtgacaaaaggcgattgctgtccagaaagccagcagaggagccacgtgaggagcctggaacgtgtcatcacaccaggagagcagctgcgagcctgagaacggagcctgagatgagtcatcacgcccaggcagaggacagagataatggacctgggagacgccctctgccaggcagggcagctgccggagggagaacaatggacgagataagacgccaccctgataagggcaacggacagcagagacccaccaagcaaaaatcagaagaacagctgcaggcttactataaaaagacactagaggaacgactttcagctggggcacttaacaccttcccccgagcattcaagcaggtaatggaaggccgggatataaagctagtaatcaatcagacagcgcaggactgcttcggatgcctggaatccataagccaaataagaacggcaacccgagataaaaaggacacggtgacccgggagaaacacccaaagaaaccttttcagaagtggatgaagaagagagcaatcaaaaaaggtaattatcttcggttccagcgtttattttatcttgatagagggaaactggctaaaatcattttagatgatattgaatgcttgtcttgtgacataccactcagtgaaatttattcggtttttaaaacaagatgggaaacaactggtagctttaaaagccttggggactttaaaacttacgggaaggctgacaacactgccttcagagaattaattacggctaaagaaattgagaaaaatgtgcaggaaatgagcaaaggctcggctcccggtccagacgggattactcttggggacgtcgtaaagatggatcccgagttttcccggaccatggagattttcaatttatggttaacaactggtaaaatcccggacatggtgagggggtgcagaaccgttttgattccaaaatcatcaaagccggatcgtttgaaagacattaataactggagacctatcacgatcggttccatcttgctgagactgttctccaggattgtaacagctaggctgagcaaagcgtgccccctgaacccaaggcaaagaggctttatcagagcggcgggatgctctgaaaacttaaaactcctgcaaactataatttggtcggccaaaagagaacacagaccactgggtgttgtattcgtggacatcgccaaggcttttgacaccgtaagccaccagcacatcattcatgctttgcagcaaagagaggtggatccccacatcgtcggtctggtgagcaatatgtacgagaacatcagtacgtatatcaccacaaagaggaacacacacacagacaaaatccagatccgggttggagtaaagcagggtgacccgatgtcgccccttttatttaacctggcaatggaccctctattatgcaagctggaagagagtggcaaaggataccaccgaggacagagcagcatcacagcgatggcatttgcagacgatctggttttgctgagcgactcctgggaaaatatgaatacaaatattagcatactggagaccttctgcaatctgaccggactcaaaacacaggggcaaaagtgccacggcttttacatcaagccgacaaagaagtcttacaccatcaatgactgcgctgcctggactatcaacggcacacccctgaacatgatcgaccccggcgaatctgagaaatacctcggcctgcagtttgacccgtggattggaatagcaaggtccggtctctccacaaaactagatttttggcttcagcggatcgatcaagcaccacttaaacctctgcagaaaactgatattctcaaaacatacaccatccctcggctgatctacatagctgaccactcagaagtgaaaagcgcactactcgaaacccttgaccagaagatccggacagcggtcaaggaatggcttcacctacctccgtgcacctgcgatgccatcctgtactcgagcacgagagacggcggtttgggcatcaccaaattggcaggactgatccccagcgtgcaggcccgtagactgcatcggatcgcacagtcatctgacgatacgatgaaatgcttcatggaaaaagagaaaatggaacagctgcataagaaattgtggattcaagctggaggggacagagagaacataccctcgatttgggaagcaccaccgtcgagtgaaccaccaaacaacgtgagcacaaattcggaatgggaagcaccgacccagaaagataaatttccaaagccttgcaattggaggaaaaacgaattcaaaaaatggaccaaattggcatcccaaggccgcggaattgtaaattttgaaagagacaaaattagtaaccattggatccaatactacagacgcatacctcacaggaaactcctcactgcactacaactcagggccaacgtttaccccacgagagaatttctagccaggggtagacaagaccaatacatcaaggcgtgtaggcactgcgatgcggacaacgaatcctgcgcccacatcatcggcaactgcccagtgacacaggacgcccgaatcaagaggcacaattacatctgcgaactgcttctcgaggaggcgaagaagaaggactgggtagtgttcaaggaaccgcacataagggattccaacaaggaactgtacaaacctgacctgatatttgtgaaggatgggcgtgcacttgtcgtggatgtgacagtacggtatgaagcagccaaatcatcgctggaggaagccgctgcagagaaagtgagaaagtacaaacacctggaaacggaagtaagacatctcacgaatgcaaaggacgttacttttgtgggctttcccctaggagcgcgggggaaatggcaccaagataactttaaacttttgactgagcttggcctctccaaatcgaggcaagtgaaaatggcagagactttttccacagtagcgctcttttcatctgtggacattgtacatatgtttgccagtagggccagaaaatctatggttatgtgataataggctgccttctgcggggcttgccttctggccatgcccttcttctctcccttgcacctgtacctcttggtctttgaataaagcctgagtaggaaggaccggtaaaaaaaaaaaaaaaaaaaaaaaaaaaaaaacgttgactaaaaaaaaaaaaaaaaaaaaaaaaaaaaaaaaaaaaaaaaaaaaaaaaaaaaaaaaaaaaaaaaaaaaaa

SEQ ID NO: 10682 - DNA, 5489 bp, synthetic construct
  source 1..5489: mol_type = other DNA
gaaataagagagaaaagaagagtaagaagaaatataagagaattcgccaccatggcccaggccatcgccgagacccccgagaacgacatccccgagaccgaggtggaggacgacgagggctggatgagccacgtgctgcagttcgaggacaagagcaggaaggtgaaggacgccagcatgcaggacagcgacaccttcgagatctacgaccccaggaaccccgtgaacaagaggaggagggaggagagcaagaagctgatgagggagaagaaggagaggaggcctaagaaaaagcggaaggtgaatatcagcggctctagctgcggcagccccaacagcgccgacaccagcagcgacttcaaggacctgtggaccaagctgaaggaatgccacgaccgggaagtgcagggactccaggtgaaggtcaccaaactcaagcaagaaagaatcctggacgcccagagactggaagaattcttcaccaagaaccagcagctgagagagcagcagaaagtgctgcacgagacaatcaaggttctggaagatagactgcgggccggcctgtgcgacagatgcgccgtgaccgaggaacacatgcgcaaaaagcagcaggagttcgagaacattagacagcaaaatctgaaattgatcacagagctgatgaacgagagaaacacactgcaggaggagaacaagaagctgagcgagcagctgcaacagaagatcgagaatgatcagcaacaccaggccgctgagctggaatgtgaagaggacgtgatccccgacagcccaatcacagctttcagcttttctggcgtgaacagactgaggcggaaggaaaacccccacgtgcggtacatcgagcagacccataccaagctggaacacagcgtgtgtgccaacgagatgagaaaggtgtccaagtcctccacccatccccagcacaaccctaacgaaaatgagatcctggtggctgatacctacgaccagtctcagagccctatggccaaggcccacggcaccagctcttatacccctgataagagctccttcaacctggccaccgtggtggccgagacactgggcctgggcgtgcaggaggaaagcgagacacagggcccaatgagccctctgggagatgagctgtaccactgcctggaaggcaaccacaagaaacagccttttgagtccggctccgagactcctggaacaagcgagagcgctacacctgagggcagccctaagagaaaggtgtccagcgccgagggcgctgccaaggaagagcctaaacggagaagcgccagactgagcgccaagccccccgccaaggtggaagccaagcctaagaaggccgccgctaaggacaagagcagcgataagaaagtccagaccaagggcaagcggggcgccaaaggcaaacaggccgaggtggccaaccaggagacaaaggaagatctgcctgctgagaacggcgaaaccaagaccgaggaatctccagcttctgacgaggccggagagaaggaggccaaaagcgacagcggctctgagacacctggaacaagcgagagcgccaccccggaatcctatgaacaacttgcaccacaaccgtgtgtgggagaaactttacattctagcctcccacgagacagtgaactgtttgtgcctgaagaggggagcagcgagaaggagagcgaggacgcgccaaaaacatctcctccgacgcctgggaaacatggtttggaacagactggggaggaaaaagtgatggtgactgttcctgacaaaaatccaccttgtccttgctgtggtacccgggtaaactctgtgttgaatctgattgaacatctgaaagtgtcacacgggaaaaggggggtttgttttcggtgtgcaaaatgtggaaaggaaaatagtaactatcacagtgttgtttgtcattttaagaaatgcaggggtccagagacggagaaagccccagctggggagtggatttgtgaggtatgcaacagagattttacaaccaaaattggcctgggacaacacaagagattggcacacccagcagtgagaaatcaggaaaggatcgttgcttcccaaccgaaagaaacatcaaatagaggtgctcacaaaaggtgctggacaaaggaggaggaagaattactaataagactggaggctcagttcgagggaaacaaaaatattaataagcttattgcagaacacataaccaccaaaacagctaagcagatcagtgacaaaaggcgattgctgtccagaaagccagcagaggagccacgtgaggagcctggaacgtgtcatcacaccaggagagcagctgcgagcctgagaacggagcctgagatgagtcatcacgcccaggcagaggacagagataatggacctgggagacgccctctgccaggcagggcagctgccggagggagaacaatggacgagataagacgccaccctgataagggcaacggacagcagagacccaccaagcaaaaatcagaagaacagctgcaggcttactataaaaagacactagaggaacgactttcagctggggcacttaacaccttcccccgagcattcaagcaggtaatggaaggccgggatataaagctagtaatcaatcagacagcgcaggactgcttcggatgcctggaatccataagccaaataagaacggcaacccgagataaaaaggacacggtgacccgggagaaacacccaaagaaaccttttcagaagtggatgaagaagagagcaatcaaaaaaggtaattatcttcggttccagcgtttattttatcttgatagagggaaactggctaaaatcattttagatgatattgaatgcttgtcttgtgacataccactcagtgaaatttattcggtttttaaaacaagatgggaaacaactggtagctttaaaagccttggggactttaaaacttacgggaaggctgacaacactgccttcagagaattaattacggctaaagaaattgagaaaaatgtgcaggaaatgagcaaaggctcggctcccggtccagacgggattactcttggggacgtcgtaaagatggatcccgagttttcccggaccatggagattttcaatttatggttaacaactggtaaaatcccggacatggtgagggggtgcagaaccgttttgattccaaaatcatcaaagccggatcgtttgaaagacattaataactggagacctatcacgatcggttccatcttgctgagactgttctccaggattgtaacagctaggctgagcaaagcgtgccccctgaacccaaggcaaagaggctttatcagagcggcgggatgctctgaaaacttaaaactcctgcaaactataatttggtcggccaaaagagaacacagaccactgggtgttgtattcgtggacatcgccaaggcttttgacaccgtaagccaccagcacatcattcatgctttgcagcaaagagaggtggatccccacatcgtcggtctggtgagcaatatgtacgagaacatcagtacgtatatcaccacaaagaggaacacacacacagacaaaatccagatccgggttggagtaaagcagggtgacccgatgtcgccccttttatttaacctggcaatggaccctctattatgcaagctggaagagagtggcaaaggataccaccgaggacagagcagcatcacagcgatggcatttgcagacgatctggttttgctgagcgactcctgggaaaatatgaatacaaatattagcatactggagaccttctgcaatctgaccggactcaaaacacaggggcaaaagtgccacggcttttacatcaagccgacaaagaagtcttacaccatcaatgactgcgctgcctggactatcaacggcacacccctgaacatgatcgaccccggcgaatctgagaaatacctcggcctgcagtttgacccgtggattggaatagcaaggtccggtctctccacaaaactagatttttggcttcagcggatcgatcaagcaccacttaaacctctgcagaaaactgatattctcaaaacatacaccatccctcggctgatctacatagctgaccactcagaagtgaaaagcgcactactcgaaacccttgaccagaagatccggacagcggtcaaggaatggcttcacctacctccgtgcacctgcgatgccatcctgtactcgagcacgagagacggcggtttgggcatcaccaaattggcaggactgatccccagcgtgcaggcccgtagactgcatcggatcgcacagtcatctgacgatacgatgaaatgcttcatggaaaaagagaaaatggaacagctgcataagaaattgtggattcaagctggaggggacagagagaacataccctcgatttgggaagcaccaccgtcgagtgaaccaccaaacaacgtgagcacaaattcggaatgggaagcaccgacccagaaagataaatttccaaagccttgcaattggaggaaaaacgaattcaaaaaatggaccaaattggcatcccaaggccgcggaattgtaaattttgaaagagacaaaattagtaaccattggatccaatactacagacgcatacctcacaggaaactcctcactgcactacaactcagggccaacgtttaccccacgagagaatttctagccaggggtagacaagaccaatacatcaaggcgtgtaggcactgcgatgcggacaacgaatcctgcgcccacatcatcggcaactgcccagtgacacaggacgcccgaatcaagaggcacaattacatctgcgaactgcttctcgaggaggcgaagaagaaggactgggtagtgttcaaggaaccgcacataagggattccaacaaggaactgtacaaacctgacctgatatttgtgaaggatgggcgtgcacttgtcgtggatgtgacagtacggtatgaagcagccaaatcatcgctggaggaagccgctgcagagaaagtgagaaagtacaaacacctggaaacggaagtaagacatctcacgaatgcaaaggacgttacttttgtgggctttcccctaggagcgcgggggaaatggcaccaagataactttaaacttttgactgagcttggcctctccaaatcgaggcaagtgaaaatggcagagactttttccacagtagcgctcttttcatctgtggacattgtacatatgtttgccagtagggccagaaaatctatggttatgtgataataggctgccttctgcggggcttgccttctggccatgcccttcttctctcccttgcacctgtacctcttggtctttgaataaagcctgagtaggaaggaccggtaaaaaaaaaaaaaaaaaaaaaaaaaaaaaaacgttgactaaaaaaaaaaaaaaaaaaaaaaaaaaaaaaaaaaaaaaaaaaaaaaaaaaaaaaaaaaaaaaaaaaaaaa

SEQ ID NO: 10683 - DNA, 5396 bp, synthetic construct
  source 1..5396: mol_type = other DNA
gaaataagagagaaaagaagagtaagaagaaatataagagaattcgccaccatggccgacctgctgggcagcatcctgagcagcatggagaagccccccagcctgggcgaccaggagaccaggaggaaggccagggagcaggccgccaggctgaagaagctgcaggagcaggagaagcagcagaaggtgcctaagaaaaagcggaaggtgaatatcagcggctctagctgcggcagccccaacagcgccgacaccagcagcgacttcaaggacctgtggaccaagctgaaggaatgccacgaccgggaagtgcagggactccaggtgaaggtcaccaaactcaagcaagaaagaatcctggacgcccagagactggaagaattcttcaccaagaaccagcagctgagagagcagcagaaagtgctgcacgagacaatcaaggttctggaagatagactgcgggccggcctgtgcgacagatgcgccgtgaccgaggaacacatgcgcaaaaagcagcaggagttcgagaacattagacagcaaaatctgaaattgatcacagagctgatgaacgagagaaacacactgcaggaggagaacaagaagctgagcgagcagctgcaacagaagatcgagaatgatcagcaacaccaggccgctgagctggaatgtgaagaggacgtgatccccgacagcccaatcacagctttcagcttttctggcgtgaacagactgaggcggaaggaaaacccccacgtgcggtacatcgagcagacccataccaagctggaacacagcgtgtgtgccaacgagatgagaaaggtgtccaagtcctccacccatccccagcacaaccctaacgaaaatgagatcctggtggctgatacctacgaccagtctcagagccctatggccaaggcccacggcaccagctcttatacccctgataagagctccttcaacctggccaccgtggtggccgagacactgggcctgggcgtgcaggaggaaagcgagacacagggcccaatgagccctctgggagatgagctgtaccactgcctggaaggcaaccacaagaaacagccttttgagtccggctccgagactcctggaacaagcgagagcgctacacctgagggcagccctaagagaaaggtgtccagcgccgagggcgctgccaaggaagagcctaaacggagaagcgccagactgagcgccaagccccccgccaaggtggaagccaagcctaagaaggccgccgctaaggacaagagcagcgataagaaagtccagaccaagggcaagcggggcgccaaaggcaaacaggccgaggtggccaaccaggagacaaaggaagatctgcctgctgagaacggcgaaaccaagaccgaggaatctccagcttctgacgaggccggagagaaggaggccaaaagcgacagcggctctgagacacctggaacaagcgagagcgccaccccggaatcctatgaacaacttgcaccacaaccgtgtgtgggagaaactttacattctagcctcccacgagacagtgaactgtttgtgcctgaagaggggagcagcgagaaggagagcgaggacgcgccaaaaacatctcctccgacgcctgggaaacatggtttggaacagactggggaggaaaaagtgatggtgactgttcctgacaaaaatccaccttgtccttgctgtggtacccgggtaaactctgtgttgaatctgattgaacatctgaaagtgtcacacgggaaaaggggggtttgttttcggtgtgcaaaatgtggaaaggaaaatagtaactatcacagtgttgtttgtcattttaagaaatgcaggggtccagagacggagaaagccccagctggggagtggatttgtgaggtatgcaacagagattttacaaccaaaattggcctgggacaacacaagagattggcacacccagcagtgagaaatcaggaaaggatcgttgcttcccaaccgaaagaaacatcaaatagaggtgctcacaaaaggtgctggacaaaggaggaggaagaattactaataagactggaggctcagttcgagggaaacaaaaatattaataagcttattgcagaacacataaccaccaaaacagctaagcagatcagtgacaaaaggcgattgctgtccagaaagccagcagaggagccacgtgaggagcctggaacgtgtcatcacaccaggagagcagctgcgagcctgagaacggagcctgagatgagtcatcacgcccaggcagaggacagagataatggacctgggagacgccctctgccaggcagggcagctgccggagggagaacaatggacgagataagacgccaccctgataagggcaacggacagcagagacccaccaagcaaaaatcagaagaacagctgcaggcttactataaaaagacactagaggaacgactttcagctggggcacttaacaccttcccccgagcattcaagcaggtaatggaaggccgggatataaagctagtaatcaatcagacagcgcaggactgcttcggatgcctggaatccataagccaaataagaacggcaacccgagataaaaaggacacggtgacccgggagaaacacccaaagaaaccttttcagaagtggatgaagaagagagcaatcaaaaaaggtaattatcttcggttccagcgtttattttatcttgatagagggaaactggctaaaatcattttagatgatattgaatgcttgtcttgtgacataccactcagtgaaatttattcggtttttaaaacaagatgggaaacaactggtagctttaaaagccttggggactttaaaacttacgggaaggctgacaacactgccttcagagaattaattacggctaaagaaattgagaaaaatgtgcaggaaatgagcaaaggctcggctcccggtccagacgggattactcttggggacgtcgtaaagatggatcccgagttttcccggaccatggagattttcaatttatggttaacaactggtaaaatcccggacatggtgagggggtgcagaaccgttttgattccaaaatcatcaaagccggatcgtttgaaagacattaataactggagacctatcacgatcggttccatcttgctgagactgttctccaggattgtaacagctaggctgagcaaagcgtgccccctgaacccaaggcaaagaggctttatcagagcggcgggatgctctgaaaacttaaaactcctgcaaactataatttggtcggccaaaagagaacacagaccactgggtgttgtattcgtggacatcgccaaggcttttgacaccgtaagccaccagcacatcattcatgctttgcagcaaagagaggtggatccccacatcgtcggtctggtgagcaatatgtacgagaacatcagtacgtatatcaccacaaagaggaacacacacacagacaaaatccagatccgggttggagtaaagcagggtgacccgatgtcgccccttttatttaacctggcaatggaccctctattatgcaagctggaagagagtggcaaaggataccaccgaggacagagcagcatcacagcgatggcatttgcagacgatctggttttgctgagcgactcctgggaaaatatgaatacaaatattagcatactggagaccttctgcaatctgaccggactcaaaacacaggggcaaaagtgccacggcttttacatcaagccgacaaagaagtcttacaccatcaatgactgcgctgcctggactatcaacggcacacccctgaacatgatcgaccccggcgaatctgagaaatacctcggcctgcagtttgacccgtggattggaatagcaaggtccggtctctccacaaaactagatttttggcttcagcggatcgatcaagcaccacttaaacctctgcagaaaactgatattctcaaaacatacaccatccctcggctgatctacatagctgaccactcagaagtgaaaagcgcactactcgaaacccttgaccagaagatccggacagcggtcaaggaatggcttcacctacctccgtgcacctgcgatgccatcctgtactcgagcacgagagacggcggtttgggcatcaccaaattggcaggactgatccccagcgtgcaggcccgtagactgcatcggatcgcacagtcatctgacgatacgatgaaatgcttcatggaaaaagagaaaatggaacagctgcataagaaattgtggattcaagctggaggggacagagagaacataccctcgatttgggaagcaccaccgtcgagtgaaccaccaaacaacgtgagcacaaattcggaatgggaagcaccgacccagaaagataaatttccaaagccttgcaattggaggaaaaacgaattcaaaaaatggaccaaattggcatcccaaggccgcggaattgtaaattttgaaagagacaaaattagtaaccattggatccaatactacagacgcatacctcacaggaaactcctcactgcactacaactcagggccaacgtttaccccacgagagaatttctagccaggggtagacaagaccaatacatcaaggcgtgtaggcactgcgatgcggacaacgaatcctgcgcccacatcatcggcaactgcccagtgacacaggacgcccgaatcaagaggcacaattacatctgcgaactgcttctcgaggaggcgaagaagaaggactgggtagtgttcaaggaaccgcacataagggattccaacaaggaactgtacaaacctgacctgatatttgtgaaggatgggcgtgcacttgtcgtggatgtgacagtacggtatgaagcagccaaatcatcgctggaggaagccgctgcagagaaagtgagaaagtacaaacacctggaaacggaagtaagacatctcacgaatgcaaaggacgttacttttgtgggctttcccctaggagcgcgggggaaatggcaccaagataactttaaacttttgactgagcttggcctctccaaatcgaggcaagtgaaaatggcagagactttttccacagtagcgctcttttcatctgtggacattgtacatatgtttgccagtagggccagaaaatctatggttatgtgataataggctgccttctgcggggcttgccttctggccatgcccttcttctctcccttgcacctgtacctcttggtctttgaataaagcctgagtaggaaggaccggtaaaaaaaaaaaaaaaaaaaaaaaaaaaaaaacgttgactaaaaaaaaaaaaaaaaaaaaaaaaaaaaaaaaaaaaaaaaaaaaaaaaaaaaaaaaaaaaaaaaaaaaaa

SEQ ID NO: 10684 - DNA, 6053 bp, synthetic construct
  source 1..6053: mol_type = other DNA
gaaataagagagaaaagaagagtaagaagaaatataagagaattcgccaccatggccatggccaggggccccaagaagcacctgaagagggtggccgcccccaagcactggatgctggacaagctgaccggcgtgttcgcccccaggcccagcaccggcccccacaagctgagggagtgcctgcccctgatcgtgttcctgaggaacaggctgaagtacgccctgaccggcgacgaggtgaagaagatctgcatgcagcacttcctgaagatcgacggcaaggtgagggtggacatcacctaccccgccggcttcatcgacgtgatcagcatcgagaaaaccggcgagcacttcaggctggtgtacaacaccaagggctgcttcgccgtgcacaggatcaccgtggaggaggccaagtacaagctgtgcaaggtgaggaagatcaccgtgggcaccaagggcatcccccacctggtgacccacgacgccaggaccatcaggtaccccgaccccctgatcaaggtgaacgacaccgtgcagatcgacctgggcaccggcaagatcaccagcttcatcaagttcgacaccggcaacgtgtgcatggtgatcgccggcgccaacctgggcagggtgggcgtgatcaccaacagggagaggcaccccggcagctgcgacgtggtgcacgtgaaggacgccaacggcaacagcttcgccaccaggatcagcaacatcttcgtgatcggcaacggcaacaagccctggatcagcctgcccaggggcaagggcatcaggctgaccatcgccgaggagagggacaagaggctggccgccaagcagagcagcggccctaagaaaaagcggaaggtgaatatcagcggctctagctgcggcagccccaacagcgccgacaccagcagcgacttcaaggacctgtggaccaagctgaaggaatgccacgaccgggaagtgcagggactccaggtgaaggtcaccaaactcaagcaagaaagaatcctggacgcccagagactggaagaattcttcaccaagaaccagcagctgagagagcagcagaaagtgctgcacgagacaatcaaggttctggaagatagactgcgggccggcctgtgcgacagatgcgccgtgaccgaggaacacatgcgcaaaaagcagcaggagttcgagaacattagacagcaaaatctgaaattgatcacagagctgatgaacgagagaaacacactgcaggaggagaacaagaagctgagcgagcagctgcaacagaagatcgagaatgatcagcaacaccaggccgctgagctggaatgtgaagaggacgtgatccccgacagcccaatcacagctttcagcttttctggcgtgaacagactgaggcggaaggaaaacccccacgtgcggtacatcgagcagacccataccaagctggaacacagcgtgtgtgccaacgagatgagaaaggtgtccaagtcctccacccatccccagcacaaccctaacgaaaatgagatcctggtggctgatacctacgaccagtctcagagccctatggccaaggcccacggcaccagctcttatacccctgataagagctccttcaacctggccaccgtggtggccgagacactgggcctgggcgtgcaggaggaaagcgagacacagggcccaatgagccctctgggagatgagctgtaccactgcctggaaggcaaccacaagaaacagccttttgagtccggctccgagactcctggaacaagcgagagcgctacacctgagggcagccctaagagaaaggtgtccagcgccgagggcgctgccaaggaagagcctaaacggagaagcgccagactgagcgccaagccccccgccaaggtggaagccaagcctaagaaggccgccgctaaggacaagagcagcgataagaaagtccagaccaagggcaagcggggcgccaaaggcaaacaggccgaggtggccaaccaggagacaaaggaagatctgcctgctgagaacggcgaaaccaagaccgaggaatctccagcttctgacgaggccggagagaaggaggccaaaagcgacagcggctctgagacacctggaacaagcgagagcgccaccccggaatcctatgaacaacttgcaccacaaccgtgtgtgggagaaactttacattctagcctcccacgagacagtgaactgtttgtgcctgaagaggggagcagcgagaaggagagcgaggacgcgccaaaaacatctcctccgacgcctgggaaacatggtttggaacagactggggaggaaaaagtgatggtgactgttcctgacaaaaatccaccttgtccttgctgtggtacccgggtaaactctgtgttgaatctgattgaacatctgaaagtgtcacacgggaaaaggggggtttgttttcggtgtgcaaaatgtggaaaggaaaatagtaactatcacagtgttgtttgtcattttaagaaatgcaggggtccagagacggagaaagccccagctggggagtggatttgtgaggtatgcaacagagattttacaaccaaaattggcctgggacaacacaagagattggcacacccagcagtgagaaatcaggaaaggatcgttgcttcccaaccgaaagaaacatcaaatagaggtgctcacaaaaggtgctggacaaaggaggaggaagaattactaataagactggaggctcagttcgagggaaacaaaaatattaataagcttattgcagaacacataaccaccaaaacagctaagcagatcagtgacaaaaggcgattgctgtccagaaagccagcagaggagccacgtgaggagcctggaacgtgtcatcacaccaggagagcagctgcgagcctgagaacggagcctgagatgagtcatcacgcccaggcagaggacagagataatggacctgggagacgccctctgccaggcagggcagctgccggagggagaacaatggacgagataagacgccaccctgataagggcaacggacagcagagacccaccaagcaaaaatcagaagaacagctgcaggcttactataaaaagacactagaggaacgactttcagctggggcacttaacaccttcccccgagcattcaagcaggtaatggaaggccgggatataaagctagtaatcaatcagacagcgcaggactgcttcggatgcctggaatccataagccaaataagaacggcaacccgagataaaaaggacacggtgacccgggagaaacacccaaagaaaccttttcagaagtggatgaagaagagagcaatcaaaaaaggtaattatcttcggttccagcgtttattttatcttgatagagggaaactggctaaaatcattttagatgatattgaatgcttgtcttgtgacataccactcagtgaaatttattcggtttttaaaacaagatgggaaacaactggtagctttaaaagccttggggactttaaaacttacgggaaggctgacaacactgccttcagagaattaattacggctaaagaaattgagaaaaatgtgcaggaaatgagcaaaggctcggctcccggtccagacgggattactcttggggacgtcgtaaagatggatcccgagttttcccggaccatggagattttcaatttatggttaacaactggtaaaatcccggacatggtgagggggtgcagaaccgttttgattccaaaatcatcaaagccggatcgtttgaaagacattaataactggagacctatcacgatcggttccatcttgctgagactgttctccaggattgtaacagctaggctgagcaaagcgtgccccctgaacccaaggcaaagaggctttatcagagcggcgggatgctctgaaaacttaaaactcctgcaaactataatttggtcggccaaaagagaacacagaccactgggtgttgtattcgtggacatcgccaaggcttttgacaccgtaagccaccagcacatcattcatgctttgcagcaaagagaggtggatccccacatcgtcggtctggtgagcaatatgtacgagaacatcagtacgtatatcaccacaaagaggaacacacacacagacaaaatccagatccgggttggagtaaagcagggtgacccgatgtcgccccttttatttaacctggcaatggaccctctattatgcaagctggaagagagtggcaaaggataccaccgaggacagagcagcatcacagcgatggcatttgcagacgatctggttttgctgagcgactcctgggaaaatatgaatacaaatattagcatactggagaccttctgcaatctgaccggactcaaaacacaggggcaaaagtgccacggcttttacatcaagccgacaaagaagtcttacaccatcaatgactgcgctgcctggactatcaacggcacacccctgaacatgatcgaccccggcgaatctgagaaatacctcggcctgcagtttgacccgtggattggaatagcaaggtccggtctctccacaaaactagatttttggcttcagcggatcgatcaagcaccacttaaacctctgcagaaaactgatattctcaaaacatacaccatccctcggctgatctacatagctgaccactcagaagtgaaaagcgcactactcgaaacccttgaccagaagatccggacagcggtcaaggaatggcttcacctacctccgtgcacctgcgatgccatcctgtactcgagcacgagagacggcggtttgggcatcaccaaattggcaggactgatccccagcgtgcaggcccgtagactgcatcggatcgcacagtcatctgacgatacgatgaaatgcttcatggaaaaagagaaaatggaacagctgcataagaaattgtggattcaagctggaggggacagagagaacataccctcgatttgggaagcaccaccgtcgagtgaaccaccaaacaacgtgagcacaaattcggaatgggaagcaccgacccagaaagataaatttccaaagccttgcaattggaggaaaaacgaattcaaaaaatggaccaaattggcatcccaaggccgcggaattgtaaattttgaaagagacaaaattagtaaccattggatccaatactacagacgcatacctcacaggaaactcctcactgcactacaactcagggccaacgtttaccccacgagagaatttctagccaggggtagacaagaccaatacatcaaggcgtgtaggcactgcgatgcggacaacgaatcctgcgcccacatcatcggcaactgcccagtgacacaggacgcccgaatcaagaggcacaattacatctgcgaactgcttctcgaggaggcgaagaagaaggactgggtagtgttcaaggaaccgcacataagggattccaacaaggaactgtacaaacctgacctgatatttgtgaaggatgggcgtgcacttgtcgtggatgtgacagtacggtatgaagcagccaaatcatcgctggaggaagccgctgcagagaaagtgagaaagtacaaacacctggaaacggaagtaagacatctcacgaatgcaaaggacgttacttttgtgggctttcccctaggagcgcgggggaaatggcaccaagataactttaaacttttgactgagcttggcctctccaaatcgaggcaagtgaaaatggcagagactttttccacagtagcgctcttttcatctgtggacattgtacatatgtttgccagtagggccagaaaatctatggttatgtgataataggctgccttctgcggggcttgccttctggccatgcccttcttctctcccttgcacctgtacctcttggtctttgaataaagcctgagtaggaaggaccggtaaaaaaaaaaaaaaaaaaaaaaaaaaaaaaacgttgactaaaaaaaaaaaaaaaaaaaaaaaaaaaaaaaaaaaaaaaaaaaaaaaaaaaaaaaaaaaaaaaaaaaaaa

SEQ ID NO: 10685 - DNA, 5642 bp, synthetic construct
  source 1..5642: mol_type = other DNA
gaaataagagagaaaagaagagtaagaagaaatataagagaattcgccaccatggccggcaggggcaagcagggcggcaaggccagggccaaggccaagaccaggagcagcagggccggcctgcagttccccgtgggcagggtgcacaggctgctgaggaagggcaactacgccgagagggtgggcgccggcgcccccgtgtacctggccgccgtgctggagtacctgaccgccgagatcctggagctggccggcaacgccgccagggacaacaagaaaaccaggatcatccccaggcacctgcagctggccatcaggaacgacgaggagctgaacaagctgctgggcaaggtgaccatcgcccagggcggcgtgctgcccaacatccaggccgtgctgctgcccaagaaaaccgagagccaccacaaggccaagcctaagaaaaagcggaaggtgaatatcagcggctctagctgcggcagccccaacagcgccgacaccagcagcgacttcaaggacctgtggaccaagctgaaggaatgccacgaccgggaagtgcagggactccaggtgaaggtcaccaaactcaagcaagaaagaatcctggacgcccagagactggaagaattcttcaccaagaaccagcagctgagagagcagcagaaagtgctgcacgagacaatcaaggttctggaagatagactgcgggccggcctgtgcgacagatgcgccgtgaccgaggaacacatgcgcaaaaagcagcaggagttcgagaacattagacagcaaaatctgaaattgatcacagagctgatgaacgagagaaacacactgcaggaggagaacaagaagctgagcgagcagctgcaacagaagatcgagaatgatcagcaacaccaggccgctgagctggaatgtgaagaggacgtgatccccgacagcccaatcacagctttcagcttttctggcgtgaacagactgaggcggaaggaaaacccccacgtgcggtacatcgagcagacccataccaagctggaacacagcgtgtgtgccaacgagatgagaaaggtgtccaagtcctccacccatccccagcacaaccctaacgaaaatgagatcctggtggctgatacctacgaccagtctcagagccctatggccaaggcccacggcaccagctcttatacccctgataagagctccttcaacctggccaccgtggtggccgagacactgggcctgggcgtgcaggaggaaagcgagacacagggcccaatgagccctctgggagatgagctgtaccactgcctggaaggcaaccacaagaaacagccttttgagtccggctccgagactcctggaacaagcgagagcgctacacctgagggcagccctaagagaaaggtgtccagcgccgagggcgctgccaaggaagagcctaaacggagaagcgccagactgagcgccaagccccccgccaaggtggaagccaagcctaagaaggccgccgctaaggacaagagcagcgataagaaagtccagaccaagggcaagcggggcgccaaaggcaaacaggccgaggtggccaaccaggagacaaaggaagatctgcctgctgagaacggcgaaaccaagaccgaggaatctccagcttctgacgaggccggagagaaggaggccaaaagcgacagcggctctgagacacctggaacaagcgagagcgccaccccggaatcctatgaacaacttgcaccacaaccgtgtgtgggagaaactttacattctagcctcccacgagacagtgaactgtttgtgcctgaagaggggagcagcgagaaggagagcgaggacgcgccaaaaacatctcctccgacgcctgggaaacatggtttggaacagactggggaggaaaaagtgatggtgactgttcctgacaaaaatccaccttgtccttgctgtggtacccgggtaaactctgtgttgaatctgattgaacatctgaaagtgtcacacgggaaaaggggggtttgttttcggtgtgcaaaatgtggaaaggaaaatagtaactatcacagtgttgtttgtcattttaagaaatgcaggggtccagagacggagaaagccccagctggggagtggatttgtgaggtatgcaacagagattttacaaccaaaattggcctgggacaacacaagagattggcacacccagcagtgagaaatcaggaaaggatcgttgcttcccaaccgaaagaaacatcaaatagaggtgctcacaaaaggtgctggacaaaggaggaggaagaattactaataagactggaggctcagttcgagggaaacaaaaatattaataagcttattgcagaacacataaccaccaaaacagctaagcagatcagtgacaaaaggcgattgctgtccagaaagccagcagaggagccacgtgaggagcctggaacgtgtcatcacaccaggagagcagctgcgagcctgagaacggagcctgagatgagtcatcacgcccaggcagaggacagagataatggacctgggagacgccctctgccaggcagggcagctgccggagggagaacaatggacgagataagacgccaccctgataagggcaacggacagcagagacccaccaagcaaaaatcagaagaacagctgcaggcttactataaaaagacactagaggaacgactttcagctggggcacttaacaccttcccccgagcattcaagcaggtaatggaaggccgggatataaagctagtaatcaatcagacagcgcaggactgcttcggatgcctggaatccataagccaaataagaacggcaacccgagataaaaaggacacggtgacccgggagaaacacccaaagaaaccttttcagaagtggatgaagaagagagcaatcaaaaaaggtaattatcttcggttccagcgtttattttatcttgatagagggaaactggctaaaatcattttagatgatattgaatgcttgtcttgtgacataccactcagtgaaatttattcggtttttaaaacaagatgggaaacaactggtagctttaaaagccttggggactttaaaacttacgggaaggctgacaacactgccttcagagaattaattacggctaaagaaattgagaaaaatgtgcaggaaatgagcaaaggctcggctcccggtccagacgggattactcttggggacgtcgtaaagatggatcccgagttttcccggaccatggagattttcaatttatggttaacaactggtaaaatcccggacatggtgagggggtgcagaaccgttttgattccaaaatcatcaaagccggatcgtttgaaagacattaataactggagacctatcacgatcggttccatcttgctgagactgttctccaggattgtaacagctaggctgagcaaagcgtgccccctgaacccaaggcaaagaggctttatcagagcggcgggatgctctgaaaacttaaaactcctgcaaactataatttggtcggccaaaagagaacacagaccactgggtgttgtattcgtggacatcgccaaggcttttgacaccgtaagccaccagcacatcattcatgctttgcagcaaagagaggtggatccccacatcgtcggtctggtgagcaatatgtacgagaacatcagtacgtatatcaccacaaagaggaacacacacacagacaaaatccagatccgggttggagtaaagcagggtgacccgatgtcgccccttttatttaacctggcaatggaccctctattatgcaagctggaagagagtggcaaaggataccaccgaggacagagcagcatcacagcgatggcatttgcagacgatctggttttgctgagcgactcctgggaaaatatgaatacaaatattagcatactggagaccttctgcaatctgaccggactcaaaacacaggggcaaaagtgccacggcttttacatcaagccgacaaagaagtcttacaccatcaatgactgcgctgcctggactatcaacggcacacccctgaacatgatcgaccccggcgaatctgagaaatacctcggcctgcagtttgacccgtggattggaatagcaaggtccggtctctccacaaaactagatttttggcttcagcggatcgatcaagcaccacttaaacctctgcagaaaactgatattctcaaaacatacaccatccctcggctgatctacatagctgaccactcagaagtgaaaagcgcactactcgaaacccttgaccagaagatccggacagcggtcaaggaatggcttcacctacctccgtgcacctgcgatgccatcctgtactcgagcacgagagacggcggtttgggcatcaccaaattggcaggactgatccccagcgtgcaggcccgtagactgcatcggatcgcacagtcatctgacgatacgatgaaatgcttcatggaaaaagagaaaatggaacagctgcataagaaattgtggattcaagctggaggggacagagagaacataccctcgatttgggaagcaccaccgtcgagtgaaccaccaaacaacgtgagcacaaattcggaatgggaagcaccgacccagaaagataaatttccaaagccttgcaattggaggaaaaacgaattcaaaaaatggaccaaattggcatcccaaggccgcggaattgtaaattttgaaagagacaaaattagtaaccattggatccaatactacagacgcatacctcacaggaaactcctcactgcactacaactcagggccaacgtttaccccacgagagaatttctagccaggggtagacaagaccaatacatcaaggcgtgtaggcactgcgatgcggacaacgaatcctgcgcccacatcatcggcaactgcccagtgacacaggacgcccgaatcaagaggcacaattacatctgcgaactgcttctcgaggaggcgaagaagaaggactgggtagtgttcaaggaaccgcacataagggattccaacaaggaactgtacaaacctgacctgatatttgtgaaggatgggcgtgcacttgtcgtggatgtgacagtacggtatgaagcagccaaatcatcgctggaggaagccgctgcagagaaagtgagaaagtacaaacacctggaaacggaagtaagacatctcacgaatgcaaaggacgttacttttgtgggctttcccctaggagcgcgggggaaatggcaccaagataactttaaacttttgactgagcttggcctctccaaatcgaggcaagtgaaaatggcagagactttttccacagtagcgctcttttcatctgtggacattgtacatatgtttgccagtagggccagaaaatctatggttatgtgataataggctgccttctgcggggcttgccttctggccatgcccttcttctctcccttgcacctgtacctcttggtctttgaataaagcctgagtaggaaggaccggtaaaaaaaaaaaaaaaaaaaaaaaaaaaaaaacgttgactaaaaaaaaaaaaaaaaaaaaaaaaaaaaaaaaaaaaaaaaaaaaaaaaaaaaaaaaaaaaaaaaaaaaaa

SEQ ID NO: 10686 - DNA, 5534 bp, synthetic construct
  source 1..5534: mol_type = other DNA
gaaataagagagaaaagaagagtaagaagaaatataagagaattcgccaccatggcctacctgaagaggccccccgagagcccccccatcgtggaggagtggaacagcagggccggcggcaaccagaggaacaggggcaacaggctgcaggacaacaggcagttcaggggcagggacaacaggtggggctggcccagcgacaacaggagcaaccagtggcacggcaggagctggggcaacaactacccccagcacaggcaggagccctactacccccagcagtacggccactacggctacaaccagaggcccccctacggctactaccctaagaaaaagcggaaggtgaatatcagcggctctagctgcggcagccccaacagcgccgacaccagcagcgacttcaaggacctgtggaccaagctgaaggaatgccacgaccgggaagtgcagggactccaggtgaaggtcaccaaactcaagcaagaaagaatcctggacgcccagagactggaagaattcttcaccaagaaccagcagctgagagagcagcagaaagtgctgcacgagacaatcaaggttctggaagatagactgcgggccggcctgtgcgacagatgcgccgtgaccgaggaacacatgcgcaaaaagcagcaggagttcgagaacattagacagcaaaatctgaaattgatcacagagctgatgaacgagagaaacacactgcaggaggagaacaagaagctgagcgagcagctgcaacagaagatcgagaatgatcagcaacaccaggccgctgagctggaatgtgaagaggacgtgatccccgacagcccaatcacagctttcagcttttctggcgtgaacagactgaggcggaaggaaaacccccacgtgcggtacatcgagcagacccataccaagctggaacacagcgtgtgtgccaacgagatgagaaaggtgtccaagtcctccacccatccccagcacaaccctaacgaaaatgagatcctggtggctgatacctacgaccagtctcagagccctatggccaaggcccacggcaccagctcttatacccctgataagagctccttcaacctggccaccgtggtggccgagacactgggcctgggcgtgcaggaggaaagcgagacacagggcccaatgagccctctgggagatgagctgtaccactgcctggaaggcaaccacaagaaacagccttttgagtccggctccgagactcctggaacaagcgagagcgctacacctgagggcagccctaagagaaaggtgtccagcgccgagggcgctgccaaggaagagcctaaacggagaagcgccagactgagcgccaagccccccgccaaggtggaagccaagcctaagaaggccgccgctaaggacaagagcagcgataagaaagtccagaccaagggcaagcggggcgccaaaggcaaacaggccgaggtggccaaccaggagacaaaggaagatctgcctgctgagaacggcgaaaccaagaccgaggaatctccagcttctgacgaggccggagagaaggaggccaaaagcgacagcggctctgagacacctggaacaagcgagagcgccaccccggaatcctatgaacaacttgcaccacaaccgtgtgtgggagaaactttacattctagcctcccacgagacagtgaactgtttgtgcctgaagaggggagcagcgagaaggagagcgaggacgcgccaaaaacatctcctccgacgcctgggaaacatggtttggaacagactggggaggaaaaagtgatggtgactgttcctgacaaaaatccaccttgtccttgctgtggtacccgggtaaactctgtgttgaatctgattgaacatctgaaagtgtcacacgggaaaaggggggtttgttttcggtgtgcaaaatgtggaaaggaaaatagtaactatcacagtgttgtttgtcattttaagaaatgcaggggtccagagacggagaaagccccagctggggagtggatttgtgaggtatgcaacagagattttacaaccaaaattggcctgggacaacacaagagattggcacacccagcagtgagaaatcaggaaaggatcgttgcttcccaaccgaaagaaacatcaaatagaggtgctcacaaaaggtgctggacaaaggaggaggaagaattactaataagactggaggctcagttcgagggaaacaaaaatattaataagcttattgcagaacacataaccaccaaaacagctaagcagatcagtgacaaaaggcgattgctgtccagaaagccagcagaggagccacgtgaggagcctggaacgtgtcatcacaccaggagagcagctgcgagcctgagaacggagcctgagatgagtcatcacgcccaggcagaggacagagataatggacctgggagacgccctctgccaggcagggcagctgccggagggagaacaatggacgagataagacgccaccctgataagggcaacggacagcagagacccaccaagcaaaaatcagaagaacagctgcaggcttactataaaaagacactagaggaacgactttcagctggggcacttaacaccttcccccgagcattcaagcaggtaatggaaggccgggatataaagctagtaatcaatcagacagcgcaggactgcttcggatgcctggaatccataagccaaataagaacggcaacccgagataaaaaggacacggtgacccgggagaaacacccaaagaaaccttttcagaagtggatgaagaagagagcaatcaaaaaaggtaattatcttcggttccagcgtttattttatcttgatagagggaaactggctaaaatcattttagatgatattgaatgcttgtcttgtgacataccactcagtgaaatttattcggtttttaaaacaagatgggaaacaactggtagctttaaaagccttggggactttaaaacttacgggaaggctgacaacactgccttcagagaattaattacggctaaagaaattgagaaaaatgtgcaggaaatgagcaaaggctcggctcccggtccagacgggattactcttggggacgtcgtaaagatggatcccgagttttcccggaccatggagattttcaatttatggttaacaactggtaaaatcccggacatggtgagggggtgcagaaccgttttgattccaaaatcatcaaagccggatcgtttgaaagacattaataactggagacctatcacgatcggttccatcttgctgagactgttctccaggattgtaacagctaggctgagcaaagcgtgccccctgaacccaaggcaaagaggctttatcagagcggcgggatgctctgaaaacttaaaactcctgcaaactataatttggtcggccaaaagagaacacagaccactgggtgttgtattcgtggacatcgccaaggcttttgacaccgtaagccaccagcacatcattcatgctttgcagcaaagagaggtggatccccacatcgtcggtctggtgagcaatatgtacgagaacatcagtacgtatatcaccacaaagaggaacacacacacagacaaaatccagatccgggttggagtaaagcagggtgacccgatgtcgccccttttatttaacctggcaatggaccctctattatgcaagctggaagagagtggcaaaggataccaccgaggacagagcagcatcacagcgatggcatttgcagacgatctggttttgctgagcgactcctgggaaaatatgaatacaaatattagcatactggagaccttctgcaatctgaccggactcaaaacacaggggcaaaagtgccacggcttttacatcaagccgacaaagaagtcttacaccatcaatgactgcgctgcctggactatcaacggcacacccctgaacatgatcgaccccggcgaatctgagaaatacctcggcctgcagtttgacccgtggattggaatagcaaggtccggtctctccacaaaactagatttttggcttcagcggatcgatcaagcaccacttaaacctctgcagaaaactgatattctcaaaacatacaccatccctcggctgatctacatagctgaccactcagaagtgaaaagcgcactactcgaaacccttgaccagaagatccggacagcggtcaaggaatggcttcacctacctccgtgcacctgcgatgccatcctgtactcgagcacgagagacggcggtttgggcatcaccaaattggcaggactgatccccagcgtgcaggcccgtagactgcatcggatcgcacagtcatctgacgatacgatgaaatgcttcatggaaaaagagaaaatggaacagctgcataagaaattgtggattcaagctggaggggacagagagaacataccctcgatttgggaagcaccaccgtcgagtgaaccaccaaacaacgtgagcacaaattcggaatgggaagcaccgacccagaaagataaatttccaaagccttgcaattggaggaaaaacgaattcaaaaaatggaccaaattggcatcccaaggccgcggaattgtaaattttgaaagagacaaaattagtaaccattggatccaatactacagacgcatacctcacaggaaactcctcactgcactacaactcagggccaacgtttaccccacgagagaatttctagccaggggtagacaagaccaatacatcaaggcgtgtaggcactgcgatgcggacaacgaatcctgcgcccacatcatcggcaactgcccagtgacacaggacgcccgaatcaagaggcacaattacatctgcgaactgcttctcgaggaggcgaagaagaaggactgggtagtgttcaaggaaccgcacataagggattccaacaaggaactgtacaaacctgacctgatatttgtgaaggatgggcgtgcacttgtcgtggatgtgacagtacggtatgaagcagccaaatcatcgctggaggaagccgctgcagagaaagtgagaaagtacaaacacctggaaacggaagtaagacatctcacgaatgcaaaggacgttacttttgtgggctttcccctaggagcgcgggggaaatggcaccaagataactttaaacttttgactgagcttggcctctccaaatcgaggcaagtgaaaatggcagagactttttccacagtagcgctcttttcatctgtggacattgtacatatgtttgccagtagggccagaaaatctatggttatgtgataataggctgccttctgcggggcttgccttctggccatgcccttcttctctcccttgcacctgtacctcttggtctttgaataaagcctgagtaggaaggaccggtaaaaaaaaaaaaaaaaaaaaaaaaaaaaaaacgttgactaaaaaaaaaaaaaaaaaaaaaaaaaaaaaaaaaaaaaaaaaaaaaaaaaaaaaaaaaaaaaaaaaaaaaa

SEQ ID NO: 10687 - DNA, 5813 bp, synthetic construct
  source 1..5813: mol_type = other DNA
gaaataagagagaaaagaagagtaagaagaaatataagagaattcgccaccatggcttcttgcccgaaacctggccccccggtttcagcaggggcaatgagtttggaaagtggactgaccacccactccgttctcgccatcgaacgtggtcccaattcgttggcaaattccggatcagactttgggggggggggtctggggctaccgttacgcctattgagggtatcggtcggcactcagacctcccgctccgactgggtagacctggtgtcctggagccacccaggacccacgtctaagtcccagcaggttgacctggtgtctttatttcctaaacaccgggttgacctgttatccaaaaacgaccaggtagacctggtggctcaatttttaccatctaaatttccccccaatttggcagaaaatgatttggctttgctggtgaacttagagttctacagatcggatttgcatgtgtatgagtgtgttcattttgctgcacattgggagggattaagtggtttgcctgaggtgtatgaacaacttgcaccacaaccgtgtgtgggagaaactttacattctagcctcccacgagacagtgaagcccctaagaaaaagcggaaggtgaatatcagcggctctagctgcggcagccccaacagcgccgacaccagcagcgacttcaaggacctgtggaccaagctgaaggaatgccacgaccgggaagtgcagggactccaggtgaaggtcaccaaactcaagcaagaaagaatcctggacgcccagagactggaagaattcttcaccaagaaccagcagctgagagagcagcagaaagtgctgcacgagacaatcaaggttctggaagatagactgcgggccggcctgtgcgacagatgcgccgtgaccgaggaacacatgcgcaaaaagcagcaggagttcgagaacattagacagcaaaatctgaaattgatcacagagctgatgaacgagagaaacacactgcaggaggagaacaagaagctgagcgagcagctgcaacagaagatcgagaatgatcagcaacaccaggccgctgagctggaatgtgaagaggacgtgatccccgacagcccaatcacagctttcagcttttctggcgtgaacagactgaggcggaaggaaaacccccacgtgcggtacatcgagcagacccataccaagctggaacacagcgtgtgtgccaacgagatgagaaaggtgtccaagtcctccacccatccccagcacaaccctaacgaaaatgagatcctggtggctgatacctacgaccagtctcagagccctatggccaaggcccacggcaccagctcttatacccctgataagagctccttcaacctggccaccgtggtggccgagacactgggcctgggcgtgcaggaggaaagcgagacacagggcccaatgagccctctgggagatgagctgtaccactgcctggaaggcaaccacaagaaacagccttttgagtccggctccgagactcctggaacaagcgagagcgctacacctgagggcagccctaagagaaaggtgtccagcgccgagggcgctgccaaggaagagcctaaacggagaagcgccagactgagcgccaagccccccgccaaggtggaagccaagcctaagaaggccgccgctaaggacaagagcagcgataagaaagtccagaccaagggcaagcggggcgccaaaggcaaacaggccgaggtggccaaccaggagacaaaggaagatctgcctgctgagaacggcgaaaccaagaccgaggaatctccagcttctgacgaggccggagagaaggaggccaaaagcgacagcggctctgagacacctggaacaagcgagagcgccaccccggaatcctatgaacaacttgcaccacaaccgtgtgtgggagaaactttacattctagcctcccacgagacagtgaactgtttgtgcctgaagaggggagcagcgagaaggagagcgaggacgcgccaaaaacatctcctccgacgcctgggaaacatggtttggaacagactggggaggaaaaagtgatggtgactgttcctgacaaaaatccaccttgtccttgctgtggtacccgggtaaactctgtgttgaatctgattgaacatctgaaagtgtcacacgggaaaaggggggtttgttttcggtgtgcaaaatgtggaaaggaaaatagtaactatcacagtgttgtttgtcattttaagaaatgcaggggtccagagacggagaaagccccagctggggagtggatttgtgaggtatgcaacagagattttacaaccaaaattggcctgggacaacacaagagattggcacacccagcagtgagaaatcaggaaaggatcgttgcttcccaaccgaaagaaacatcaaatagaggtgctcacaaaaggtgctggacaaaggaggaggaagaattactaataagactggaggctcagttcgagggaaacaaaaatattaataagcttattgcagaacacataaccaccaaaacagctaagcagatcagtgacaaaaggcgattgctgtccagaaagccagcagaggagccacgtgaggagcctggaacgtgtcatcacaccaggagagcagctgcgagcctgagaacggagcctgagatgagtcatcacgcccaggcagaggacagagataatggacctgggagacgccctctgccaggcagggcagctgccggagggagaacaatggacgagataagacgccaccctgataagggcaacggacagcagagacccaccaagcaaaaatcagaagaacagctgcaggcttactataaaaagacactagaggaacgactttcagctggggcacttaacaccttcccccgagcattcaagcaggtaatggaaggccgggatataaagctagtaatcaatcagacagcgcaggactgcttcggatgcctggaatccataagccaaataagaacggcaacccgagataaaaaggacacggtgacccgggagaaacacccaaagaaaccttttcagaagtggatgaagaagagagcaatcaaaaaaggtaattatcttcggttccagcgtttattttatcttgatagagggaaactggctaaaatcattttagatgatattgaatgcttgtcttgtgacataccactcagtgaaatttattcggtttttaaaacaagatgggaaacaactggtagctttaaaagccttggggactttaaaacttacgggaaggctgacaacactgccttcagagaattaattacggctaaagaaattgagaaaaatgtgcaggaaatgagcaaaggctcggctcccggtccagacgggattactcttggggacgtcgtaaagatggatcccgagttttcccggaccatggagattttcaatttatggttaacaactggtaaaatcccggacatggtgagggggtgcagaaccgttttgattccaaaatcatcaaagccggatcgtttgaaagacattaataactggagacctatcacgatcggttccatcttgctgagactgttctccaggattgtaacagctaggctgagcaaagcgtgccccctgaacccaaggcaaagaggctttatcagagcggcgggatgctctgaaaacttaaaactcctgcaaactataatttggtcggccaaaagagaacacagaccactgggtgttgtattcgtggacatcgccaaggcttttgacaccgtaagccaccagcacatcattcatgctttgcagcaaagagaggtggatccccacatcgtcggtctggtgagcaatatgtacgagaacatcagtacgtatatcaccacaaagaggaacacacacacagacaaaatccagatccgggttggagtaaagcagggtgacccgatgtcgccccttttatttaacctggcaatggaccctctattatgcaagctggaagagagtggcaaaggataccaccgaggacagagcagcatcacagcgatggcatttgcagacgatctggttttgctgagcgactcctgggaaaatatgaatacaaatattagcatactggagaccttctgcaatctgaccggactcaaaacacaggggcaaaagtgccacggcttttacatcaagccgacaaagaagtcttacaccatcaatgactgcgctgcctggactatcaacggcacacccctgaacatgatcgaccccggcgaatctgagaaatacctcggcctgcagtttgacccgtggattggaatagcaaggtccggtctctccacaaaactagatttttggcttcagcggatcgatcaagcaccacttaaacctctgcagaaaactgatattctcaaaacatacaccatccctcggctgatctacatagctgaccactcagaagtgaaaagcgcactactcgaaacccttgaccagaagatccggacagcggtcaaggaatggcttcacctacctccgtgcacctgcgatgccatcctgtactcgagcacgagagacggcggtttgggcatcaccaaattggcaggactgatccccagcgtgcaggcccgtagactgcatcggatcgcacagtcatctgacgatacgatgaaatgcttcatggaaaaagagaaaatggaacagctgcataagaaattgtggattcaagctggaggggacagagagaacataccctcgatttgggaagcaccaccgtcgagtgaaccaccaaacaacgtgagcacaaattcggaatgggaagcaccgacccagaaagataaatttccaaagccttgcaattggaggaaaaacgaattcaaaaaatggaccaaattggcatcccaaggccgcggaattgtaaattttgaaagagacaaaattagtaaccattggatccaatactacagacgcatacctcacaggaaactcctcactgcactacaactcagggccaacgtttaccccacgagagaatttctagccaggggtagacaagaccaatacatcaaggcgtgtaggcactgcgatgcggacaacgaatcctgcgcccacatcatcggcaactgcccagtgacacaggacgcccgaatcaagaggcacaattacatctgcgaactgcttctcgaggaggcgaagaagaaggactgggtagtgttcaaggaaccgcacataagggattccaacaaggaactgtacaaacctgacctgatatttgtgaaggatgggcgtgcacttgtcgtggatgtgacagtacggtatgaagcagccaaatcatcgctggaggaagccgctgcagagaaagtgagaaagtacaaacacctggaaacggaagtaagacatctcacgaatgcaaaggacgttacttttgtgggctttcccctaggagcgcgggggaaatggcaccaagataactttaaacttttgactgagcttggcctctccaaatcgaggcaagtgaaaatggcagagactttttccacagtagcgctcttttcatctgtggacattgtacatatgtttgccagtagggccagaaaatctatggttatgtgataataggctgccttctgcggggcttgccttctggccatgcccttcttctctcccttgcacctgtacctcttggtctttgaataaagcctgagtaggaaggaccggtaaaaaaaaaaaaaaaaaaaaaaaaaaaaaaacgttgactaaaaaaaaaaaaaaaaaaaaaaaaaaaaaaaaaaaaaaaaaaaaaaaaaaaaaaaaaaaaaaaaaaaaaa

SEQ ID NO: 10688 - DNA, 5915 bp, synthetic construct
  source 1..5915: mol_type = other DNA
gaaataagagagaaaagaagagtaagaagaaatataagagaattcgccaccatggcttcttgcccgaaacctggccccccggtttcagcaggggcaatgagtttggaaagtggactgaccacccactccgttctcgccatcgaacgtggtcccaattcgttggcaaattccggatcagactttgggggggggggtctggggctaccgttacgcctattgagggtatcggtcggcactcagacctcccgctccgactgggtagacctggtgtcctggagccacccaggacccacgtctaagtcccagcaggttgacctggtgtctttatttcctaaacaccgggttgacctgttatccaaaaacgaccaggtagacctggtggctcaatttttaccatctaaatttccccccaatttggcagaaaatgatttggctttgctggtgaacttagagttctacagatcggatttgcatgtgtatgagtgtgttcattttgctgcacattgggagggattaagtggtttgcctgaggtgtatgaacaacttgcaccacaaccgtgtgtgggagaaactttacattctagcctcccacgagacagtgaactgtttgtgcctgaagaggggagcagcgagaaggagagcgaggacgcgccaaaaacatctcctccgacgcctgggaaacatggtttggaacagactggggaggcccctaagaaaaagcggaaggtgaatatcagcggctctagctgcggcagccccaacagcgccgacaccagcagcgacttcaaggacctgtggaccaagctgaaggaatgccacgaccgggaagtgcagggactccaggtgaaggtcaccaaactcaagcaagaaagaatcctggacgcccagagactggaagaattcttcaccaagaaccagcagctgagagagcagcagaaagtgctgcacgagacaatcaaggttctggaagatagactgcgggccggcctgtgcgacagatgcgccgtgaccgaggaacacatgcgcaaaaagcagcaggagttcgagaacattagacagcaaaatctgaaattgatcacagagctgatgaacgagagaaacacactgcaggaggagaacaagaagctgagcgagcagctgcaacagaagatcgagaatgatcagcaacaccaggccgctgagctggaatgtgaagaggacgtgatccccgacagcccaatcacagctttcagcttttctggcgtgaacagactgaggcggaaggaaaacccccacgtgcggtacatcgagcagacccataccaagctggaacacagcgtgtgtgccaacgagatgagaaaggtgtccaagtcctccacccatccccagcacaaccctaacgaaaatgagatcctggtggctgatacctacgaccagtctcagagccctatggccaaggcccacggcaccagctcttatacccctgataagagctccttcaacctggccaccgtggtggccgagacactgggcctgggcgtgcaggaggaaagcgagacacagggcccaatgagccctctgggagatgagctgtaccactgcctggaaggcaaccacaagaaacagccttttgagtccggctccgagactcctggaacaagcgagagcgctacacctgagggcagccctaagagaaaggtgtccagcgccgagggcgctgccaaggaagagcctaaacggagaagcgccagactgagcgccaagccccccgccaaggtggaagccaagcctaagaaggccgccgctaaggacaagagcagcgataagaaagtccagaccaagggcaagcggggcgccaaaggcaaacaggccgaggtggccaaccaggagacaaaggaagatctgcctgctgagaacggcgaaaccaagaccgaggaatctccagcttctgacgaggccggagagaaggaggccaaaagcgacagcggctctgagacacctggaacaagcgagagcgccaccccggaatcctatgaacaacttgcaccacaaccgtgtgtgggagaaactttacattctagcctcccacgagacagtgaactgtttgtgcctgaagaggggagcagcgagaaggagagcgaggacgcgccaaaaacatctcctccgacgcctgggaaacatggtttggaacagactggggaggaaaaagtgatggtgactgttcctgacaaaaatccaccttgtccttgctgtggtacccgggtaaactctgtgttgaatctgattgaacatctgaaagtgtcacacgggaaaaggggggtttgttttcggtgtgcaaaatgtggaaaggaaaatagtaactatcacagtgttgtttgtcattttaagaaatgcaggggtccagagacggagaaagccccagctggggagtggatttgtgaggtatgcaacagagattttacaaccaaaattggcctgggacaacacaagagattggcacacccagcagtgagaaatcaggaaaggatcgttgcttcccaaccgaaagaaacatcaaatagaggtgctcacaaaaggtgctggacaaaggaggaggaagaattactaataagactggaggctcagttcgagggaaacaaaaatattaataagcttattgcagaacacataaccaccaaaacagctaagcagatcagtgacaaaaggcgattgctgtccagaaagccagcagaggagccacgtgaggagcctggaacgtgtcatcacaccaggagagcagctgcgagcctgagaacggagcctgagatgagtcatcacgcccaggcagaggacagagataatggacctgggagacgccctctgccaggcagggcagctgccggagggagaacaatggacgagataagacgccaccctgataagggcaacggacagcagagacccaccaagcaaaaatcagaagaacagctgcaggcttactataaaaagacactagaggaacgactttcagctggggcacttaacaccttcccccgagcattcaagcaggtaatggaaggccgggatataaagctagtaatcaatcagacagcgcaggactgcttcggatgcctggaatccataagccaaataagaacggcaacccgagataaaaaggacacggtgacccgggagaaacacccaaagaaaccttttcagaagtggatgaagaagagagcaatcaaaaaaggtaattatcttcggttccagcgtttattttatcttgatagagggaaactggctaaaatcattttagatgatattgaatgcttgtcttgtgacataccactcagtgaaatttattcggtttttaaaacaagatgggaaacaactggtagctttaaaagccttggggactttaaaacttacgggaaggctgacaacactgccttcagagaattaattacggctaaagaaattgagaaaaatgtgcaggaaatgagcaaaggctcggctcccggtccagacgggattactcttggggacgtcgtaaagatggatcccgagttttcccggaccatggagattttcaatttatggttaacaactggtaaaatcccggacatggtgagggggtgcagaaccgttttgattccaaaatcatcaaagccggatcgtttgaaagacattaataactggagacctatcacgatcggttccatcttgctgagactgttctccaggattgtaacagctaggctgagcaaagcgtgccccctgaacccaaggcaaagaggctttatcagagcggcgggatgctctgaaaacttaaaactcctgcaaactataatttggtcggccaaaagagaacacagaccactgggtgttgtattcgtggacatcgccaaggcttttgacaccgtaagccaccagcacatcattcatgctttgcagcaaagagaggtggatccccacatcgtcggtctggtgagcaatatgtacgagaacatcagtacgtatatcaccacaaagaggaacacacacacagacaaaatccagatccgggttggagtaaagcagggtgacccgatgtcgccccttttatttaacctggcaatggaccctctattatgcaagctggaagagagtggcaaaggataccaccgaggacagagcagcatcacagcgatggcatttgcagacgatctggttttgctgagcgactcctgggaaaatatgaatacaaatattagcatactggagaccttctgcaatctgaccggactcaaaacacaggggcaaaagtgccacggcttttacatcaagccgacaaagaagtcttacaccatcaatgactgcgctgcctggactatcaacggcacacccctgaacatgatcgaccccggcgaatctgagaaatacctcggcctgcagtttgacccgtggattggaatagcaaggtccggtctctccacaaaactagatttttggcttcagcggatcgatcaagcaccacttaaacctctgcagaaaactgatattctcaaaacatacaccatccctcggctgatctacatagctgaccactcagaagtgaaaagcgcactactcgaaacccttgaccagaagatccggacagcggtcaaggaatggcttcacctacctccgtgcacctgcgatgccatcctgtactcgagcacgagagacggcggtttgggcatcaccaaattggcaggactgatccccagcgtgcaggcccgtagactgcatcggatcgcacagtcatctgacgatacgatgaaatgcttcatggaaaaagagaaaatggaacagctgcataagaaattgtggattcaagctggaggggacagagagaacataccctcgatttgggaagcaccaccgtcgagtgaaccaccaaacaacgtgagcacaaattcggaatgggaagcaccgacccagaaagataaatttccaaagccttgcaattggaggaaaaacgaattcaaaaaatggaccaaattggcatcccaaggccgcggaattgtaaattttgaaagagacaaaattagtaaccattggatccaatactacagacgcatacctcacaggaaactcctcactgcactacaactcagggccaacgtttaccccacgagagaatttctagccaggggtagacaagaccaatacatcaaggcgtgtaggcactgcgatgcggacaacgaatcctgcgcccacatcatcggcaactgcccagtgacacaggacgcccgaatcaagaggcacaattacatctgcgaactgcttctcgaggaggcgaagaagaaggactgggtagtgttcaaggaaccgcacataagggattccaacaaggaactgtacaaacctgacctgatatttgtgaaggatgggcgtgcacttgtcgtggatgtgacagtacggtatgaagcagccaaatcatcgctggaggaagccgctgcagagaaagtgagaaagtacaaacacctggaaacggaagtaagacatctcacgaatgcaaaggacgttacttttgtgggctttcccctaggagcgcgggggaaatggcaccaagataactttaaacttttgactgagcttggcctctccaaatcgaggcaagtgaaaatggcagagactttttccacagtagcgctcttttcatctgtggacattgtacatatgtttgccagtagggccagaaaatctatggttatgtgataataggctgccttctgcggggcttgccttctggccatgcccttcttctctcccttgcacctgtacctcttggtctttgaataaagcctgagtaggaaggaccggtaaaaaaaaaaaaaaaaaaaaaaaaaaaaaaacgttgactaaaaaaaaaaaaaaaaaaaaaaaaaaaaaaaaaaaaaaaaaaaaaaaaaaaaaaaaaaaaaaaaaaaaaa

SEQ ID NO: 10689 - DNA, 5357 bp, synthetic construct
  source 1..5357: mol_type = other DNA
gaaataagagagaaaagaagagtaagaagaaatataagagaattcgccaccatggccgagaacggcgagagcagcggcccccccaggcccagcaggggccccgccgccgcccagggcagcgccgccgcccccgccgagcccaagatcgcccctaagaaaaagcggaaggtgaatatcagcggctctagctgcggcagccccaacagcgccgacaccagcagcgacttcaaggacctgtggaccaagctgaaggaatgccacgaccgggaagtgcagggactccaggtgaaggtcaccaaactcaagcaagaaagaatcctggacgcccagagactggaagaattcttcaccaagaaccagcagctgagagagcagcagaaagtgctgcacgagacaatcaaggttctggaagatagactgcgggccggcctgtgcgacagatgcgccgtgaccgaggaacacatgcgcaaaaagcagcaggagttcgagaacattagacagcaaaatctgaaattgatcacagagctgatgaacgagagaaacacactgcaggaggagaacaagaagctgagcgagcagctgcaacagaagatcgagaatgatcagcaacaccaggccgctgagctggaatgtgaagaggacgtgatccccgacagcccaatcacagctttcagcttttctggcgtgaacagactgaggcggaaggaaaacccccacgtgcggtacatcgagcagacccataccaagctggaacacagcgtgtgtgccaacgagatgagaaaggtgtccaagtcctccacccatccccagcacaaccctaacgaaaatgagatcctggtggctgatacctacgaccagtctcagagccctatggccaaggcccacggcaccagctcttatacccctgataagagctccttcaacctggccaccgtggtggccgagacactgggcctgggcgtgcaggaggaaagcgagacacagggcccaatgagccctctgggagatgagctgtaccactgcctggaaggcaaccacaagaaacagccttttgagtccggctccgagactcctggaacaagcgagagcgctacacctgagggcagccctaagagaaaggtgtccagcgccgagggcgctgccaaggaagagcctaaacggagaagcgccagactgagcgccaagccccccgccaaggtggaagccaagcctaagaaggccgccgctaaggacaagagcagcgataagaaagtccagaccaagggcaagcggggcgccaaaggcaaacaggccgaggtggccaaccaggagacaaaggaagatctgcctgctgagaacggcgaaaccaagaccgaggaatctccagcttctgacgaggccggagagaaggaggccaaaagcgacagcggctctgagacacctggaacaagcgagagcgccaccccggaatcctatgaacaacttgcaccacaaccgtgtgtgggagaaactttacattctagcctcccacgagacagtgaactgtttgtgcctgaagaggggagcagcgagaaggagagcgaggacgcgccaaaaacatctcctccgacgcctgggaaacatggtttggaacagactggggaggaaaaagtgatggtgactgttcctgacaaaaatccaccttgtccttgctgtggtacccgggtaaactctgtgttgaatctgattgaacatctgaaagtgtcacacgggaaaaggggggtttgttttcggtgtgcaaaatgtggaaaggaaaatagtaactatcacagtgttgtttgtcattttaagaaatgcaggggtccagagacggagaaagccccagctggggagtggatttgtgaggtatgcaacagagattttacaaccaaaattggcctgggacaacacaagagattggcacacccagcagtgagaaatcaggaaaggatcgttgcttcccaaccgaaagaaacatcaaatagaggtgctcacaaaaggtgctggacaaaggaggaggaagaattactaataagactggaggctcagttcgagggaaacaaaaatattaataagcttattgcagaacacataaccaccaaaacagctaagcagatcagtgacaaaaggcgattgctgtccagaaagccagcagaggagccacgtgaggagcctggaacgtgtcatcacaccaggagagcagctgcgagcctgagaacggagcctgagatgagtcatcacgcccaggcagaggacagagataatggacctgggagacgccctctgccaggcagggcagctgccggagggagaacaatggacgagataagacgccaccctgataagggcaacggacagcagagacccaccaagcaaaaatcagaagaacagctgcaggcttactataaaaagacactagaggaacgactttcagctggggcacttaacaccttcccccgagcattcaagcaggtaatggaaggccgggatataaagctagtaatcaatcagacagcgcaggactgcttcggatgcctggaatccataagccaaataagaacggcaacccgagataaaaaggacacggtgacccgggagaaacacccaaagaaaccttttcagaagtggatgaagaagagagcaatcaaaaaaggtaattatcttcggttccagcgtttattttatcttgatagagggaaactggctaaaatcattttagatgatattgaatgcttgtcttgtgacataccactcagtgaaatttattcggtttttaaaacaagatgggaaacaactggtagctttaaaagccttggggactttaaaacttacgggaaggctgacaacactgccttcagagaattaattacggctaaagaaattgagaaaaatgtgcaggaaatgagcaaaggctcggctcccggtccagacgggattactcttggggacgtcgtaaagatggatcccgagttttcccggaccatggagattttcaatttatggttaacaactggtaaaatcccggacatggtgagggggtgcagaaccgttttgattccaaaatcatcaaagccggatcgtttgaaagacattaataactggagacctatcacgatcggttccatcttgctgagactgttctccaggattgtaacagctaggctgagcaaagcgtgccccctgaacccaaggcaaagaggctttatcagagcggcgggatgctctgaaaacttaaaactcctgcaaactataatttggtcggccaaaagagaacacagaccactgggtgttgtattcgtggacatcgccaaggcttttgacaccgtaagccaccagcacatcattcatgctttgcagcaaagagaggtggatccccacatcgtcggtctggtgagcaatatgtacgagaacatcagtacgtatatcaccacaaagaggaacacacacacagacaaaatccagatccgggttggagtaaagcagggtgacccgatgtcgccccttttatttaacctggcaatggaccctctattatgcaagctggaagagagtggcaaaggataccaccgaggacagagcagcatcacagcgatggcatttgcagacgatctggttttgctgagcgactcctgggaaaatatgaatacaaatattagcatactggagaccttctgcaatctgaccggactcaaaacacaggggcaaaagtgccacggcttttacatcaagccgacaaagaagtcttacaccatcaatgactgcgctgcctggactatcaacggcacacccctgaacatgatcgaccccggcgaatctgagaaatacctcggcctgcagtttgacccgtggattggaatagcaaggtccggtctctccacaaaactagatttttggcttcagcggatcgatcaagcaccacttaaacctctgcagaaaactgatattctcaaaacatacaccatccctcggctgatctacatagctgaccactcagaagtgaaaagcgcactactcgaaacccttgaccagaagatccggacagcggtcaaggaatggcttcacctacctccgtgcacctgcgatgccatcctgtactcgagcacgagagacggcggtttgggcatcaccaaattggcaggactgatccccagcgtgcaggcccgtagactgcatcggatcgcacagtcatctgacgatacgatgaaatgcttcatggaaaaagagaaaatggaacagctgcataagaaattgtggattcaagctggaggggacagagagaacataccctcgatttgggaagcaccaccgtcgagtgaaccaccaaacaacgtgagcacaaattcggaatgggaagcaccgacccagaaagataaatttccaaagccttgcaattggaggaaaaacgaattcaaaaaatggaccaaattggcatcccaaggccgcggaattgtaaattttgaaagagacaaaattagtaaccattggatccaatactacagacgcatacctcacaggaaactcctcactgcactacaactcagggccaacgtttaccccacgagagaatttctagccaggggtagacaagaccaatacatcaaggcgtgtaggcactgcgatgcggacaacgaatcctgcgcccacatcatcggcaactgcccagtgacacaggacgcccgaatcaagaggcacaattacatctgcgaactgcttctcgaggaggcgaagaagaaggactgggtagtgttcaaggaaccgcacataagggattccaacaaggaactgtacaaacctgacctgatatttgtgaaggatgggcgtgcacttgtcgtggatgtgacagtacggtatgaagcagccaaatcatcgctggaggaagccgctgcagagaaagtgagaaagtacaaacacctggaaacggaagtaagacatctcacgaatgcaaaggacgttacttttgtgggctttcccctaggagcgcgggggaaatggcaccaagataactttaaacttttgactgagcttggcctctccaaatcgaggcaagtgaaaatggcagagactttttccacagtagcgctcttttcatctgtggacattgtacatatgtttgccagtagggccagaaaatctatggttatgtgataataggctgccttctgcggggcttgccttctggccatgcccttcttctctcccttgcacctgtacctcttggtctttgaataaagcctgagtaggaaggaccggtaaaaaaaaaaaaaaaaaaaaaaaaaaaaaaacgttgactaaaaaaaaaaaaaaaaaaaaaaaaaaaaaaaaaaaaaaaaaaaaaaaaaaaaaaaaaaaaaaaaaaaaaa

SEQ ID NO: 10690 - DNA, 5372 bp, synthetic construct
  source 1..5372: mol_type = other DNA
gaaataagagagaaaagaagagtaagaagaaatataagagaattcgccaccatggccaacaggccccagggccagagcacccagcccagcaacgccgccggcaccaacaccaccagcgccagcacccccaggagcaacagcacccccatcagcaccaacagcaaccctaagaaaaagcggaaggtgaatatcagcggctctagctgcggcagccccaacagcgccgacaccagcagcgacttcaaggacctgtggaccaagctgaaggaatgccacgaccgggaagtgcagggactccaggtgaaggtcaccaaactcaagcaagaaagaatcctggacgcccagagactggaagaattcttcaccaagaaccagcagctgagagagcagcagaaagtgctgcacgagacaatcaaggttctggaagatagactgcgggccggcctgtgcgacagatgcgccgtgaccgaggaacacatgcgcaaaaagcagcaggagttcgagaacattagacagcaaaatctgaaattgatcacagagctgatgaacgagagaaacacactgcaggaggagaacaagaagctgagcgagcagctgcaacagaagatcgagaatgatcagcaacaccaggccgctgagctggaatgtgaagaggacgtgatccccgacagcccaatcacagctttcagcttttctggcgtgaacagactgaggcggaaggaaaacccccacgtgcggtacatcgagcagacccataccaagctggaacacagcgtgtgtgccaacgagatgagaaaggtgtccaagtcctccacccatccccagcacaaccctaacgaaaatgagatcctggtggctgatacctacgaccagtctcagagccctatggccaaggcccacggcaccagctcttatacccctgataagagctccttcaacctggccaccgtggtggccgagacactgggcctgggcgtgcaggaggaaagcgagacacagggcccaatgagccctctgggagatgagctgtaccactgcctggaaggcaaccacaagaaacagccttttgagtccggctccgagactcctggaacaagcgagagcgctacacctgagggcagccctaagagaaaggtgtccagcgccgagggcgctgccaaggaagagcctaaacggagaagcgccagactgagcgccaagccccccgccaaggtggaagccaagcctaagaaggccgccgctaaggacaagagcagcgataagaaagtccagaccaagggcaagcggggcgccaaaggcaaacaggccgaggtggccaaccaggagacaaaggaagatctgcctgctgagaacggcgaaaccaagaccgaggaatctccagcttctgacgaggccggagagaaggaggccaaaagcgacagcggctctgagacacctggaacaagcgagagcgccaccccggaatcctatgaacaacttgcaccacaaccgtgtgtgggagaaactttacattctagcctcccacgagacagtgaactgtttgtgcctgaagaggggagcagcgagaaggagagcgaggacgcgccaaaaacatctcctccgacgcctgggaaacatggtttggaacagactggggaggaaaaagtgatggtgactgttcctgacaaaaatccaccttgtccttgctgtggtacccgggtaaactctgtgttgaatctgattgaacatctgaaagtgtcacacgggaaaaggggggtttgttttcggtgtgcaaaatgtggaaaggaaaatagtaactatcacagtgttgtttgtcattttaagaaatgcaggggtccagagacggagaaagccccagctggggagtggatttgtgaggtatgcaacagagattttacaaccaaaattggcctgggacaacacaagagattggcacacccagcagtgagaaatcaggaaaggatcgttgcttcccaaccgaaagaaacatcaaatagaggtgctcacaaaaggtgctggacaaaggaggaggaagaattactaataagactggaggctcagttcgagggaaacaaaaatattaataagcttattgcagaacacataaccaccaaaacagctaagcagatcagtgacaaaaggcgattgctgtccagaaagccagcagaggagccacgtgaggagcctggaacgtgtcatcacaccaggagagcagctgcgagcctgagaacggagcctgagatgagtcatcacgcccaggcagaggacagagataatggacctgggagacgccctctgccaggcagggcagctgccggagggagaacaatggacgagataagacgccaccctgataagggcaacggacagcagagacccaccaagcaaaaatcagaagaacagctgcaggcttactataaaaagacactagaggaacgactttcagctggggcacttaacaccttcccccgagcattcaagcaggtaatggaaggccgggatataaagctagtaatcaatcagacagcgcaggactgcttcggatgcctggaatccataagccaaataagaacggcaacccgagataaaaaggacacggtgacccgggagaaacacccaaagaaaccttttcagaagtggatgaagaagagagcaatcaaaaaaggtaattatcttcggttccagcgtttattttatcttgatagagggaaactggctaaaatcattttagatgatattgaatgcttgtcttgtgacataccactcagtgaaatttattcggtttttaaaacaagatgggaaacaactggtagctttaaaagccttggggactttaaaacttacgggaaggctgacaacactgccttcagagaattaattacggctaaagaaattgagaaaaatgtgcaggaaatgagcaaaggctcggctcccggtccagacgggattactcttggggacgtcgtaaagatggatcccgagttttcccggaccatggagattttcaatttatggttaacaactggtaaaatcccggacatggtgagggggtgcagaaccgttttgattccaaaatcatcaaagccggatcgtttgaaagacattaataactggagacctatcacgatcggttccatcttgctgagactgttctccaggattgtaacagctaggctgagcaaagcgtgccccctgaacccaaggcaaagaggctttatcagagcggcgggatgctctgaaaacttaaaactcctgcaaactataatttggtcggccaaaagagaacacagaccactgggtgttgtattcgtggacatcgccaaggcttttgacaccgtaagccaccagcacatcattcatgctttgcagcaaagagaggtggatccccacatcgtcggtctggtgagcaatatgtacgagaacatcagtacgtatatcaccacaaagaggaacacacacacagacaaaatccagatccgggttggagtaaagcagggtgacccgatgtcgccccttttatttaacctggcaatggaccctctattatgcaagctggaagagagtggcaaaggataccaccgaggacagagcagcatcacagcgatggcatttgcagacgatctggttttgctgagcgactcctgggaaaatatgaatacaaatattagcatactggagaccttctgcaatctgaccggactcaaaacacaggggcaaaagtgccacggcttttacatcaagccgacaaagaagtcttacaccatcaatgactgcgctgcctggactatcaacggcacacccctgaacatgatcgaccccggcgaatctgagaaatacctcggcctgcagtttgacccgtggattggaatagcaaggtccggtctctccacaaaactagatttttggcttcagcggatcgatcaagcaccacttaaacctctgcagaaaactgatattctcaaaacatacaccatccctcggctgatctacatagctgaccactcagaagtgaaaagcgcactactcgaaacccttgaccagaagatccggacagcggtcaaggaatggcttcacctacctccgtgcacctgcgatgccatcctgtactcgagcacgagagacggcggtttgggcatcaccaaattggcaggactgatccccagcgtgcaggcccgtagactgcatcggatcgcacagtcatctgacgatacgatgaaatgcttcatggaaaaagagaaaatggaacagctgcataagaaattgtggattcaagctggaggggacagagagaacataccctcgatttgggaagcaccaccgtcgagtgaaccaccaaacaacgtgagcacaaattcggaatgggaagcaccgacccagaaagataaatttccaaagccttgcaattggaggaaaaacgaattcaaaaaatggaccaaattggcatcccaaggccgcggaattgtaaattttgaaagagacaaaattagtaaccattggatccaatactacagacgcatacctcacaggaaactcctcactgcactacaactcagggccaacgtttaccccacgagagaatttctagccaggggtagacaagaccaatacatcaaggcgtgtaggcactgcgatgcggacaacgaatcctgcgcccacatcatcggcaactgcccagtgacacaggacgcccgaatcaagaggcacaattacatctgcgaactgcttctcgaggaggcgaagaagaaggactgggtagtgttcaaggaaccgcacataagggattccaacaaggaactgtacaaacctgacctgatatttgtgaaggatgggcgtgcacttgtcgtggatgtgacagtacggtatgaagcagccaaatcatcgctggaggaagccgctgcagagaaagtgagaaagtacaaacacctggaaacggaagtaagacatctcacgaatgcaaaggacgttacttttgtgggctttcccctaggagcgcgggggaaatggcaccaagataactttaaacttttgactgagcttggcctctccaaatcgaggcaagtgaaaatggcagagactttttccacagtagcgctcttttcatctgtggacattgtacatatgtttgccagtagggccagaaaatctatggttatgtgataataggctgccttctgcggggcttgccttctggccatgcccttcttctctcccttgcacctgtacctcttggtctttgaataaagcctgagtaggaaggaccggtaaaaaaaaaaaaaaaaaaaaaaaaaaaaaaacgttgactaaaaaaaaaaaaaaaaaaaaaaaaaaaaaaaaaaaaaaaaaaaaaaaaaaaaaaaaaaaaaaaaaaaaaa

SEQ ID NO: 10691 - DNA, 5384 bp, synthetic construct
  source 1..5384: mol_type = other DNA
gaaataagagagaaaagaagagtaagaagaaatataagagaattcgccaccatggccaacagcaccggcggcttcgacggccaggccaggcagcccaccccccccttcttcggcagggacaggagccccctgaggaggagcccccccagggccagctacgtggcccccctgaccgcccctaagaaaaagcggaaggtgaatatcagcggctctagctgcggcagccccaacagcgccgacaccagcagcgacttcaaggacctgtggaccaagctgaaggaatgccacgaccgggaagtgcagggactccaggtgaaggtcaccaaactcaagcaagaaagaatcctggacgcccagagactggaagaattcttcaccaagaaccagcagctgagagagcagcagaaagtgctgcacgagacaatcaaggttctggaagatagactgcgggccggcctgtgcgacagatgcgccgtgaccgaggaacacatgcgcaaaaagcagcaggagttcgagaacattagacagcaaaatctgaaattgatcacagagctgatgaacgagagaaacacactgcaggaggagaacaagaagctgagcgagcagctgcaacagaagatcgagaatgatcagcaacaccaggccgctgagctggaatgtgaagaggacgtgatccccgacagcccaatcacagctttcagcttttctggcgtgaacagactgaggcggaaggaaaacccccacgtgcggtacatcgagcagacccataccaagctggaacacagcgtgtgtgccaacgagatgagaaaggtgtccaagtcctccacccatccccagcacaaccctaacgaaaatgagatcctggtggctgatacctacgaccagtctcagagccctatggccaaggcccacggcaccagctcttatacccctgataagagctccttcaacctggccaccgtggtggccgagacactgggcctgggcgtgcaggaggaaagcgagacacagggcccaatgagccctctgggagatgagctgtaccactgcctggaaggcaaccacaagaaacagccttttgagtccggctccgagactcctggaacaagcgagagcgctacacctgagggcagccctaagagaaaggtgtccagcgccgagggcgctgccaaggaagagcctaaacggagaagcgccagactgagcgccaagccccccgccaaggtggaagccaagcctaagaaggccgccgctaaggacaagagcagcgataagaaagtccagaccaagggcaagcggggcgccaaaggcaaacaggccgaggtggccaaccaggagacaaaggaagatctgcctgctgagaacggcgaaaccaagaccgaggaatctccagcttctgacgaggccggagagaaggaggccaaaagcgacagcggctctgagacacctggaacaagcgagagcgccaccccggaatcctatgaacaacttgcaccacaaccgtgtgtgggagaaactttacattctagcctcccacgagacagtgaactgtttgtgcctgaagaggggagcagcgagaaggagagcgaggacgcgccaaaaacatctcctccgacgcctgggaaacatggtttggaacagactggggaggaaaaagtgatggtgactgttcctgacaaaaatccaccttgtccttgctgtggtacccgggtaaactctgtgttgaatctgattgaacatctgaaagtgtcacacgggaaaaggggggtttgttttcggtgtgcaaaatgtggaaaggaaaatagtaactatcacagtgttgtttgtcattttaagaaatgcaggggtccagagacggagaaagccccagctggggagtggatttgtgaggtatgcaacagagattttacaaccaaaattggcctgggacaacacaagagattggcacacccagcagtgagaaatcaggaaaggatcgttgcttcccaaccgaaagaaacatcaaatagaggtgctcacaaaaggtgctggacaaaggaggaggaagaattactaataagactggaggctcagttcgagggaaacaaaaatattaataagcttattgcagaacacataaccaccaaaacagctaagcagatcagtgacaaaaggcgattgctgtccagaaagccagcagaggagccacgtgaggagcctggaacgtgtcatcacaccaggagagcagctgcgagcctgagaacggagcctgagatgagtcatcacgcccaggcagaggacagagataatggacctgggagacgccctctgccaggcagggcagctgccggagggagaacaatggacgagataagacgccaccctgataagggcaacggacagcagagacccaccaagcaaaaatcagaagaacagctgcaggcttactataaaaagacactagaggaacgactttcagctggggcacttaacaccttcccccgagcattcaagcaggtaatggaaggccgggatataaagctagtaatcaatcagacagcgcaggactgcttcggatgcctggaatccataagccaaataagaacggcaacccgagataaaaaggacacggtgacccgggagaaacacccaaagaaaccttttcagaagtggatgaagaagagagcaatcaaaaaaggtaattatcttcggttccagcgtttattttatcttgatagagggaaactggctaaaatcattttagatgatattgaatgcttgtcttgtgacataccactcagtgaaatttattcggtttttaaaacaagatgggaaacaactggtagctttaaaagccttggggactttaaaacttacgggaaggctgacaacactgccttcagagaattaattacggctaaagaaattgagaaaaatgtgcaggaaatgagcaaaggctcggctcccggtccagacgggattactcttggggacgtcgtaaagatggatcccgagttttcccggaccatggagattttcaatttatggttaacaactggtaaaatcccggacatggtgagggggtgcagaaccgttttgattccaaaatcatcaaagccggatcgtttgaaagacattaataactggagacctatcacgatcggttccatcttgctgagactgttctccaggattgtaacagctaggctgagcaaagcgtgccccctgaacccaaggcaaagaggctttatcagagcggcgggatgctctgaaaacttaaaactcctgcaaactataatttggtcggccaaaagagaacacagaccactgggtgttgtattcgtggacatcgccaaggcttttgacaccgtaagccaccagcacatcattcatgctttgcagcaaagagaggtggatccccacatcgtcggtctggtgagcaatatgtacgagaacatcagtacgtatatcaccacaaagaggaacacacacacagacaaaatccagatccgggttggagtaaagcagggtgacccgatgtcgccccttttatttaacctggcaatggaccctctattatgcaagctggaagagagtggcaaaggataccaccgaggacagagcagcatcacagcgatggcatttgcagacgatctggttttgctgagcgactcctgggaaaatatgaatacaaatattagcatactggagaccttctgcaatctgaccggactcaaaacacaggggcaaaagtgccacggcttttacatcaagccgacaaagaagtcttacaccatcaatgactgcgctgcctggactatcaacggcacacccctgaacatgatcgaccccggcgaatctgagaaatacctcggcctgcagtttgacccgtggattggaatagcaaggtccggtctctccacaaaactagatttttggcttcagcggatcgatcaagcaccacttaaacctctgcagaaaactgatattctcaaaacatacaccatccctcggctgatctacatagctgaccactcagaagtgaaaagcgcactactcgaaacccttgaccagaagatccggacagcggtcaaggaatggcttcacctacctccgtgcacctgcgatgccatcctgtactcgagcacgagagacggcggtttgggcatcaccaaattggcaggactgatccccagcgtgcaggcccgtagactgcatcggatcgcacagtcatctgacgatacgatgaaatgcttcatggaaaaagagaaaatggaacagctgcataagaaattgtggattcaagctggaggggacagagagaacataccctcgatttgggaagcaccaccgtcgagtgaaccaccaaacaacgtgagcacaaattcggaatgggaagcaccgacccagaaagataaatttccaaagccttgcaattggaggaaaaacgaattcaaaaaatggaccaaattggcatcccaaggccgcggaattgtaaattttgaaagagacaaaattagtaaccattggatccaatactacagacgcatacctcacaggaaactcctcactgcactacaactcagggccaacgtttaccccacgagagaatttctagccaggggtagacaagaccaatacatcaaggcgtgtaggcactgcgatgcggacaacgaatcctgcgcccacatcatcggcaactgcccagtgacacaggacgcccgaatcaagaggcacaattacatctgcgaactgcttctcgaggaggcgaagaagaaggactgggtagtgttcaaggaaccgcacataagggattccaacaaggaactgtacaaacctgacctgatatttgtgaaggatgggcgtgcacttgtcgtggatgtgacagtacggtatgaagcagccaaatcatcgctggaggaagccgctgcagagaaagtgagaaagtacaaacacctggaaacggaagtaagacatctcacgaatgcaaaggacgttacttttgtgggctttcccctaggagcgcgggggaaatggcaccaagataactttaaacttttgactgagcttggcctctccaaatcgaggcaagtgaaaatggcagagactttttccacagtagcgctcttttcatctgtggacattgtacatatgtttgccagtagggccagaaaatctatggttatgtgataataggctgccttctgcggggcttgccttctggccatgcccttcttctctcccttgcacctgtacctcttggtctttgaataaagcctgagtaggaaggaccggtaaaaaaaaaaaaaaaaaaaaaaaaaaaaaaacgttgactaaaaaaaaaaaaaaaaaaaaaaaaaaaaaaaaaaaaaaaaaaaaaaaaaaaaaaaaaaaaaaaaaaaaaa

SEQ ID NO: 10692 - DNA, 5339 bp, synthetic construct
  source 1..5339: mol_type = other DNA
gaaataagagagaaaagaagagtaagaagaaatataagagaattcgccaccatggccgtggccaacgccaacagcaccccccccccctacgagaggaccaggctgagcccccccagggccagctacgacgaccctaagaaaaagcggaaggtgaatatcagcggctctagctgcggcagccccaacagcgccgacaccagcagcgacttcaaggacctgtggaccaagctgaaggaatgccacgaccgggaagtgcagggactccaggtgaaggtcaccaaactcaagcaagaaagaatcctggacgcccagagactggaagaattcttcaccaagaaccagcagctgagagagcagcagaaagtgctgcacgagacaatcaaggttctggaagatagactgcgggccggcctgtgcgacagatgcgccgtgaccgaggaacacatgcgcaaaaagcagcaggagttcgagaacattagacagcaaaatctgaaattgatcacagagctgatgaacgagagaaacacactgcaggaggagaacaagaagctgagcgagcagctgcaacagaagatcgagaatgatcagcaacaccaggccgctgagctggaatgtgaagaggacgtgatccccgacagcccaatcacagctttcagcttttctggcgtgaacagactgaggcggaaggaaaacccccacgtgcggtacatcgagcagacccataccaagctggaacacagcgtgtgtgccaacgagatgagaaaggtgtccaagtcctccacccatccccagcacaaccctaacgaaaatgagatcctggtggctgatacctacgaccagtctcagagccctatggccaaggcccacggcaccagctcttatacccctgataagagctccttcaacctggccaccgtggtggccgagacactgggcctgggcgtgcaggaggaaagcgagacacagggcccaatgagccctctgggagatgagctgtaccactgcctggaaggcaaccacaagaaacagccttttgagtccggctccgagactcctggaacaagcgagagcgctacacctgagggcagccctaagagaaaggtgtccagcgccgagggcgctgccaaggaagagcctaaacggagaagcgccagactgagcgccaagccccccgccaaggtggaagccaagcctaagaaggccgccgctaaggacaagagcagcgataagaaagtccagaccaagggcaagcggggcgccaaaggcaaacaggccgaggtggccaaccaggagacaaaggaagatctgcctgctgagaacggcgaaaccaagaccgaggaatctccagcttctgacgaggccggagagaaggaggccaaaagcgacagcggctctgagacacctggaacaagcgagagcgccaccccggaatcctatgaacaacttgcaccacaaccgtgtgtgggagaaactttacattctagcctcccacgagacagtgaactgtttgtgcctgaagaggggagcagcgagaaggagagcgaggacgcgccaaaaacatctcctccgacgcctgggaaacatggtttggaacagactggggaggaaaaagtgatggtgactgttcctgacaaaaatccaccttgtccttgctgtggtacccgggtaaactctgtgttgaatctgattgaacatctgaaagtgtcacacgggaaaaggggggtttgttttcggtgtgcaaaatgtggaaaggaaaatagtaactatcacagtgttgtttgtcattttaagaaatgcaggggtccagagacggagaaagccccagctggggagtggatttgtgaggtatgcaacagagattttacaaccaaaattggcctgggacaacacaagagattggcacacccagcagtgagaaatcaggaaaggatcgttgcttcccaaccgaaagaaacatcaaatagaggtgctcacaaaaggtgctggacaaaggaggaggaagaattactaataagactggaggctcagttcgagggaaacaaaaatattaataagcttattgcagaacacataaccaccaaaacagctaagcagatcagtgacaaaaggcgattgctgtccagaaagccagcagaggagccacgtgaggagcctggaacgtgtcatcacaccaggagagcagctgcgagcctgagaacggagcctgagatgagtcatcacgcccaggcagaggacagagataatggacctgggagacgccctctgccaggcagggcagctgccggagggagaacaatggacgagataagacgccaccctgataagggcaacggacagcagagacccaccaagcaaaaatcagaagaacagctgcaggcttactataaaaagacactagaggaacgactttcagctggggcacttaacaccttcccccgagcattcaagcaggtaatggaaggccgggatataaagctagtaatcaatcagacagcgcaggactgcttcggatgcctggaatccataagccaaataagaacggcaacccgagataaaaaggacacggtgacccgggagaaacacccaaagaaaccttttcagaagtggatgaagaagagagcaatcaaaaaaggtaattatcttcggttccagcgtttattttatcttgatagagggaaactggctaaaatcattttagatgatattgaatgcttgtcttgtgacataccactcagtgaaatttattcggtttttaaaacaagatgggaaacaactggtagctttaaaagccttggggactttaaaacttacgggaaggctgacaacactgccttcagagaattaattacggctaaagaaattgagaaaaatgtgcaggaaatgagcaaaggctcggctcccggtccagacgggattactcttggggacgtcgtaaagatggatcccgagttttcccggaccatggagattttcaatttatggttaacaactggtaaaatcccggacatggtgagggggtgcagaaccgttttgattccaaaatcatcaaagccggatcgtttgaaagacattaataactggagacctatcacgatcggttccatcttgctgagactgttctccaggattgtaacagctaggctgagcaaagcgtgccccctgaacccaaggcaaagaggctttatcagagcggcgggatgctctgaaaacttaaaactcctgcaaactataatttggtcggccaaaagagaacacagaccactgggtgttgtattcgtggacatcgccaaggcttttgacaccgtaagccaccagcacatcattcatgctttgcagcaaagagaggtggatccccacatcgtcggtctggtgagcaatatgtacgagaacatcagtacgtatatcaccacaaagaggaacacacacacagacaaaatccagatccgggttggagtaaagcagggtgacccgatgtcgccccttttatttaacctggcaatggaccctctattatgcaagctggaagagagtggcaaaggataccaccgaggacagagcagcatcacagcgatggcatttgcagacgatctggttttgctgagcgactcctgggaaaatatgaatacaaatattagcatactggagaccttctgcaatctgaccggactcaaaacacaggggcaaaagtgccacggcttttacatcaagccgacaaagaagtcttacaccatcaatgactgcgctgcctggactatcaacggcacacccctgaacatgatcgaccccggcgaatctgagaaatacctcggcctgcagtttgacccgtggattggaatagcaaggtccggtctctccacaaaactagatttttggcttcagcggatcgatcaagcaccacttaaacctctgcagaaaactgatattctcaaaacatacaccatccctcggctgatctacatagctgaccactcagaagtgaaaagcgcactactcgaaacccttgaccagaagatccggacagcggtcaaggaatggcttcacctacctccgtgcacctgcgatgccatcctgtactcgagcacgagagacggcggtttgggcatcaccaaattggcaggactgatccccagcgtgcaggcccgtagactgcatcggatcgcacagtcatctgacgatacgatgaaatgcttcatggaaaaagagaaaatggaacagctgcataagaaattgtggattcaagctggaggggacagagagaacataccctcgatttgggaagcaccaccgtcgagtgaaccaccaaacaacgtgagcacaaattcggaatgggaagcaccgacccagaaagataaatttccaaagccttgcaattggaggaaaaacgaattcaaaaaatggaccaaattggcatcccaaggccgcggaattgtaaattttgaaagagacaaaattagtaaccattggatccaatactacagacgcatacctcacaggaaactcctcactgcactacaactcagggccaacgtttaccccacgagagaatttctagccaggggtagacaagaccaatacatcaaggcgtgtaggcactgcgatgcggacaacgaatcctgcgcccacatcatcggcaactgcccagtgacacaggacgcccgaatcaagaggcacaattacatctgcgaactgcttctcgaggaggcgaagaagaaggactgggtagtgttcaaggaaccgcacataagggattccaacaaggaactgtacaaacctgacctgatatttgtgaaggatgggcgtgcacttgtcgtggatgtgacagtacggtatgaagcagccaaatcatcgctggaggaagccgctgcagagaaagtgagaaagtacaaacacctggaaacggaagtaagacatctcacgaatgcaaaggacgttacttttgtgggctttcccctaggagcgcgggggaaatggcaccaagataactttaaacttttgactgagcttggcctctccaaatcgaggcaagtgaaaatggcagagactttttccacagtagcgctcttttcatctgtggacattgtacatatgtttgccagtagggccagaaaatctatggttatgtgataataggctgccttctgcggggcttgccttctggccatgcccttcttctctcccttgcacctgtacctcttggtctttgaataaagcctgagtaggaaggaccggtaaaaaaaaaaaaaaaaaaaaaaaaaaaaaaacgttgactaaaaaaaaaaaaaaaaaaaaaaaaaaaaaaaaaaaaaaaaaaaaaaaaaaaaaaaaaaaaaaaaaaaaaa

SEQ ID NO: 10693 - DNA, 5396 bp, synthetic construct
  source 1..5396: mol_type = other DNA
gaaataagagagaaaagaagagtaagaagaaatataagagaattcgccaccatggccaacaagcccggccagaacgagggcggcgtgaggggcggcaggggcggcggctacaaggagctggacgagcaggagctggaggagaccaagaggaggaggagggaggccgaggaggacgacggcgagatgtaccctaagaaaaagcggaaggtgaatatcagcggctctagctgcggcagccccaacagcgccgacaccagcagcgacttcaaggacctgtggaccaagctgaaggaatgccacgaccgggaagtgcagggactccaggtgaaggtcaccaaactcaagcaagaaagaatcctggacgcccagagactggaagaattcttcaccaagaaccagcagctgagagagcagcagaaagtgctgcacgagacaatcaaggttctggaagatagactgcgggccggcctgtgcgacagatgcgccgtgaccgaggaacacatgcgcaaaaagcagcaggagttcgagaacattagacagcaaaatctgaaattgatcacagagctgatgaacgagagaaacacactgcaggaggagaacaagaagctgagcgagcagctgcaacagaagatcgagaatgatcagcaacaccaggccgctgagctggaatgtgaagaggacgtgatccccgacagcccaatcacagctttcagcttttctggcgtgaacagactgaggcggaaggaaaacccccacgtgcggtacatcgagcagacccataccaagctggaacacagcgtgtgtgccaacgagatgagaaaggtgtccaagtcctccacccatccccagcacaaccctaacgaaaatgagatcctggtggctgatacctacgaccagtctcagagccctatggccaaggcccacggcaccagctcttatacccctgataagagctccttcaacctggccaccgtggtggccgagacactgggcctgggcgtgcaggaggaaagcgagacacagggcccaatgagccctctgggagatgagctgtaccactgcctggaaggcaaccacaagaaacagccttttgagtccggctccgagactcctggaacaagcgagagcgctacacctgagggcagccctaagagaaaggtgtccagcgccgagggcgctgccaaggaagagcctaaacggagaagcgccagactgagcgccaagccccccgccaaggtggaagccaagcctaagaaggccgccgctaaggacaagagcagcgataagaaagtccagaccaagggcaagcggggcgccaaaggcaaacaggccgaggtggccaaccaggagacaaaggaagatctgcctgctgagaacggcgaaaccaagaccgaggaatctccagcttctgacgaggccggagagaaggaggccaaaagcgacagcggctctgagacacctggaacaagcgagagcgccaccccggaatcctatgaacaacttgcaccacaaccgtgtgtgggagaaactttacattctagcctcccacgagacagtgaactgtttgtgcctgaagaggggagcagcgagaaggagagcgaggacgcgccaaaaacatctcctccgacgcctgggaaacatggtttggaacagactggggaggaaaaagtgatggtgactgttcctgacaaaaatccaccttgtccttgctgtggtacccgggtaaactctgtgttgaatctgattgaacatctgaaagtgtcacacgggaaaaggggggtttgttttcggtgtgcaaaatgtggaaaggaaaatagtaactatcacagtgttgtttgtcattttaagaaatgcaggggtccagagacggagaaagccccagctggggagtggatttgtgaggtatgcaacagagattttacaaccaaaattggcctgggacaacacaagagattggcacacccagcagtgagaaatcaggaaaggatcgttgcttcccaaccgaaagaaacatcaaatagaggtgctcacaaaaggtgctggacaaaggaggaggaagaattactaataagactggaggctcagttcgagggaaacaaaaatattaataagcttattgcagaacacataaccaccaaaacagctaagcagatcagtgacaaaaggcgattgctgtccagaaagccagcagaggagccacgtgaggagcctggaacgtgtcatcacaccaggagagcagctgcgagcctgagaacggagcctgagatgagtcatcacgcccaggcagaggacagagataatggacctgggagacgccctctgccaggcagggcagctgccggagggagaacaatggacgagataagacgccaccctgataagggcaacggacagcagagacccaccaagcaaaaatcagaagaacagctgcaggcttactataaaaagacactagaggaacgactttcagctggggcacttaacaccttcccccgagcattcaagcaggtaatggaaggccgggatataaagctagtaatcaatcagacagcgcaggactgcttcggatgcctggaatccataagccaaataagaacggcaacccgagataaaaaggacacggtgacccgggagaaacacccaaagaaaccttttcagaagtggatgaagaagagagcaatcaaaaaaggtaattatcttcggttccagcgtttattttatcttgatagagggaaactggctaaaatcattttagatgatattgaatgcttgtcttgtgacataccactcagtgaaatttattcggtttttaaaacaagatgggaaacaactggtagctttaaaagccttggggactttaaaacttacgggaaggctgacaacactgccttcagagaattaattacggctaaagaaattgagaaaaatgtgcaggaaatgagcaaaggctcggctcccggtccagacgggattactcttggggacgtcgtaaagatggatcccgagttttcccggaccatggagattttcaatttatggttaacaactggtaaaatcccggacatggtgagggggtgcagaaccgttttgattccaaaatcatcaaagccggatcgtttgaaagacattaataactggagacctatcacgatcggttccatcttgctgagactgttctccaggattgtaacagctaggctgagcaaagcgtgccccctgaacccaaggcaaagaggctttatcagagcggcgggatgctctgaaaacttaaaactcctgcaaactataatttggtcggccaaaagagaacacagaccactgggtgttgtattcgtggacatcgccaaggcttttgacaccgtaagccaccagcacatcattcatgctttgcagcaaagagaggtggatccccacatcgtcggtctggtgagcaatatgtacgagaacatcagtacgtatatcaccacaaagaggaacacacacacagacaaaatccagatccgggttggagtaaagcagggtgacccgatgtcgccccttttatttaacctggcaatggaccctctattatgcaagctggaagagagtggcaaaggataccaccgaggacagagcagcatcacagcgatggcatttgcagacgatctggttttgctgagcgactcctgggaaaatatgaatacaaatattagcatactggagaccttctgcaatctgaccggactcaaaacacaggggcaaaagtgccacggcttttacatcaagccgacaaagaagtcttacaccatcaatgactgcgctgcctggactatcaacggcacacccctgaacatgatcgaccccggcgaatctgagaaatacctcggcctgcagtttgacccgtggattggaatagcaaggtccggtctctccacaaaactagatttttggcttcagcggatcgatcaagcaccacttaaacctctgcagaaaactgatattctcaaaacatacaccatccctcggctgatctacatagctgaccactcagaagtgaaaagcgcactactcgaaacccttgaccagaagatccggacagcggtcaaggaatggcttcacctacctccgtgcacctgcgatgccatcctgtactcgagcacgagagacggcggtttgggcatcaccaaattggcaggactgatccccagcgtgcaggcccgtagactgcatcggatcgcacagtcatctgacgatacgatgaaatgcttcatggaaaaagagaaaatggaacagctgcataagaaattgtggattcaagctggaggggacagagagaacataccctcgatttgggaagcaccaccgtcgagtgaaccaccaaacaacgtgagcacaaattcggaatgggaagcaccgacccagaaagataaatttccaaagccttgcaattggaggaaaaacgaattcaaaaaatggaccaaattggcatcccaaggccgcggaattgtaaattttgaaagagacaaaattagtaaccattggatccaatactacagacgcatacctcacaggaaactcctcactgcactacaactcagggccaacgtttaccccacgagagaatttctagccaggggtagacaagaccaatacatcaaggcgtgtaggcactgcgatgcggacaacgaatcctgcgcccacatcatcggcaactgcccagtgacacaggacgcccgaatcaagaggcacaattacatctgcgaactgcttctcgaggaggcgaagaagaaggactgggtagtgttcaaggaaccgcacataagggattccaacaaggaactgtacaaacctgacctgatatttgtgaaggatgggcgtgcacttgtcgtggatgtgacagtacggtatgaagcagccaaatcatcgctggaggaagccgctgcagagaaagtgagaaagtacaaacacctggaaacggaagtaagacatctcacgaatgcaaaggacgttacttttgtgggctttcccctaggagcgcgggggaaatggcaccaagataactttaaacttttgactgagcttggcctctccaaatcgaggcaagtgaaaatggcagagactttttccacagtagcgctcttttcatctgtggacattgtacatatgtttgccagtagggccagaaaatctatggttatgtgataataggctgccttctgcggggcttgccttctggccatgcccttcttctctcccttgcacctgtacctcttggtctttgaataaagcctgagtaggaaggaccggtaaaaaaaaaaaaaaaaaaaaaaaaaaaaaaacgttgactaaaaaaaaaaaaaaaaaaaaaaaaaaaaaaaaaaaaaaaaaaaaaaaaaaaaaaaaaaaaaaaaaaaaaa

SEQ ID NO: 10694 - DNA, 5528 bp, synthetic construct
  source 1..5528: mol_type = other DNA
gaaataagagagaaaagaagagtaagaagaaatataagagaattcgccaccatggccaagaccaaccaggccgacaccaggcccgccgtggccgccggcagggccggctgggaggtggaggagctgggcatcgacaaggacggcagggagaggagcagggacaggcagagggacaggggcagggaccaccactacgacaaggacaggaggaggagcaggagcagggagagggagaggggcaaggagagggactacgactacgaccacgacagggacagggacagggactacggcagggagaggggcagcaggtacaggaaccctaagaaaaagcggaaggtgaatatcagcggctctagctgcggcagccccaacagcgccgacaccagcagcgacttcaaggacctgtggaccaagctgaaggaatgccacgaccgggaagtgcagggactccaggtgaaggtcaccaaactcaagcaagaaagaatcctggacgcccagagactggaagaattcttcaccaagaaccagcagctgagagagcagcagaaagtgctgcacgagacaatcaaggttctggaagatagactgcgggccggcctgtgcgacagatgcgccgtgaccgaggaacacatgcgcaaaaagcagcaggagttcgagaacattagacagcaaaatctgaaattgatcacagagctgatgaacgagagaaacacactgcaggaggagaacaagaagctgagcgagcagctgcaacagaagatcgagaatgatcagcaacaccaggccgctgagctggaatgtgaagaggacgtgatccccgacagcccaatcacagctttcagcttttctggcgtgaacagactgaggcggaaggaaaacccccacgtgcggtacatcgagcagacccataccaagctggaacacagcgtgtgtgccaacgagatgagaaaggtgtccaagtcctccacccatccccagcacaaccctaacgaaaatgagatcctggtggctgatacctacgaccagtctcagagccctatggccaaggcccacggcaccagctcttatacccctgataagagctccttcaacctggccaccgtggtggccgagacactgggcctgggcgtgcaggaggaaagcgagacacagggcccaatgagccctctgggagatgagctgtaccactgcctggaaggcaaccacaagaaacagccttttgagtccggctccgagactcctggaacaagcgagagcgctacacctgagggcagccctaagagaaaggtgtccagcgccgagggcgctgccaaggaagagcctaaacggagaagcgccagactgagcgccaagccccccgccaaggtggaagccaagcctaagaaggccgccgctaaggacaagagcagcgataagaaagtccagaccaagggcaagcggggcgccaaaggcaaacaggccgaggtggccaaccaggagacaaaggaagatctgcctgctgagaacggcgaaaccaagaccgaggaatctccagcttctgacgaggccggagagaaggaggccaaaagcgacagcggctctgagacacctggaacaagcgagagcgccaccccggaatcctatgaacaacttgcaccacaaccgtgtgtgggagaaactttacattctagcctcccacgagacagtgaactgtttgtgcctgaagaggggagcagcgagaaggagagcgaggacgcgccaaaaacatctcctccgacgcctgggaaacatggtttggaacagactggggaggaaaaagtgatggtgactgttcctgacaaaaatccaccttgtccttgctgtggtacccgggtaaactctgtgttgaatctgattgaacatctgaaagtgtcacacgggaaaaggggggtttgttttcggtgtgcaaaatgtggaaaggaaaatagtaactatcacagtgttgtttgtcattttaagaaatgcaggggtccagagacggagaaagccccagctggggagtggatttgtgaggtatgcaacagagattttacaaccaaaattggcctgggacaacacaagagattggcacacccagcagtgagaaatcaggaaaggatcgttgcttcccaaccgaaagaaacatcaaatagaggtgctcacaaaaggtgctggacaaaggaggaggaagaattactaataagactggaggctcagttcgagggaaacaaaaatattaataagcttattgcagaacacataaccaccaaaacagctaagcagatcagtgacaaaaggcgattgctgtccagaaagccagcagaggagccacgtgaggagcctggaacgtgtcatcacaccaggagagcagctgcgagcctgagaacggagcctgagatgagtcatcacgcccaggcagaggacagagataatggacctgggagacgccctctgccaggcagggcagctgccggagggagaacaatggacgagataagacgccaccctgataagggcaacggacagcagagacccaccaagcaaaaatcagaagaacagctgcaggcttactataaaaagacactagaggaacgactttcagctggggcacttaacaccttcccccgagcattcaagcaggtaatggaaggccgggatataaagctagtaatcaatcagacagcgcaggactgcttcggatgcctggaatccataagccaaataagaacggcaacccgagataaaaaggacacggtgacccgggagaaacacccaaagaaaccttttcagaagtggatgaagaagagagcaatcaaaaaaggtaattatcttcggttccagcgtttattttatcttgatagagggaaactggctaaaatcattttagatgatattgaatgcttgtcttgtgacataccactcagtgaaatttattcggtttttaaaacaagatgggaaacaactggtagctttaaaagccttggggactttaaaacttacgggaaggctgacaacactgccttcagagaattaattacggctaaagaaattgagaaaaatgtgcaggaaatgagcaaaggctcggctcccggtccagacgggattactcttggggacgtcgtaaagatggatcccgagttttcccggaccatggagattttcaatttatggttaacaactggtaaaatcccggacatggtgagggggtgcagaaccgttttgattccaaaatcatcaaagccggatcgtttgaaagacattaataactggagacctatcacgatcggttccatcttgctgagactgttctccaggattgtaacagctaggctgagcaaagcgtgccccctgaacccaaggcaaagaggctttatcagagcggcgggatgctctgaaaacttaaaactcctgcaaactataatttggtcggccaaaagagaacacagaccactgggtgttgtattcgtggacatcgccaaggcttttgacaccgtaagccaccagcacatcattcatgctttgcagcaaagagaggtggatccccacatcgtcggtctggtgagcaatatgtacgagaacatcagtacgtatatcaccacaaagaggaacacacacacagacaaaatccagatccgggttggagtaaagcagggtgacccgatgtcgccccttttatttaacctggcaatggaccctctattatgcaagctggaagagagtggcaaaggataccaccgaggacagagcagcatcacagcgatggcatttgcagacgatctggttttgctgagcgactcctgggaaaatatgaatacaaatattagcatactggagaccttctgcaatctgaccggactcaaaacacaggggcaaaagtgccacggcttttacatcaagccgacaaagaagtcttacaccatcaatgactgcgctgcctggactatcaacggcacacccctgaacatgatcgaccccggcgaatctgagaaatacctcggcctgcagtttgacccgtggattggaatagcaaggtccggtctctccacaaaactagatttttggcttcagcggatcgatcaagcaccacttaaacctctgcagaaaactgatattctcaaaacatacaccatccctcggctgatctacatagctgaccactcagaagtgaaaagcgcactactcgaaacccttgaccagaagatccggacagcggtcaaggaatggcttcacctacctccgtgcacctgcgatgccatcctgtactcgagcacgagagacggcggtttgggcatcaccaaattggcaggactgatccccagcgtgcaggcccgtagactgcatcggatcgcacagtcatctgacgatacgatgaaatgcttcatggaaaaagagaaaatggaacagctgcataagaaattgtggattcaagctggaggggacagagagaacataccctcgatttgggaagcaccaccgtcgagtgaaccaccaaacaacgtgagcacaaattcggaatgggaagcaccgacccagaaagataaatttccaaagccttgcaattggaggaaaaacgaattcaaaaaatggaccaaattggcatcccaaggccgcggaattgtaaattttgaaagagacaaaattagtaaccattggatccaatactacagacgcatacctcacaggaaactcctcactgcactacaactcagggccaacgtttaccccacgagagaatttctagccaggggtagacaagaccaatacatcaaggcgtgtaggcactgcgatgcggacaacgaatcctgcgcccacatcatcggcaactgcccagtgacacaggacgcccgaatcaagaggcacaattacatctgcgaactgcttctcgaggaggcgaagaagaaggactgggtagtgttcaaggaaccgcacataagggattccaacaaggaactgtacaaacctgacctgatatttgtgaaggatgggcgtgcacttgtcgtggatgtgacagtacggtatgaagcagccaaatcatcgctggaggaagccgctgcagagaaagtgagaaagtacaaacacctggaaacggaagtaagacatctcacgaatgcaaaggacgttacttttgtgggctttcccctaggagcgcgggggaaatggcaccaagataactttaaacttttgactgagcttggcctctccaaatcgaggcaagtgaaaatggcagagactttttccacagtagcgctcttttcatctgtggacattgtacatatgtttgccagtagggccagaaaatctatggttatgtgataataggctgccttctgcggggcttgccttctggccatgcccttcttctctcccttgcacctgtacctcttggtctttgaataaagcctgagtaggaaggaccggtaaaaaaaaaaaaaaaaaaaaaaaaaaaaaaacgttgactaaaaaaaaaaaaaaaaaaaaaaaaaaaaaaaaaaaaaaaaaaaaaaaaaaaaaaaaaaaaaaaaaaaaaa

SEQ ID NO: 10695 - DNA, 5861 bp, synthetic construct
  source 1..5861: mol_type = other DNA
gaaataagagagaaaagaagagtaagaagaaatataagagaattcgccaccatggccgacgtgatggacgtgttcatccccaagcccttcagggccttcgccttcgtgaccttcgccgacgaccagatcgcccagagcctgtgcggcgaggacctgatcatcaagggcatcagcgtgcacatcagcaacgccgagcccaagcacaacagcaacaggcagctggagaggagcggcaggttcggcggcaaccccggcggcttcggcaaccagggcggcttcggcaacagcaggggcggcggcgccggcctgggcaacaaccagggcagcaacatgggcggcggcatgaacttcggcgccttcagcatcaaccccgccatgatggccgccgcccaggccgccctgcagagcagctggggcatgatgggcatgctggccagccagcagaaccagagcggccccagcggcaacaaccagaaccagggcaacatgcagagggagcccaaccaggccttcggcagcggcaacaacagctacagcggcagcaacagcggcgccgccatcggctggggcagcgccagcaacgccggcagcggcagcggcttcaacggcggcttcggcagcagcatggacagcaagagcagcggctggggcatgcctaagaaaaagcggaaggtgaatatcagcggctctagctgcggcagccccaacagcgccgacaccagcagcgacttcaaggacctgtggaccaagctgaaggaatgccacgaccgggaagtgcagggactccaggtgaaggtcaccaaactcaagcaagaaagaatcctggacgcccagagactggaagaattcttcaccaagaaccagcagctgagagagcagcagaaagtgctgcacgagacaatcaaggttctggaagatagactgcgggccggcctgtgcgacagatgcgccgtgaccgaggaacacatgcgcaaaaagcagcaggagttcgagaacattagacagcaaaatctgaaattgatcacagagctgatgaacgagagaaacacactgcaggaggagaacaagaagctgagcgagcagctgcaacagaagatcgagaatgatcagcaacaccaggccgctgagctggaatgtgaagaggacgtgatccccgacagcccaatcacagctttcagcttttctggcgtgaacagactgaggcggaaggaaaacccccacgtgcggtacatcgagcagacccataccaagctggaacacagcgtgtgtgccaacgagatgagaaaggtgtccaagtcctccacccatccccagcacaaccctaacgaaaatgagatcctggtggctgatacctacgaccagtctcagagccctatggccaaggcccacggcaccagctcttatacccctgataagagctccttcaacctggccaccgtggtggccgagacactgggcctgggcgtgcaggaggaaagcgagacacagggcccaatgagccctctgggagatgagctgtaccactgcctggaaggcaaccacaagaaacagccttttgagtccggctccgagactcctggaacaagcgagagcgctacacctgagggcagccctaagagaaaggtgtccagcgccgagggcgctgccaaggaagagcctaaacggagaagcgccagactgagcgccaagccccccgccaaggtggaagccaagcctaagaaggccgccgctaaggacaagagcagcgataagaaagtccagaccaagggcaagcggggcgccaaaggcaaacaggccgaggtggccaaccaggagacaaaggaagatctgcctgctgagaacggcgaaaccaagaccgaggaatctccagcttctgacgaggccggagagaaggaggccaaaagcgacagcggctctgagacacctggaacaagcgagagcgccaccccggaatcctatgaacaacttgcaccacaaccgtgtgtgggagaaactttacattctagcctcccacgagacagtgaactgtttgtgcctgaagaggggagcagcgagaaggagagcgaggacgcgccaaaaacatctcctccgacgcctgggaaacatggtttggaacagactggggaggaaaaagtgatggtgactgttcctgacaaaaatccaccttgtccttgctgtggtacccgggtaaactctgtgttgaatctgattgaacatctgaaagtgtcacacgggaaaaggggggtttgttttcggtgtgcaaaatgtggaaaggaaaatagtaactatcacagtgttgtttgtcattttaagaaatgcaggggtccagagacggagaaagccccagctggggagtggatttgtgaggtatgcaacagagattttacaaccaaaattggcctgggacaacacaagagattggcacacccagcagtgagaaatcaggaaaggatcgttgcttcccaaccgaaagaaacatcaaatagaggtgctcacaaaaggtgctggacaaaggaggaggaagaattactaataagactggaggctcagttcgagggaaacaaaaatattaataagcttattgcagaacacataaccaccaaaacagctaagcagatcagtgacaaaaggcgattgctgtccagaaagccagcagaggagccacgtgaggagcctggaacgtgtcatcacaccaggagagcagctgcgagcctgagaacggagcctgagatgagtcatcacgcccaggcagaggacagagataatggacctgggagacgccctctgccaggcagggcagctgccggagggagaacaatggacgagataagacgccaccctgataagggcaacggacagcagagacccaccaagcaaaaatcagaagaacagctgcaggcttactataaaaagacactagaggaacgactttcagctggggcacttaacaccttcccccgagcattcaagcaggtaatggaaggccgggatataaagctagtaatcaatcagacagcgcaggactgcttcggatgcctggaatccataagccaaataagaacggcaacccgagataaaaaggacacggtgacccgggagaaacacccaaagaaaccttttcagaagtggatgaagaagagagcaatcaaaaaaggtaattatcttcggttccagcgtttattttatcttgatagagggaaactggctaaaatcattttagatgatattgaatgcttgtcttgtgacataccactcagtgaaatttattcggtttttaaaacaagatgggaaacaactggtagctttaaaagccttggggactttaaaacttacgggaaggctgacaacactgccttcagagaattaattacggctaaagaaattgagaaaaatgtgcaggaaatgagcaaaggctcggctcccggtccagacgggattactcttggggacgtcgtaaagatggatcccgagttttcccggaccatggagattttcaatttatggttaacaactggtaaaatcccggacatggtgagggggtgcagaaccgttttgattccaaaatcatcaaagccggatcgtttgaaagacattaataactggagacctatcacgatcggttccatcttgctgagactgttctccaggattgtaacagctaggctgagcaaagcgtgccccctgaacccaaggcaaagaggctttatcagagcggcgggatgctctgaaaacttaaaactcctgcaaactataatttggtcggccaaaagagaacacagaccactgggtgttgtattcgtggacatcgccaaggcttttgacaccgtaagccaccagcacatcattcatgctttgcagcaaagagaggtggatccccacatcgtcggtctggtgagcaatatgtacgagaacatcagtacgtatatcaccacaaagaggaacacacacacagacaaaatccagatccgggttggagtaaagcagggtgacccgatgtcgccccttttatttaacctggcaatggaccctctattatgcaagctggaagagagtggcaaaggataccaccgaggacagagcagcatcacagcgatggcatttgcagacgatctggttttgctgagcgactcctgggaaaatatgaatacaaatattagcatactggagaccttctgcaatctgaccggactcaaaacacaggggcaaaagtgccacggcttttacatcaagccgacaaagaagtcttacaccatcaatgactgcgctgcctggactatcaacggcacacccctgaacatgatcgaccccggcgaatctgagaaatacctcggcctgcagtttgacccgtggattggaatagcaaggtccggtctctccacaaaactagatttttggcttcagcggatcgatcaagcaccacttaaacctctgcagaaaactgatattctcaaaacatacaccatccctcggctgatctacatagctgaccactcagaagtgaaaagcgcactactcgaaacccttgaccagaagatccggacagcggtcaaggaatggcttcacctacctccgtgcacctgcgatgccatcctgtactcgagcacgagagacggcggtttgggcatcaccaaattggcaggactgatccccagcgtgcaggcccgtagactgcatcggatcgcacagtcatctgacgatacgatgaaatgcttcatggaaaaagagaaaatggaacagctgcataagaaattgtggattcaagctggaggggacagagagaacataccctcgatttgggaagcaccaccgtcgagtgaaccaccaaacaacgtgagcacaaattcggaatgggaagcaccgacccagaaagataaatttccaaagccttgcaattggaggaaaaacgaattcaaaaaatggaccaaattggcatcccaaggccgcggaattgtaaattttgaaagagacaaaattagtaaccattggatccaatactacagacgcatacctcacaggaaactcctcactgcactacaactcagggccaacgtttaccccacgagagaatttctagccaggggtagacaagaccaatacatcaaggcgtgtaggcactgcgatgcggacaacgaatcctgcgcccacatcatcggcaactgcccagtgacacaggacgcccgaatcaagaggcacaattacatctgcgaactgcttctcgaggaggcgaagaagaaggactgggtagtgttcaaggaaccgcacataagggattccaacaaggaactgtacaaacctgacctgatatttgtgaaggatgggcgtgcacttgtcgtggatgtgacagtacggtatgaagcagccaaatcatcgctggaggaagccgctgcagagaaagtgagaaagtacaaacacctggaaacggaagtaagacatctcacgaatgcaaaggacgttacttttgtgggctttcccctaggagcgcgggggaaatggcaccaagataactttaaacttttgactgagcttggcctctccaaatcgaggcaagtgaaaatggcagagactttttccacagtagcgctcttttcatctgtggacattgtacatatgtttgccagtagggccagaaaatctatggttatgtgataataggctgccttctgcggggcttgccttctggccatgcccttcttctctcccttgcacctgtacctcttggtctttgaataaagcctgagtaggaaggaccggtaaaaaaaaaaaaaaaaaaaaaaaaaaaaaaacgttgactaaaaaaaaaaaaaaaaaaaaaaaaaaaaaaaaaaaaaaaaaaaaaaaaaaaaaaaaaaaaaaaaaaaaaa

SEQ ID NO: 10696 - DNA, 5393 bp, synthetic construct
  source 1..5393: mol_type = other DNA
gaaataagagagaaaagaagagtaagaagaaatataagagaattcgccaccatggccgagcccaagcacaacagcaacaggcagctggagaggagcggcaggttcggcggcaaccccggcggcttcggcaaccagggcggcttcggcaacagcaggggcggcggcgccggcctgggcaacaaccagcctaagaaaaagcggaaggtgaatatcagcggctctagctgcggcagccccaacagcgccgacaccagcagcgacttcaaggacctgtggaccaagctgaaggaatgccacgaccgggaagtgcagggactccaggtgaaggtcaccaaactcaagcaagaaagaatcctggacgcccagagactggaagaattcttcaccaagaaccagcagctgagagagcagcagaaagtgctgcacgagacaatcaaggttctggaagatagactgcgggccggcctgtgcgacagatgcgccgtgaccgaggaacacatgcgcaaaaagcagcaggagttcgagaacattagacagcaaaatctgaaattgatcacagagctgatgaacgagagaaacacactgcaggaggagaacaagaagctgagcgagcagctgcaacagaagatcgagaatgatcagcaacaccaggccgctgagctggaatgtgaagaggacgtgatccccgacagcccaatcacagctttcagcttttctggcgtgaacagactgaggcggaaggaaaacccccacgtgcggtacatcgagcagacccataccaagctggaacacagcgtgtgtgccaacgagatgagaaaggtgtccaagtcctccacccatccccagcacaaccctaacgaaaatgagatcctggtggctgatacctacgaccagtctcagagccctatggccaaggcccacggcaccagctcttatacccctgataagagctccttcaacctggccaccgtggtggccgagacactgggcctgggcgtgcaggaggaaagcgagacacagggcccaatgagccctctgggagatgagctgtaccactgcctggaaggcaaccacaagaaacagccttttgagtccggctccgagactcctggaacaagcgagagcgctacacctgagggcagccctaagagaaaggtgtccagcgccgagggcgctgccaaggaagagcctaaacggagaagcgccagactgagcgccaagccccccgccaaggtggaagccaagcctaagaaggccgccgctaaggacaagagcagcgataagaaagtccagaccaagggcaagcggggcgccaaaggcaaacaggccgaggtggccaaccaggagacaaaggaagatctgcctgctgagaacggcgaaaccaagaccgaggaatctccagcttctgacgaggccggagagaaggaggccaaaagcgacagcggctctgagacacctggaacaagcgagagcgccaccccggaatcctatgaacaacttgcaccacaaccgtgtgtgggagaaactttacattctagcctcccacgagacagtgaactgtttgtgcctgaagaggggagcagcgagaaggagagcgaggacgcgccaaaaacatctcctccgacgcctgggaaacatggtttggaacagactggggaggaaaaagtgatggtgactgttcctgacaaaaatccaccttgtccttgctgtggtacccgggtaaactctgtgttgaatctgattgaacatctgaaagtgtcacacgggaaaaggggggtttgttttcggtgtgcaaaatgtggaaaggaaaatagtaactatcacagtgttgtttgtcattttaagaaatgcaggggtccagagacggagaaagccccagctggggagtggatttgtgaggtatgcaacagagattttacaaccaaaattggcctgggacaacacaagagattggcacacccagcagtgagaaatcaggaaaggatcgttgcttcccaaccgaaagaaacatcaaatagaggtgctcacaaaaggtgctggacaaaggaggaggaagaattactaataagactggaggctcagttcgagggaaacaaaaatattaataagcttattgcagaacacataaccaccaaaacagctaagcagatcagtgacaaaaggcgattgctgtccagaaagccagcagaggagccacgtgaggagcctggaacgtgtcatcacaccaggagagcagctgcgagcctgagaacggagcctgagatgagtcatcacgcccaggcagaggacagagataatggacctgggagacgccctctgccaggcagggcagctgccggagggagaacaatggacgagataagacgccaccctgataagggcaacggacagcagagacccaccaagcaaaaatcagaagaacagctgcaggcttactataaaaagacactagaggaacgactttcagctggggcacttaacaccttcccccgagcattcaagcaggtaatggaaggccgggatataaagctagtaatcaatcagacagcgcaggactgcttcggatgcctggaatccataagccaaataagaacggcaacccgagataaaaaggacacggtgacccgggagaaacacccaaagaaaccttttcagaagtggatgaagaagagagcaatcaaaaaaggtaattatcttcggttccagcgtttattttatcttgatagagggaaactggctaaaatcattttagatgatattgaatgcttgtcttgtgacataccactcagtgaaatttattcggtttttaaaacaagatgggaaacaactggtagctttaaaagccttggggactttaaaacttacgggaaggctgacaacactgccttcagagaattaattacggctaaagaaattgagaaaaatgtgcaggaaatgagcaaaggctcggctcccggtccagacgggattactcttggggacgtcgtaaagatggatcccgagttttcccggaccatggagattttcaatttatggttaacaactggtaaaatcccggacatggtgagggggtgcagaaccgttttgattccaaaatcatcaaagccggatcgtttgaaagacattaataactggagacctatcacgatcggttccatcttgctgagactgttctccaggattgtaacagctaggctgagcaaagcgtgccccctgaacccaaggcaaagaggctttatcagagcggcgggatgctctgaaaacttaaaactcctgcaaactataatttggtcggccaaaagagaacacagaccactgggtgttgtattcgtggacatcgccaaggcttttgacaccgtaagccaccagcacatcattcatgctttgcagcaaagagaggtggatccccacatcgtcggtctggtgagcaatatgtacgagaacatcagtacgtatatcaccacaaagaggaacacacacacagacaaaatccagatccgggttggagtaaagcagggtgacccgatgtcgccccttttatttaacctggcaatggaccctctattatgcaagctggaagagagtggcaaaggataccaccgaggacagagcagcatcacagcgatggcatttgcagacgatctggttttgctgagcgactcctgggaaaatatgaatacaaatattagcatactggagaccttctgcaatctgaccggactcaaaacacaggggcaaaagtgccacggcttttacatcaagccgacaaagaagtcttacaccatcaatgactgcgctgcctggactatcaacggcacacccctgaacatgatcgaccccggcgaatctgagaaatacctcggcctgcagtttgacccgtggattggaatagcaaggtccggtctctccacaaaactagatttttggcttcagcggatcgatcaagcaccacttaaacctctgcagaaaactgatattctcaaaacatacaccatccctcggctgatctacatagctgaccactcagaagtgaaaagcgcactactcgaaacccttgaccagaagatccggacagcggtcaaggaatggcttcacctacctccgtgcacctgcgatgccatcctgtactcgagcacgagagacggcggtttgggcatcaccaaattggcaggactgatccccagcgtgcaggcccgtagactgcatcggatcgcacagtcatctgacgatacgatgaaatgcttcatggaaaaagagaaaatggaacagctgcataagaaattgtggattcaagctggaggggacagagagaacataccctcgatttgggaagcaccaccgtcgagtgaaccaccaaacaacgtgagcacaaattcggaatgggaagcaccgacccagaaagataaatttccaaagccttgcaattggaggaaaaacgaattcaaaaaatggaccaaattggcatcccaaggccgcggaattgtaaattttgaaagagacaaaattagtaaccattggatccaatactacagacgcatacctcacaggaaactcctcactgcactacaactcagggccaacgtttaccccacgagagaatttctagccaggggtagacaagaccaatacatcaaggcgtgtaggcactgcgatgcggacaacgaatcctgcgcccacatcatcggcaactgcccagtgacacaggacgcccgaatcaagaggcacaattacatctgcgaactgcttctcgaggaggcgaagaagaaggactgggtagtgttcaaggaaccgcacataagggattccaacaaggaactgtacaaacctgacctgatatttgtgaaggatgggcgtgcacttgtcgtggatgtgacagtacggtatgaagcagccaaatcatcgctggaggaagccgctgcagagaaagtgagaaagtacaaacacctggaaacggaagtaagacatctcacgaatgcaaaggacgttacttttgtgggctttcccctaggagcgcgggggaaatggcaccaagataactttaaacttttgactgagcttggcctctccaaatcgaggcaagtgaaaatggcagagactttttccacagtagcgctcttttcatctgtggacattgtacatatgtttgccagtagggccagaaaatctatggttatgtgataataggctgccttctgcggggcttgccttctggccatgcccttcttctctcccttgcacctgtacctcttggtctttgaataaagcctgagtaggaaggaccggtaaaaaaaaaaaaaaaaaaaaaaaaaaaaaaacgttgactaaaaaaaaaaaaaaaaaaaaaaaaaaaaaaaaaaaaaaaaaaaaaaaaaaaaaaaaaaaaaaaaaaaaaa

SEQ ID NO: 10697 - DNA, 5414 bp, synthetic construct
  source 1..5414: mol_type = other DNA
gaaataagagagaaaagaagagtaagaagaaatataagagaattcgccaccatggccttcaacaggggcggcggcaacggcaggggcggcaggggcaggggcggccccatgggcaggggcggctacggcggcggcggcagcggcggcggcggcaggggcggcttccccagcggcggcggcggcggcggcggccagcagagggccggccctaagaaaaagcggaaggtgaatatcagcggctctagctgcggcagccccaacagcgccgacaccagcagcgacttcaaggacctgtggaccaagctgaaggaatgccacgaccgggaagtgcagggactccaggtgaaggtcaccaaactcaagcaagaaagaatcctggacgcccagagactggaagaattcttcaccaagaaccagcagctgagagagcagcagaaagtgctgcacgagacaatcaaggttctggaagatagactgcgggccggcctgtgcgacagatgcgccgtgaccgaggaacacatgcgcaaaaagcagcaggagttcgagaacattagacagcaaaatctgaaattgatcacagagctgatgaacgagagaaacacactgcaggaggagaacaagaagctgagcgagcagctgcaacagaagatcgagaatgatcagcaacaccaggccgctgagctggaatgtgaagaggacgtgatccccgacagcccaatcacagctttcagcttttctggcgtgaacagactgaggcggaaggaaaacccccacgtgcggtacatcgagcagacccataccaagctggaacacagcgtgtgtgccaacgagatgagaaaggtgtccaagtcctccacccatccccagcacaaccctaacgaaaatgagatcctggtggctgatacctacgaccagtctcagagccctatggccaaggcccacggcaccagctcttatacccctgataagagctccttcaacctggccaccgtggtggccgagacactgggcctgggcgtgcaggaggaaagcgagacacagggcccaatgagccctctgggagatgagctgtaccactgcctggaaggcaaccacaagaaacagccttttgagtccggctccgagactcctggaacaagcgagagcgctacacctgagggcagccctaagagaaaggtgtccagcgccgagggcgctgccaaggaagagcctaaacggagaagcgccagactgagcgccaagccccccgccaaggtggaagccaagcctaagaaggccgccgctaaggacaagagcagcgataagaaagtccagaccaagggcaagcggggcgccaaaggcaaacaggccgaggtggccaaccaggagacaaaggaagatctgcctgctgagaacggcgaaaccaagaccgaggaatctccagcttctgacgaggccggagagaaggaggccaaaagcgacagcggctctgagacacctggaacaagcgagagcgccaccccggaatcctatgaacaacttgcaccacaaccgtgtgtgggagaaactttacattctagcctcccacgagacagtgaactgtttgtgcctgaagaggggagcagcgagaaggagagcgaggacgcgccaaaaacatctcctccgacgcctgggaaacatggtttggaacagactggggaggaaaaagtgatggtgactgttcctgacaaaaatccaccttgtccttgctgtggtacccgggtaaactctgtgttgaatctgattgaacatctgaaagtgtcacacgggaaaaggggggtttgttttcggtgtgcaaaatgtggaaaggaaaatagtaactatcacagtgttgtttgtcattttaagaaatgcaggggtccagagacggagaaagccccagctggggagtggatttgtgaggtatgcaacagagattttacaaccaaaattggcctgggacaacacaagagattggcacacccagcagtgagaaatcaggaaaggatcgttgcttcccaaccgaaagaaacatcaaatagaggtgctcacaaaaggtgctggacaaaggaggaggaagaattactaataagactggaggctcagttcgagggaaacaaaaatattaataagcttattgcagaacacataaccaccaaaacagctaagcagatcagtgacaaaaggcgattgctgtccagaaagccagcagaggagccacgtgaggagcctggaacgtgtcatcacaccaggagagcagctgcgagcctgagaacggagcctgagatgagtcatcacgcccaggcagaggacagagataatggacctgggagacgccctctgccaggcagggcagctgccggagggagaacaatggacgagataagacgccaccctgataagggcaacggacagcagagacccaccaagcaaaaatcagaagaacagctgcaggcttactataaaaagacactagaggaacgactttcagctggggcacttaacaccttcccccgagcattcaagcaggtaatggaaggccgggatataaagctagtaatcaatcagacagcgcaggactgcttcggatgcctggaatccataagccaaataagaacggcaacccgagataaaaaggacacggtgacccgggagaaacacccaaagaaaccttttcagaagtggatgaagaagagagcaatcaaaaaaggtaattatcttcggttccagcgtttattttatcttgatagagggaaactggctaaaatcattttagatgatattgaatgcttgtcttgtgacataccactcagtgaaatttattcggtttttaaaacaagatgggaaacaactggtagctttaaaagccttggggactttaaaacttacgggaaggctgacaacactgccttcagagaattaattacggctaaagaaattgagaaaaatgtgcaggaaatgagcaaaggctcggctcccggtccagacgggattactcttggggacgtcgtaaagatggatcccgagttttcccggaccatggagattttcaatttatggttaacaactggtaaaatcccggacatggtgagggggtgcagaaccgttttgattccaaaatcatcaaagccggatcgtttgaaagacattaataactggagacctatcacgatcggttccatcttgctgagactgttctccaggattgtaacagctaggctgagcaaagcgtgccccctgaacccaaggcaaagaggctttatcagagcggcgggatgctctgaaaacttaaaactcctgcaaactataatttggtcggccaaaagagaacacagaccactgggtgttgtattcgtggacatcgccaaggcttttgacaccgtaagccaccagcacatcattcatgctttgcagcaaagagaggtggatccccacatcgtcggtctggtgagcaatatgtacgagaacatcagtacgtatatcaccacaaagaggaacacacacacagacaaaatccagatccgggttggagtaaagcagggtgacccgatgtcgccccttttatttaacctggcaatggaccctctattatgcaagctggaagagagtggcaaaggataccaccgaggacagagcagcatcacagcgatggcatttgcagacgatctggttttgctgagcgactcctgggaaaatatgaatacaaatattagcatactggagaccttctgcaatctgaccggactcaaaacacaggggcaaaagtgccacggcttttacatcaagccgacaaagaagtcttacaccatcaatgactgcgctgcctggactatcaacggcacacccctgaacatgatcgaccccggcgaatctgagaaatacctcggcctgcagtttgacccgtggattggaatagcaaggtccggtctctccacaaaactagatttttggcttcagcggatcgatcaagcaccacttaaacctctgcagaaaactgatattctcaaaacatacaccatccctcggctgatctacatagctgaccactcagaagtgaaaagcgcactactcgaaacccttgaccagaagatccggacagcggtcaaggaatggcttcacctacctccgtgcacctgcgatgccatcctgtactcgagcacgagagacggcggtttgggcatcaccaaattggcaggactgatccccagcgtgcaggcccgtagactgcatcggatcgcacagtcatctgacgatacgatgaaatgcttcatggaaaaagagaaaatggaacagctgcataagaaattgtggattcaagctggaggggacagagagaacataccctcgatttgggaagcaccaccgtcgagtgaaccaccaaacaacgtgagcacaaattcggaatgggaagcaccgacccagaaagataaatttccaaagccttgcaattggaggaaaaacgaattcaaaaaatggaccaaattggcatcccaaggccgcggaattgtaaattttgaaagagacaaaattagtaaccattggatccaatactacagacgcatacctcacaggaaactcctcactgcactacaactcagggccaacgtttaccccacgagagaatttctagccaggggtagacaagaccaatacatcaaggcgtgtaggcactgcgatgcggacaacgaatcctgcgcccacatcatcggcaactgcccagtgacacaggacgcccgaatcaagaggcacaattacatctgcgaactgcttctcgaggaggcgaagaagaaggactgggtagtgttcaaggaaccgcacataagggattccaacaaggaactgtacaaacctgacctgatatttgtgaaggatgggcgtgcacttgtcgtggatgtgacagtacggtatgaagcagccaaatcatcgctggaggaagccgctgcagagaaagtgagaaagtacaaacacctggaaacggaagtaagacatctcacgaatgcaaaggacgttacttttgtgggctttcccctaggagcgcgggggaaatggcaccaagataactttaaacttttgactgagcttggcctctccaaatcgaggcaagtgaaaatggcagagactttttccacagtagcgctcttttcatctgtggacattgtacatatgtttgccagtagggccagaaaatctatggttatgtgataataggctgccttctgcggggcttgccttctggccatgcccttcttctctcccttgcacctgtacctcttggtctttgaataaagcctgagtaggaaggaccggtaaaaaaaaaaaaaaaaaaaaaaaaaaaaaaacgttgactaaaaaaaaaaaaaaaaaaaaaaaaaaaaaaaaaaaaaaaaaaaaaaaaaaaaaaaaaaaaaaaaaaaaaa

SEQ ID NO: 10698 - DNA, 5807 bp, synthetic construct
  source 1..5807: mol_type = other DNA
gaaataagagagaaaagaagagtaagaagaaatataagagaattcgccaccatggccagcttcggcgaggaggccgaggaggaggaggaggaggtgaacagggtgagccagagcatgaagggcaagagcaagagcagccacgacctgctgaaggacgacccccacctgagcagcgtgcccgtggtggagagcgagaagggcgacgcccccgacctggtggacgacggcgaggacgagagcgccgagcacgacgagtacatcgacggcgacgagaagaacctgatgagggagaggatcgccaagaagctgaagaaggacaccagcgccaacgtgaagagcgccggcgagggcgaggtggagaagaagagcgtgagcaggagcgaggagctgaggaaggaggccaggcagctgaagagggagctgctggccgccaagcagaagaaggtggagaacgccgccaagcaggccgagaagaggagcgaggaggaggaggccccccccgacggcgccgtggccgagtacaggagggagaagcagaagtacgaggccctgaggaagcagcagagcaagaagggcaccagcagggaggaccagaccctgcctaagaaaaagcggaaggtgaatatcagcggctctagctgcggcagccccaacagcgccgacaccagcagcgacttcaaggacctgtggaccaagctgaaggaatgccacgaccgggaagtgcagggactccaggtgaaggtcaccaaactcaagcaagaaagaatcctggacgcccagagactggaagaattcttcaccaagaaccagcagctgagagagcagcagaaagtgctgcacgagacaatcaaggttctggaagatagactgcgggccggcctgtgcgacagatgcgccgtgaccgaggaacacatgcgcaaaaagcagcaggagttcgagaacattagacagcaaaatctgaaattgatcacagagctgatgaacgagagaaacacactgcaggaggagaacaagaagctgagcgagcagctgcaacagaagatcgagaatgatcagcaacaccaggccgctgagctggaatgtgaagaggacgtgatccccgacagcccaatcacagctttcagcttttctggcgtgaacagactgaggcggaaggaaaacccccacgtgcggtacatcgagcagacccataccaagctggaacacagcgtgtgtgccaacgagatgagaaaggtgtccaagtcctccacccatccccagcacaaccctaacgaaaatgagatcctggtggctgatacctacgaccagtctcagagccctatggccaaggcccacggcaccagctcttatacccctgataagagctccttcaacctggccaccgtggtggccgagacactgggcctgggcgtgcaggaggaaagcgagacacagggcccaatgagccctctgggagatgagctgtaccactgcctggaaggcaaccacaagaaacagccttttgagtccggctccgagactcctggaacaagcgagagcgctacacctgagggcagccctaagagaaaggtgtccagcgccgagggcgctgccaaggaagagcctaaacggagaagcgccagactgagcgccaagccccccgccaaggtggaagccaagcctaagaaggccgccgctaaggacaagagcagcgataagaaagtccagaccaagggcaagcggggcgccaaaggcaaacaggccgaggtggccaaccaggagacaaaggaagatctgcctgctgagaacggcgaaaccaagaccgaggaatctccagcttctgacgaggccggagagaaggaggccaaaagcgacagcggctctgagacacctggaacaagcgagagcgccaccccggaatcctatgaacaacttgcaccacaaccgtgtgtgggagaaactttacattctagcctcccacgagacagtgaactgtttgtgcctgaagaggggagcagcgagaaggagagcgaggacgcgccaaaaacatctcctccgacgcctgggaaacatggtttggaacagactggggaggaaaaagtgatggtgactgttcctgacaaaaatccaccttgtccttgctgtggtacccgggtaaactctgtgttgaatctgattgaacatctgaaagtgtcacacgggaaaaggggggtttgttttcggtgtgcaaaatgtggaaaggaaaatagtaactatcacagtgttgtttgtcattttaagaaatgcaggggtccagagacggagaaagccccagctggggagtggatttgtgaggtatgcaacagagattttacaaccaaaattggcctgggacaacacaagagattggcacacccagcagtgagaaatcaggaaaggatcgttgcttcccaaccgaaagaaacatcaaatagaggtgctcacaaaaggtgctggacaaaggaggaggaagaattactaataagactggaggctcagttcgagggaaacaaaaatattaataagcttattgcagaacacataaccaccaaaacagctaagcagatcagtgacaaaaggcgattgctgtccagaaagccagcagaggagccacgtgaggagcctggaacgtgtcatcacaccaggagagcagctgcgagcctgagaacggagcctgagatgagtcatcacgcccaggcagaggacagagataatggacctgggagacgccctctgccaggcagggcagctgccggagggagaacaatggacgagataagacgccaccctgataagggcaacggacagcagagacccaccaagcaaaaatcagaagaacagctgcaggcttactataaaaagacactagaggaacgactttcagctggggcacttaacaccttcccccgagcattcaagcaggtaatggaaggccgggatataaagctagtaatcaatcagacagcgcaggactgcttcggatgcctggaatccataagccaaataagaacggcaacccgagataaaaaggacacggtgacccgggagaaacacccaaagaaaccttttcagaagtggatgaagaagagagcaatcaaaaaaggtaattatcttcggttccagcgtttattttatcttgatagagggaaactggctaaaatcattttagatgatattgaatgcttgtcttgtgacataccactcagtgaaatttattcggtttttaaaacaagatgggaaacaactggtagctttaaaagccttggggactttaaaacttacgggaaggctgacaacactgccttcagagaattaattacggctaaagaaattgagaaaaatgtgcaggaaatgagcaaaggctcggctcccggtccagacgggattactcttggggacgtcgtaaagatggatcccgagttttcccggaccatggagattttcaatttatggttaacaactggtaaaatcccggacatggtgagggggtgcagaaccgttttgattccaaaatcatcaaagccggatcgtttgaaagacattaataactggagacctatcacgatcggttccatcttgctgagactgttctccaggattgtaacagctaggctgagcaaagcgtgccccctgaacccaaggcaaagaggctttatcagagcggcgggatgctctgaaaacttaaaactcctgcaaactataatttggtcggccaaaagagaacacagaccactgggtgttgtattcgtggacatcgccaaggcttttgacaccgtaagccaccagcacatcattcatgctttgcagcaaagagaggtggatccccacatcgtcggtctggtgagcaatatgtacgagaacatcagtacgtatatcaccacaaagaggaacacacacacagacaaaatccagatccgggttggagtaaagcagggtgacccgatgtcgccccttttatttaacctggcaatggaccctctattatgcaagctggaagagagtggcaaaggataccaccgaggacagagcagcatcacagcgatggcatttgcagacgatctggttttgctgagcgactcctgggaaaatatgaatacaaatattagcatactggagaccttctgcaatctgaccggactcaaaacacaggggcaaaagtgccacggcttttacatcaagccgacaaagaagtcttacaccatcaatgactgcgctgcctggactatcaacggcacacccctgaacatgatcgaccccggcgaatctgagaaatacctcggcctgcagtttgacccgtggattggaatagcaaggtccggtctctccacaaaactagatttttggcttcagcggatcgatcaagcaccacttaaacctctgcagaaaactgatattctcaaaacatacaccatccctcggctgatctacatagctgaccactcagaagtgaaaagcgcactactcgaaacccttgaccagaagatccggacagcggtcaaggaatggcttcacctacctccgtgcacctgcgatgccatcctgtactcgagcacgagagacggcggtttgggcatcaccaaattggcaggactgatccccagcgtgcaggcccgtagactgcatcggatcgcacagtcatctgacgatacgatgaaatgcttcatggaaaaagagaaaatggaacagctgcataagaaattgtggattcaagctggaggggacagagagaacataccctcgatttgggaagcaccaccgtcgagtgaaccaccaaacaacgtgagcacaaattcggaatgggaagcaccgacccagaaagataaatttccaaagccttgcaattggaggaaaaacgaattcaaaaaatggaccaaattggcatcccaaggccgcggaattgtaaattttgaaagagacaaaattagtaaccattggatccaatactacagacgcatacctcacaggaaactcctcactgcactacaactcagggccaacgtttaccccacgagagaatttctagccaggggtagacaagaccaatacatcaaggcgtgtaggcactgcgatgcggacaacgaatcctgcgcccacatcatcggcaactgcccagtgacacaggacgcccgaatcaagaggcacaattacatctgcgaactgcttctcgaggaggcgaagaagaaggactgggtagtgttcaaggaaccgcacataagggattccaacaaggaactgtacaaacctgacctgatatttgtgaaggatgggcgtgcacttgtcgtggatgtgacagtacggtatgaagcagccaaatcatcgctggaggaagccgctgcagagaaagtgagaaagtacaaacacctggaaacggaagtaagacatctcacgaatgcaaaggacgttacttttgtgggctttcccctaggagcgcgggggaaatggcaccaagataactttaaacttttgactgagcttggcctctccaaatcgaggcaagtgaaaatggcagagactttttccacagtagcgctcttttcatctgtggacattgtacatatgtttgccagtagggccagaaaatctatggttatgtgataataggctgccttctgcggggcttgccttctggccatgcccttcttctctcccttgcacctgtacctcttggtctttgaataaagcctgagtaggaaggaccggtaaaaaaaaaaaaaaaaaaaaaaaaaaaaaaacgttgactaaaaaaaaaaaaaaaaaaaaaaaaaaaaaaaaaaaaaaaaaaaaaaaaaaaaaaaaaaaaaaaaaaaaaa

SEQ ID NO: 10699 - DNA, 5393 bp, synthetic construct
  source 1..5393: mol_type = other DNA
gaaataagagagaaaagaagagtaagaagaaatataagagaattcgccaccatggccctggacagctacaggaggggcgaggagtgggacccccagaaggccgaggagaagaggaagctgaaggagctggcccagaggcaggaggaggaggccgcccagcagggccccgtggtggtgagccccgcccctaagaaaaagcggaaggtgaatatcagcggctctagctgcggcagccccaacagcgccgacaccagcagcgacttcaaggacctgtggaccaagctgaaggaatgccacgaccgggaagtgcagggactccaggtgaaggtcaccaaactcaagcaagaaagaatcctggacgcccagagactggaagaattcttcaccaagaaccagcagctgagagagcagcagaaagtgctgcacgagacaatcaaggttctggaagatagactgcgggccggcctgtgcgacagatgcgccgtgaccgaggaacacatgcgcaaaaagcagcaggagttcgagaacattagacagcaaaatctgaaattgatcacagagctgatgaacgagagaaacacactgcaggaggagaacaagaagctgagcgagcagctgcaacagaagatcgagaatgatcagcaacaccaggccgctgagctggaatgtgaagaggacgtgatccccgacagcccaatcacagctttcagcttttctggcgtgaacagactgaggcggaaggaaaacccccacgtgcggtacatcgagcagacccataccaagctggaacacagcgtgtgtgccaacgagatgagaaaggtgtccaagtcctccacccatccccagcacaaccctaacgaaaatgagatcctggtggctgatacctacgaccagtctcagagccctatggccaaggcccacggcaccagctcttatacccctgataagagctccttcaacctggccaccgtggtggccgagacactgggcctgggcgtgcaggaggaaagcgagacacagggcccaatgagccctctgggagatgagctgtaccactgcctggaaggcaaccacaagaaacagccttttgagtccggctccgagactcctggaacaagcgagagcgctacacctgagggcagccctaagagaaaggtgtccagcgccgagggcgctgccaaggaagagcctaaacggagaagcgccagactgagcgccaagccccccgccaaggtggaagccaagcctaagaaggccgccgctaaggacaagagcagcgataagaaagtccagaccaagggcaagcggggcgccaaaggcaaacaggccgaggtggccaaccaggagacaaaggaagatctgcctgctgagaacggcgaaaccaagaccgaggaatctccagcttctgacgaggccggagagaaggaggccaaaagcgacagcggctctgagacacctggaacaagcgagagcgccaccccggaatcctatgaacaacttgcaccacaaccgtgtgtgggagaaactttacattctagcctcccacgagacagtgaactgtttgtgcctgaagaggggagcagcgagaaggagagcgaggacgcgccaaaaacatctcctccgacgcctgggaaacatggtttggaacagactggggaggaaaaagtgatggtgactgttcctgacaaaaatccaccttgtccttgctgtggtacccgggtaaactctgtgttgaatctgattgaacatctgaaagtgtcacacgggaaaaggggggtttgttttcggtgtgcaaaatgtggaaaggaaaatagtaactatcacagtgttgtttgtcattttaagaaatgcaggggtccagagacggagaaagccccagctggggagtggatttgtgaggtatgcaacagagattttacaaccaaaattggcctgggacaacacaagagattggcacacccagcagtgagaaatcaggaaaggatcgttgcttcccaaccgaaagaaacatcaaatagaggtgctcacaaaaggtgctggacaaaggaggaggaagaattactaataagactggaggctcagttcgagggaaacaaaaatattaataagcttattgcagaacacataaccaccaaaacagctaagcagatcagtgacaaaaggcgattgctgtccagaaagccagcagaggagccacgtgaggagcctggaacgtgtcatcacaccaggagagcagctgcgagcctgagaacggagcctgagatgagtcatcacgcccaggcagaggacagagataatggacctgggagacgccctctgccaggcagggcagctgccggagggagaacaatggacgagataagacgccaccctgataagggcaacggacagcagagacccaccaagcaaaaatcagaagaacagctgcaggcttactataaaaagacactagaggaacgactttcagctggggcacttaacaccttcccccgagcattcaagcaggtaatggaaggccgggatataaagctagtaatcaatcagacagcgcaggactgcttcggatgcctggaatccataagccaaataagaacggcaacccgagataaaaaggacacggtgacccgggagaaacacccaaagaaaccttttcagaagtggatgaagaagagagcaatcaaaaaaggtaattatcttcggttccagcgtttattttatcttgatagagggaaactggctaaaatcattttagatgatattgaatgcttgtcttgtgacataccactcagtgaaatttattcggtttttaaaacaagatgggaaacaactggtagctttaaaagccttggggactttaaaacttacgggaaggctgacaacactgccttcagagaattaattacggctaaagaaattgagaaaaatgtgcaggaaatgagcaaaggctcggctcccggtccagacgggattactcttggggacgtcgtaaagatggatcccgagttttcccggaccatggagattttcaatttatggttaacaactggtaaaatcccggacatggtgagggggtgcagaaccgttttgattccaaaatcatcaaagccggatcgtttgaaagacattaataactggagacctatcacgatcggttccatcttgctgagactgttctccaggattgtaacagctaggctgagcaaagcgtgccccctgaacccaaggcaaagaggctttatcagagcggcgggatgctctgaaaacttaaaactcctgcaaactataatttggtcggccaaaagagaacacagaccactgggtgttgtattcgtggacatcgccaaggcttttgacaccgtaagccaccagcacatcattcatgctttgcagcaaagagaggtggatccccacatcgtcggtctggtgagcaatatgtacgagaacatcagtacgtatatcaccacaaagaggaacacacacacagacaaaatccagatccgggttggagtaaagcagggtgacccgatgtcgccccttttatttaacctggcaatggaccctctattatgcaagctggaagagagtggcaaaggataccaccgaggacagagcagcatcacagcgatggcatttgcagacgatctggttttgctgagcgactcctgggaaaatatgaatacaaatattagcatactggagaccttctgcaatctgaccggactcaaaacacaggggcaaaagtgccacggcttttacatcaagccgacaaagaagtcttacaccatcaatgactgcgctgcctggactatcaacggcacacccctgaacatgatcgaccccggcgaatctgagaaatacctcggcctgcagtttgacccgtggattggaatagcaaggtccggtctctccacaaaactagatttttggcttcagcggatcgatcaagcaccacttaaacctctgcagaaaactgatattctcaaaacatacaccatccctcggctgatctacatagctgaccactcagaagtgaaaagcgcactactcgaaacccttgaccagaagatccggacagcggtcaaggaatggcttcacctacctccgtgcacctgcgatgccatcctgtactcgagcacgagagacggcggtttgggcatcaccaaattggcaggactgatccccagcgtgcaggcccgtagactgcatcggatcgcacagtcatctgacgatacgatgaaatgcttcatggaaaaagagaaaatggaacagctgcataagaaattgtggattcaagctggaggggacagagagaacataccctcgatttgggaagcaccaccgtcgagtgaaccaccaaacaacgtgagcacaaattcggaatgggaagcaccgacccagaaagataaatttccaaagccttgcaattggaggaaaaacgaattcaaaaaatggaccaaattggcatcccaaggccgcggaattgtaaattttgaaagagacaaaattagtaaccattggatccaatactacagacgcatacctcacaggaaactcctcactgcactacaactcagggccaacgtttaccccacgagagaatttctagccaggggtagacaagaccaatacatcaaggcgtgtaggcactgcgatgcggacaacgaatcctgcgcccacatcatcggcaactgcccagtgacacaggacgcccgaatcaagaggcacaattacatctgcgaactgcttctcgaggaggcgaagaagaaggactgggtagtgttcaaggaaccgcacataagggattccaacaaggaactgtacaaacctgacctgatatttgtgaaggatgggcgtgcacttgtcgtggatgtgacagtacggtatgaagcagccaaatcatcgctggaggaagccgctgcagagaaagtgagaaagtacaaacacctggaaacggaagtaagacatctcacgaatgcaaaggacgttacttttgtgggctttcccctaggagcgcgggggaaatggcaccaagataactttaaacttttgactgagcttggcctctccaaatcgaggcaagtgaaaatggcagagactttttccacagtagcgctcttttcatctgtggacattgtacatatgtttgccagtagggccagaaaatctatggttatgtgataataggctgccttctgcggggcttgccttctggccatgcccttcttctctcccttgcacctgtacctcttggtctttgaataaagcctgagtaggaaggaccggtaaaaaaaaaaaaaaaaaaaaaaaaaaaaaaacgttgactaaaaaaaaaaaaaaaaaaaaaaaaaaaaaaaaaaaaaaaaaaaaaaaaaaaaaaaaaaaaaaaaaaaaaa

SEQ ID NO: 10700 - DNA, 6113 bp, synthetic construct
  source 1..6113: mol_type = other DNA
gaaataagagagaaaagaagagtaagaagaaatataagagaattcgccaccatggccgacatgaacggcaagagcctgcacggcaaggccatcaaggtggagcaggccaagaagcccagcttccagagcggcggcaggaggaggccccccgccagcagcaggaacaggagccccagcggcagcctgaggagcgccaggggcagcaggggcggcaccaggggctggctgcccagccaggagggccacctggacgacggcggctacacccccgacctgaagatgagctacagcaggggcctgatccccgtgaagaggggccccagcagcaggagcggcggccccccccccaagaagagcgcccccagcgccgtggccaggagcaacagctggatgggcagccagggccccatgagccagaggagggagaactacggcgtgccccccaggagggccaccatcagcagctggaggaacgacaggatgagcaccaggcacgacggctacgccaccaacgacggcaaccaccccagctgccaggagaccagggactacgccccccccagcaggggctacgcctacagggacaacggccacagcaacagggacgagcacagcagcaggggctacaggaaccacaggagcagcagggagaccagggactacgccccccccagcaggggccacgcctacagggactacggccacagcaggagggacgagagctacagcaggggctacaggaacaggaggagcagcagggagaccagggagtacgccccccccagcaggggccacggctacagggactacggccacagcaggaggcacgagagctacagcaggggctacaggaaccaccccagcagcagggagaccagggactacgcccccccccacagggactaccctaagaaaaagcggaaggtgaatatcagcggctctagctgcggcagccccaacagcgccgacaccagcagcgacttcaaggacctgtggaccaagctgaaggaatgccacgaccgggaagtgcagggactccaggtgaaggtcaccaaactcaagcaagaaagaatcctggacgcccagagactggaagaattcttcaccaagaaccagcagctgagagagcagcagaaagtgctgcacgagacaatcaaggttctggaagatagactgcgggccggcctgtgcgacagatgcgccgtgaccgaggaacacatgcgcaaaaagcagcaggagttcgagaacattagacagcaaaatctgaaattgatcacagagctgatgaacgagagaaacacactgcaggaggagaacaagaagctgagcgagcagctgcaacagaagatcgagaatgatcagcaacaccaggccgctgagctggaatgtgaagaggacgtgatccccgacagcccaatcacagctttcagcttttctggcgtgaacagactgaggcggaaggaaaacccccacgtgcggtacatcgagcagacccataccaagctggaacacagcgtgtgtgccaacgagatgagaaaggtgtccaagtcctccacccatccccagcacaaccctaacgaaaatgagatcctggtggctgatacctacgaccagtctcagagccctatggccaaggcccacggcaccagctcttatacccctgataagagctccttcaacctggccaccgtggtggccgagacactgggcctgggcgtgcaggaggaaagcgagacacagggcccaatgagccctctgggagatgagctgtaccactgcctggaaggcaaccacaagaaacagccttttgagtccggctccgagactcctggaacaagcgagagcgctacacctgagggcagccctaagagaaaggtgtccagcgccgagggcgctgccaaggaagagcctaaacggagaagcgccagactgagcgccaagccccccgccaaggtggaagccaagcctaagaaggccgccgctaaggacaagagcagcgataagaaagtccagaccaagggcaagcggggcgccaaaggcaaacaggccgaggtggccaaccaggagacaaaggaagatctgcctgctgagaacggcgaaaccaagaccgaggaatctccagcttctgacgaggccggagagaaggaggccaaaagcgacagcggctctgagacacctggaacaagcgagagcgccaccccggaatcctatgaacaacttgcaccacaaccgtgtgtgggagaaactttacattctagcctcccacgagacagtgaactgtttgtgcctgaagaggggagcagcgagaaggagagcgaggacgcgccaaaaacatctcctccgacgcctgggaaacatggtttggaacagactggggaggaaaaagtgatggtgactgttcctgacaaaaatccaccttgtccttgctgtggtacccgggtaaactctgtgttgaatctgattgaacatctgaaagtgtcacacgggaaaaggggggtttgttttcggtgtgcaaaatgtggaaaggaaaatagtaactatcacagtgttgtttgtcattttaagaaatgcaggggtccagagacggagaaagccccagctggggagtggatttgtgaggtatgcaacagagattttacaaccaaaattggcctgggacaacacaagagattggcacacccagcagtgagaaatcaggaaaggatcgttgcttcccaaccgaaagaaacatcaaatagaggtgctcacaaaaggtgctggacaaaggaggaggaagaattactaataagactggaggctcagttcgagggaaacaaaaatattaataagcttattgcagaacacataaccaccaaaacagctaagcagatcagtgacaaaaggcgattgctgtccagaaagccagcagaggagccacgtgaggagcctggaacgtgtcatcacaccaggagagcagctgcgagcctgagaacggagcctgagatgagtcatcacgcccaggcagaggacagagataatggacctgggagacgccctctgccaggcagggcagctgccggagggagaacaatggacgagataagacgccaccctgataagggcaacggacagcagagacccaccaagcaaaaatcagaagaacagctgcaggcttactataaaaagacactagaggaacgactttcagctggggcacttaacaccttcccccgagcattcaagcaggtaatggaaggccgggatataaagctagtaatcaatcagacagcgcaggactgcttcggatgcctggaatccataagccaaataagaacggcaacccgagataaaaaggacacggtgacccgggagaaacacccaaagaaaccttttcagaagtggatgaagaagagagcaatcaaaaaaggtaattatcttcggttccagcgtttattttatcttgatagagggaaactggctaaaatcattttagatgatattgaatgcttgtcttgtgacataccactcagtgaaatttattcggtttttaaaacaagatgggaaacaactggtagctttaaaagccttggggactttaaaacttacgggaaggctgacaacactgccttcagagaattaattacggctaaagaaattgagaaaaatgtgcaggaaatgagcaaaggctcggctcccggtccagacgggattactcttggggacgtcgtaaagatggatcccgagttttcccggaccatggagattttcaatttatggttaacaactggtaaaatcccggacatggtgagggggtgcagaaccgttttgattccaaaatcatcaaagccggatcgtttgaaagacattaataactggagacctatcacgatcggttccatcttgctgagactgttctccaggattgtaacagctaggctgagcaaagcgtgccccctgaacccaaggcaaagaggctttatcagagcggcgggatgctctgaaaacttaaaactcctgcaaactataatttggtcggccaaaagagaacacagaccactgggtgttgtattcgtggacatcgccaaggcttttgacaccgtaagccaccagcacatcattcatgctttgcagcaaagagaggtggatccccacatcgtcggtctggtgagcaatatgtacgagaacatcagtacgtatatcaccacaaagaggaacacacacacagacaaaatccagatccgggttggagtaaagcagggtgacccgatgtcgccccttttatttaacctggcaatggaccctctattatgcaagctggaagagagtggcaaaggataccaccgaggacagagcagcatcacagcgatggcatttgcagacgatctggttttgctgagcgactcctgggaaaatatgaatacaaatattagcatactggagaccttctgcaatctgaccggactcaaaacacaggggcaaaagtgccacggcttttacatcaagccgacaaagaagtcttacaccatcaatgactgcgctgcctggactatcaacggcacacccctgaacatgatcgaccccggcgaatctgagaaatacctcggcctgcagtttgacccgtggattggaatagcaaggtccggtctctccacaaaactagatttttggcttcagcggatcgatcaagcaccacttaaacctctgcagaaaactgatattctcaaaacatacaccatccctcggctgatctacatagctgaccactcagaagtgaaaagcgcactactcgaaacccttgaccagaagatccggacagcggtcaaggaatggcttcacctacctccgtgcacctgcgatgccatcctgtactcgagcacgagagacggcggtttgggcatcaccaaattggcaggactgatccccagcgtgcaggcccgtagactgcatcggatcgcacagtcatctgacgatacgatgaaatgcttcatggaaaaagagaaaatggaacagctgcataagaaattgtggattcaagctggaggggacagagagaacataccctcgatttgggaagcaccaccgtcgagtgaaccaccaaacaacgtgagcacaaattcggaatgggaagcaccgacccagaaagataaatttccaaagccttgcaattggaggaaaaacgaattcaaaaaatggaccaaattggcatcccaaggccgcggaattgtaaattttgaaagagacaaaattagtaaccattggatccaatactacagacgcatacctcacaggaaactcctcactgcactacaactcagggccaacgtttaccccacgagagaatttctagccaggggtagacaagaccaatacatcaaggcgtgtaggcactgcgatgcggacaacgaatcctgcgcccacatcatcggcaactgcccagtgacacaggacgcccgaatcaagaggcacaattacatctgcgaactgcttctcgaggaggcgaagaagaaggactgggtagtgttcaaggaaccgcacataagggattccaacaaggaactgtacaaacctgacctgatatttgtgaaggatgggcgtgcacttgtcgtggatgtgacagtacggtatgaagcagccaaatcatcgctggaggaagccgctgcagagaaagtgagaaagtacaaacacctggaaacggaagtaagacatctcacgaatgcaaaggacgttacttttgtgggctttcccctaggagcgcgggggaaatggcaccaagataactttaaacttttgactgagcttggcctctccaaatcgaggcaagtgaaaatggcagagactttttccacagtagcgctcttttcatctgtggacattgtacatatgtttgccagtagggccagaaaatctatggttatgtgataataggctgccttctgcggggcttgccttctggccatgcccttcttctctcccttgcacctgtacctcttggtctttgaataaagcctgagtaggaaggaccggtaaaaaaaaaaaaaaaaaaaaaaaaaaaaaaacgttgactaaaaaaaaaaaaaaaaaaaaaaaaaaaaaaaaaaaaaaaaaaaaaaaaaaaaaaaaaaaaaaaaaaaaaa

SEQ ID NO: 10701 - DNA, 5399 bp, synthetic construct
  source 1..5399: mol_type = other DNA
gaaataagagagaaaagaagagtaagaagaaatataagagaattcgccaccatggccaaggaccagaggaacccccccagcctgggcagggtgctgcccgaccccagggaggcctgcggcagcagcagctacgtggccagcatcgtggacggcggcgagagcaggagcgagaagggcgacagcagcaggtaccctaagaaaaagcggaaggtgaatatcagcggctctagctgcggcagccccaacagcgccgacaccagcagcgacttcaaggacctgtggaccaagctgaaggaatgccacgaccgggaagtgcagggactccaggtgaaggtcaccaaactcaagcaagaaagaatcctggacgcccagagactggaagaattcttcaccaagaaccagcagctgagagagcagcagaaagtgctgcacgagacaatcaaggttctggaagatagactgcgggccggcctgtgcgacagatgcgccgtgaccgaggaacacatgcgcaaaaagcagcaggagttcgagaacattagacagcaaaatctgaaattgatcacagagctgatgaacgagagaaacacactgcaggaggagaacaagaagctgagcgagcagctgcaacagaagatcgagaatgatcagcaacaccaggccgctgagctggaatgtgaagaggacgtgatccccgacagcccaatcacagctttcagcttttctggcgtgaacagactgaggcggaaggaaaacccccacgtgcggtacatcgagcagacccataccaagctggaacacagcgtgtgtgccaacgagatgagaaaggtgtccaagtcctccacccatccccagcacaaccctaacgaaaatgagatcctggtggctgatacctacgaccagtctcagagccctatggccaaggcccacggcaccagctcttatacccctgataagagctccttcaacctggccaccgtggtggccgagacactgggcctgggcgtgcaggaggaaagcgagacacagggcccaatgagccctctgggagatgagctgtaccactgcctggaaggcaaccacaagaaacagccttttgagtccggctccgagactcctggaacaagcgagagcgctacacctgagggcagccctaagagaaaggtgtccagcgccgagggcgctgccaaggaagagcctaaacggagaagcgccagactgagcgccaagccccccgccaaggtggaagccaagcctaagaaggccgccgctaaggacaagagcagcgataagaaagtccagaccaagggcaagcggggcgccaaaggcaaacaggccgaggtggccaaccaggagacaaaggaagatctgcctgctgagaacggcgaaaccaagaccgaggaatctccagcttctgacgaggccggagagaaggaggccaaaagcgacagcggctctgagacacctggaacaagcgagagcgccaccccggaatcctatgaacaacttgcaccacaaccgtgtgtgggagaaactttacattctagcctcccacgagacagtgaactgtttgtgcctgaagaggggagcagcgagaaggagagcgaggacgcgccaaaaacatctcctccgacgcctgggaaacatggtttggaacagactggggaggaaaaagtgatggtgactgttcctgacaaaaatccaccttgtccttgctgtggtacccgggtaaactctgtgttgaatctgattgaacatctgaaagtgtcacacgggaaaaggggggtttgttttcggtgtgcaaaatgtggaaaggaaaatagtaactatcacagtgttgtttgtcattttaagaaatgcaggggtccagagacggagaaagccccagctggggagtggatttgtgaggtatgcaacagagattttacaaccaaaattggcctgggacaacacaagagattggcacacccagcagtgagaaatcaggaaaggatcgttgcttcccaaccgaaagaaacatcaaatagaggtgctcacaaaaggtgctggacaaaggaggaggaagaattactaataagactggaggctcagttcgagggaaacaaaaatattaataagcttattgcagaacacataaccaccaaaacagctaagcagatcagtgacaaaaggcgattgctgtccagaaagccagcagaggagccacgtgaggagcctggaacgtgtcatcacaccaggagagcagctgcgagcctgagaacggagcctgagatgagtcatcacgcccaggcagaggacagagataatggacctgggagacgccctctgccaggcagggcagctgccggagggagaacaatggacgagataagacgccaccctgataagggcaacggacagcagagacccaccaagcaaaaatcagaagaacagctgcaggcttactataaaaagacactagaggaacgactttcagctggggcacttaacaccttcccccgagcattcaagcaggtaatggaaggccgggatataaagctagtaatcaatcagacagcgcaggactgcttcggatgcctggaatccataagccaaataagaacggcaacccgagataaaaaggacacggtgacccgggagaaacacccaaagaaaccttttcagaagtggatgaagaagagagcaatcaaaaaaggtaattatcttcggttccagcgtttattttatcttgatagagggaaactggctaaaatcattttagatgatattgaatgcttgtcttgtgacataccactcagtgaaatttattcggtttttaaaacaagatgggaaacaactggtagctttaaaagccttggggactttaaaacttacgggaaggctgacaacactgccttcagagaattaattacggctaaagaaattgagaaaaatgtgcaggaaatgagcaaaggctcggctcccggtccagacgggattactcttggggacgtcgtaaagatggatcccgagttttcccggaccatggagattttcaatttatggttaacaactggtaaaatcccggacatggtgagggggtgcagaaccgttttgattccaaaatcatcaaagccggatcgtttgaaagacattaataactggagacctatcacgatcggttccatcttgctgagactgttctccaggattgtaacagctaggctgagcaaagcgtgccccctgaacccaaggcaaagaggctttatcagagcggcgggatgctctgaaaacttaaaactcctgcaaactataatttggtcggccaaaagagaacacagaccactgggtgttgtattcgtggacatcgccaaggcttttgacaccgtaagccaccagcacatcattcatgctttgcagcaaagagaggtggatccccacatcgtcggtctggtgagcaatatgtacgagaacatcagtacgtatatcaccacaaagaggaacacacacacagacaaaatccagatccgggttggagtaaagcagggtgacccgatgtcgccccttttatttaacctggcaatggaccctctattatgcaagctggaagagagtggcaaaggataccaccgaggacagagcagcatcacagcgatggcatttgcagacgatctggttttgctgagcgactcctgggaaaatatgaatacaaatattagcatactggagaccttctgcaatctgaccggactcaaaacacaggggcaaaagtgccacggcttttacatcaagccgacaaagaagtcttacaccatcaatgactgcgctgcctggactatcaacggcacacccctgaacatgatcgaccccggcgaatctgagaaatacctcggcctgcagtttgacccgtggattggaatagcaaggtccggtctctccacaaaactagatttttggcttcagcggatcgatcaagcaccacttaaacctctgcagaaaactgatattctcaaaacatacaccatccctcggctgatctacatagctgaccactcagaagtgaaaagcgcactactcgaaacccttgaccagaagatccggacagcggtcaaggaatggcttcacctacctccgtgcacctgcgatgccatcctgtactcgagcacgagagacggcggtttgggcatcaccaaattggcaggactgatccccagcgtgcaggcccgtagactgcatcggatcgcacagtcatctgacgatacgatgaaatgcttcatggaaaaagagaaaatggaacagctgcataagaaattgtggattcaagctggaggggacagagagaacataccctcgatttgggaagcaccaccgtcgagtgaaccaccaaacaacgtgagcacaaattcggaatgggaagcaccgacccagaaagataaatttccaaagccttgcaattggaggaaaaacgaattcaaaaaatggaccaaattggcatcccaaggccgcggaattgtaaattttgaaagagacaaaattagtaaccattggatccaatactacagacgcatacctcacaggaaactcctcactgcactacaactcagggccaacgtttaccccacgagagaatttctagccaggggtagacaagaccaatacatcaaggcgtgtaggcactgcgatgcggacaacgaatcctgcgcccacatcatcggcaactgcccagtgacacaggacgcccgaatcaagaggcacaattacatctgcgaactgcttctcgaggaggcgaagaagaaggactgggtagtgttcaaggaaccgcacataagggattccaacaaggaactgtacaaacctgacctgatatttgtgaaggatgggcgtgcacttgtcgtggatgtgacagtacggtatgaagcagccaaatcatcgctggaggaagccgctgcagagaaagtgagaaagtacaaacacctggaaacggaagtaagacatctcacgaatgcaaaggacgttacttttgtgggctttcccctaggagcgcgggggaaatggcaccaagataactttaaacttttgactgagcttggcctctccaaatcgaggcaagtgaaaatggcagagactttttccacagtagcgctcttttcatctgtggacattgtacatatgtttgccagtagggccagaaaatctatggttatgtgataataggctgccttctgcggggcttgccttctggccatgcccttcttctctcccttgcacctgtacctcttggtctttgaataaagcctgagtaggaaggaccggtaaaaaaaaaaaaaaaaaaaaaaaaaaaaaaacgttgactaaaaaaaaaaaaaaaaaaaaaaaaaaaaaaaaaaaaaaaaaaaaaaaaaaaaaaaaaaaaaaaaaaaaaa

SEQ ID NO: 10702 - DNA, 5411 bp, synthetic construct
  source 1..5411: mol_type = other DNA
gaaataagagagaaaagaagagtaagaagaaatataagagaattcgccaccatgagcgccggcagcgccacccaccccggcgccggcggcaggaggagcaagtgggaccagcccgcccccgcccccctgctgttcctgccccccgccgcccccggcggcgaggtgaccagcagcggcggcagccccggcggcaccaccgccgcccctaagaaaaagcggaaggtgaatatcagcggctctagctgcggcagccccaacagcgccgacaccagcagcgacttcaaggacctgtggaccaagctgaaggaatgccacgaccgggaagtgcagggactccaggtgaaggtcaccaaactcaagcaagaaagaatcctggacgcccagagactggaagaattcttcaccaagaaccagcagctgagagagcagcagaaagtgctgcacgagacaatcaaggttctggaagatagactgcgggccggcctgtgcgacagatgcgccgtgaccgaggaacacatgcgcaaaaagcagcaggagttcgagaacattagacagcaaaatctgaaattgatcacagagctgatgaacgagagaaacacactgcaggaggagaacaagaagctgagcgagcagctgcaacagaagatcgagaatgatcagcaacaccaggccgctgagctggaatgtgaagaggacgtgatccccgacagcccaatcacagctttcagcttttctggcgtgaacagactgaggcggaaggaaaacccccacgtgcggtacatcgagcagacccataccaagctggaacacagcgtgtgtgccaacgagatgagaaaggtgtccaagtcctccacccatccccagcacaaccctaacgaaaatgagatcctggtggctgatacctacgaccagtctcagagccctatggccaaggcccacggcaccagctcttatacccctgataagagctccttcaacctggccaccgtggtggccgagacactgggcctgggcgtgcaggaggaaagcgagacacagggcccaatgagccctctgggagatgagctgtaccactgcctggaaggcaaccacaagaaacagccttttgagtccggctccgagactcctggaacaagcgagagcgctacacctgagggcagccctaagagaaaggtgtccagcgccgagggcgctgccaaggaagagcctaaacggagaagcgccagactgagcgccaagccccccgccaaggtggaagccaagcctaagaaggccgccgctaaggacaagagcagcgataagaaagtccagaccaagggcaagcggggcgccaaaggcaaacaggccgaggtggccaaccaggagacaaaggaagatctgcctgctgagaacggcgaaaccaagaccgaggaatctccagcttctgacgaggccggagagaaggaggccaaaagcgacagcggctctgagacacctggaacaagcgagagcgccaccccggaatcctatgaacaacttgcaccacaaccgtgtgtgggagaaactttacattctagcctcccacgagacagtgaactgtttgtgcctgaagaggggagcagcgagaaggagagcgaggacgcgccaaaaacatctcctccgacgcctgggaaacatggtttggaacagactggggaggaaaaagtgatggtgactgttcctgacaaaaatccaccttgtccttgctgtggtacccgggtaaactctgtgttgaatctgattgaacatctgaaagtgtcacacgggaaaaggggggtttgttttcggtgtgcaaaatgtggaaaggaaaatagtaactatcacagtgttgtttgtcattttaagaaatgcaggggtccagagacggagaaagccccagctggggagtggatttgtgaggtatgcaacagagattttacaaccaaaattggcctgggacaacacaagagattggcacacccagcagtgagaaatcaggaaaggatcgttgcttcccaaccgaaagaaacatcaaatagaggtgctcacaaaaggtgctggacaaaggaggaggaagaattactaataagactggaggctcagttcgagggaaacaaaaatattaataagcttattgcagaacacataaccaccaaaacagctaagcagatcagtgacaaaaggcgattgctgtccagaaagccagcagaggagccacgtgaggagcctggaacgtgtcatcacaccaggagagcagctgcgagcctgagaacggagcctgagatgagtcatcacgcccaggcagaggacagagataatggacctgggagacgccctctgccaggcagggcagctgccggagggagaacaatggacgagataagacgccaccctgataagggcaacggacagcagagacccaccaagcaaaaatcagaagaacagctgcaggcttactataaaaagacactagaggaacgactttcagctggggcacttaacaccttcccccgagcattcaagcaggtaatggaaggccgggatataaagctagtaatcaatcagacagcgcaggactgcttcggatgcctggaatccataagccaaataagaacggcaacccgagataaaaaggacacggtgacccgggagaaacacccaaagaaaccttttcagaagtggatgaagaagagagcaatcaaaaaaggtaattatcttcggttccagcgtttattttatcttgatagagggaaactggctaaaatcattttagatgatattgaatgcttgtcttgtgacataccactcagtgaaatttattcggtttttaaaacaagatgggaaacaactggtagctttaaaagccttggggactttaaaacttacgggaaggctgacaacactgccttcagagaattaattacggctaaagaaattgagaaaaatgtgcaggaaatgagcaaaggctcggctcccggtccagacgggattactcttggggacgtcgtaaagatggatcccgagttttcccggaccatggagattttcaatttatggttaacaactggtaaaatcccggacatggtgagggggtgcagaaccgttttgattccaaaatcatcaaagccggatcgtttgaaagacattaataactggagacctatcacgatcggttccatcttgctgagactgttctccaggattgtaacagctaggctgagcaaagcgtgccccctgaacccaaggcaaagaggctttatcagagcggcgggatgctctgaaaacttaaaactcctgcaaactataatttggtcggccaaaagagaacacagaccactgggtgttgtattcgtggacatcgccaaggcttttgacaccgtaagccaccagcacatcattcatgctttgcagcaaagagaggtggatccccacatcgtcggtctggtgagcaatatgtacgagaacatcagtacgtatatcaccacaaagaggaacacacacacagacaaaatccagatccgggttggagtaaagcagggtgacccgatgtcgccccttttatttaacctggcaatggaccctctattatgcaagctggaagagagtggcaaaggataccaccgaggacagagcagcatcacagcgatggcatttgcagacgatctggttttgctgagcgactcctgggaaaatatgaatacaaatattagcatactggagaccttctgcaatctgaccggactcaaaacacaggggcaaaagtgccacggcttttacatcaagccgacaaagaagtcttacaccatcaatgactgcgctgcctggactatcaacggcacacccctgaacatgatcgaccccggcgaatctgagaaatacctcggcctgcagtttgacccgtggattggaatagcaaggtccggtctctccacaaaactagatttttggcttcagcggatcgatcaagcaccacttaaacctctgcagaaaactgatattctcaaaacatacaccatccctcggctgatctacatagctgaccactcagaagtgaaaagcgcactactcgaaacccttgaccagaagatccggacagcggtcaaggaatggcttcacctacctccgtgcacctgcgatgccatcctgtactcgagcacgagagacggcggtttgggcatcaccaaattggcaggactgatccccagcgtgcaggcccgtagactgcatcggatcgcacagtcatctgacgatacgatgaaatgcttcatggaaaaagagaaaatggaacagctgcataagaaattgtggattcaagctggaggggacagagagaacataccctcgatttgggaagcaccaccgtcgagtgaaccaccaaacaacgtgagcacaaattcggaatgggaagcaccgacccagaaagataaatttccaaagccttgcaattggaggaaaaacgaattcaaaaaatggaccaaattggcatcccaaggccgcggaattgtaaattttgaaagagacaaaattagtaaccattggatccaatactacagacgcatacctcacaggaaactcctcactgcactacaactcagggccaacgtttaccccacgagagaatttctagccaggggtagacaagaccaatacatcaaggcgtgtaggcactgcgatgcggacaacgaatcctgcgcccacatcatcggcaactgcccagtgacacaggacgcccgaatcaagaggcacaattacatctgcgaactgcttctcgaggaggcgaagaagaaggactgggtagtgttcaaggaaccgcacataagggattccaacaaggaactgtacaaacctgacctgatatttgtgaaggatgggcgtgcacttgtcgtggatgtgacagtacggtatgaagcagccaaatcatcgctggaggaagccgctgcagagaaagtgagaaagtacaaacacctggaaacggaagtaagacatctcacgaatgcaaaggacgttacttttgtgggctttcccctaggagcgcgggggaaatggcaccaagataactttaaacttttgactgagcttggcctctccaaatcgaggcaagtgaaaatggcagagactttttccacagtagcgctcttttcatctgtggacattgtacatatgtttgccagtagggccagaaaatctatggttatgtgataataggctgccttctgcggggcttgccttctggccatgcccttcttctctcccttgcacctgtacctcttggtctttgaataaagcctgagtaggaaggaccggtaaaaaaaaaaaaaaaaaaaaaaaaaaaaaaacgttgactaaaaaaaaaaaaaaaaaaaaaaaaaaaaaaaaaaaaaaaaaaaaaaaaaaaaaaaaaaaaaaaaaaaaaa

SEQ ID NO: 10703 - DNA, 5690 bp, synthetic construct
  source 1..5690: mol_type = other DNA
gaaataagagagaaaagaagagtaagaagaaatataagagaattcgccaccatggcccaggtgcagccccccgccagcaccggccagagccccatgggcggccccttcatccccgccgcccccgtgaaaaccgccctgcccgccggcccccagccccagccccagccccagccccccctgcccagccagccccaggcccagaagaggaggttcaccgaggagctgcccgacgagagggagagcggcctgctgggctaccagcacggccccatccacatgaccaacctgggcaccggcttcagcagccagaacgagatcgagggcgccggcagcaagcccgccagcagcagcggcaaggagagggagagggacaggcagctgatgcccccccccgccttccccgtgaccggcatcaagaccgagagcgacgagaggaacggcagcggcaccctgaccggcagccacgactaccccgccaagaagcctaagaaaaagcggaaggtgaatatcagcggctctagctgcggcagccccaacagcgccgacaccagcagcgacttcaaggacctgtggaccaagctgaaggaatgccacgaccgggaagtgcagggactccaggtgaaggtcaccaaactcaagcaagaaagaatcctggacgcccagagactggaagaattcttcaccaagaaccagcagctgagagagcagcagaaagtgctgcacgagacaatcaaggttctggaagatagactgcgggccggcctgtgcgacagatgcgccgtgaccgaggaacacatgcgcaaaaagcagcaggagttcgagaacattagacagcaaaatctgaaattgatcacagagctgatgaacgagagaaacacactgcaggaggagaacaagaagctgagcgagcagctgcaacagaagatcgagaatgatcagcaacaccaggccgctgagctggaatgtgaagaggacgtgatccccgacagcccaatcacagctttcagcttttctggcgtgaacagactgaggcggaaggaaaacccccacgtgcggtacatcgagcagacccataccaagctggaacacagcgtgtgtgccaacgagatgagaaaggtgtccaagtcctccacccatccccagcacaaccctaacgaaaatgagatcctggtggctgatacctacgaccagtctcagagccctatggccaaggcccacggcaccagctcttatacccctgataagagctccttcaacctggccaccgtggtggccgagacactgggcctgggcgtgcaggaggaaagcgagacacagggcccaatgagccctctgggagatgagctgtaccactgcctggaaggcaaccacaagaaacagccttttgagtccggctccgagactcctggaacaagcgagagcgctacacctgagggcagccctaagagaaaggtgtccagcgccgagggcgctgccaaggaagagcctaaacggagaagcgccagactgagcgccaagccccccgccaaggtggaagccaagcctaagaaggccgccgctaaggacaagagcagcgataagaaagtccagaccaagggcaagcggggcgccaaaggcaaacaggccgaggtggccaaccaggagacaaaggaagatctgcctgctgagaacggcgaaaccaagaccgaggaatctccagcttctgacgaggccggagagaaggaggccaaaagcgacagcggctctgagacacctggaacaagcgagagcgccaccccggaatcctatgaacaacttgcaccacaaccgtgtgtgggagaaactttacattctagcctcccacgagacagtgaactgtttgtgcctgaagaggggagcagcgagaaggagagcgaggacgcgccaaaaacatctcctccgacgcctgggaaacatggtttggaacagactggggaggaaaaagtgatggtgactgttcctgacaaaaatccaccttgtccttgctgtggtacccgggtaaactctgtgttgaatctgattgaacatctgaaagtgtcacacgggaaaaggggggtttgttttcggtgtgcaaaatgtggaaaggaaaatagtaactatcacagtgttgtttgtcattttaagaaatgcaggggtccagagacggagaaagccccagctggggagtggatttgtgaggtatgcaacagagattttacaaccaaaattggcctgggacaacacaagagattggcacacccagcagtgagaaatcaggaaaggatcgttgcttcccaaccgaaagaaacatcaaatagaggtgctcacaaaaggtgctggacaaaggaggaggaagaattactaataagactggaggctcagttcgagggaaacaaaaatattaataagcttattgcagaacacataaccaccaaaacagctaagcagatcagtgacaaaaggcgattgctgtccagaaagccagcagaggagccacgtgaggagcctggaacgtgtcatcacaccaggagagcagctgcgagcctgagaacggagcctgagatgagtcatcacgcccaggcagaggacagagataatggacctgggagacgccctctgccaggcagggcagctgccggagggagaacaatggacgagataagacgccaccctgataagggcaacggacagcagagacccaccaagcaaaaatcagaagaacagctgcaggcttactataaaaagacactagaggaacgactttcagctggggcacttaacaccttcccccgagcattcaagcaggtaatggaaggccgggatataaagctagtaatcaatcagacagcgcaggactgcttcggatgcctggaatccataagccaaataagaacggcaacccgagataaaaaggacacggtgacccgggagaaacacccaaagaaaccttttcagaagtggatgaagaagagagcaatcaaaaaaggtaattatcttcggttccagcgtttattttatcttgatagagggaaactggctaaaatcattttagatgatattgaatgcttgtcttgtgacataccactcagtgaaatttattcggtttttaaaacaagatgggaaacaactggtagctttaaaagccttggggactttaaaacttacgggaaggctgacaacactgccttcagagaattaattacggctaaagaaattgagaaaaatgtgcaggaaatgagcaaaggctcggctcccggtccagacgggattactcttggggacgtcgtaaagatggatcccgagttttcccggaccatggagattttcaatttatggttaacaactggtaaaatcccggacatggtgagggggtgcagaaccgttttgattccaaaatcatcaaagccggatcgtttgaaagacattaataactggagacctatcacgatcggttccatcttgctgagactgttctccaggattgtaacagctaggctgagcaaagcgtgccccctgaacccaaggcaaagaggctttatcagagcggcgggatgctctgaaaacttaaaactcctgcaaactataatttggtcggccaaaagagaacacagaccactgggtgttgtattcgtggacatcgccaaggcttttgacaccgtaagccaccagcacatcattcatgctttgcagcaaagagaggtggatccccacatcgtcggtctggtgagcaatatgtacgagaacatcagtacgtatatcaccacaaagaggaacacacacacagacaaaatccagatccgggttggagtaaagcagggtgacccgatgtcgccccttttatttaacctggcaatggaccctctattatgcaagctggaagagagtggcaaaggataccaccgaggacagagcagcatcacagcgatggcatttgcagacgatctggttttgctgagcgactcctgggaaaatatgaatacaaatattagcatactggagaccttctgcaatctgaccggactcaaaacacaggggcaaaagtgccacggcttttacatcaagccgacaaagaagtcttacaccatcaatgactgcgctgcctggactatcaacggcacacccctgaacatgatcgaccccggcgaatctgagaaatacctcggcctgcagtttgacccgtggattggaatagcaaggtccggtctctccacaaaactagatttttggcttcagcggatcgatcaagcaccacttaaacctctgcagaaaactgatattctcaaaacatacaccatccctcggctgatctacatagctgaccactcagaagtgaaaagcgcactactcgaaacccttgaccagaagatccggacagcggtcaaggaatggcttcacctacctccgtgcacctgcgatgccatcctgtactcgagcacgagagacggcggtttgggcatcaccaaattggcaggactgatccccagcgtgcaggcccgtagactgcatcggatcgcacagtcatctgacgatacgatgaaatgcttcatggaaaaagagaaaatggaacagctgcataagaaattgtggattcaagctggaggggacagagagaacataccctcgatttgggaagcaccaccgtcgagtgaaccaccaaacaacgtgagcacaaattcggaatgggaagcaccgacccagaaagataaatttccaaagccttgcaattggaggaaaaacgaattcaaaaaatggaccaaattggcatcccaaggccgcggaattgtaaattttgaaagagacaaaattagtaaccattggatccaatactacagacgcatacctcacaggaaactcctcactgcactacaactcagggccaacgtttaccccacgagagaatttctagccaggggtagacaagaccaatacatcaaggcgtgtaggcactgcgatgcggacaacgaatcctgcgcccacatcatcggcaactgcccagtgacacaggacgcccgaatcaagaggcacaattacatctgcgaactgcttctcgaggaggcgaagaagaaggactgggtagtgttcaaggaaccgcacataagggattccaacaaggaactgtacaaacctgacctgatatttgtgaaggatgggcgtgcacttgtcgtggatgtgacagtacggtatgaagcagccaaatcatcgctggaggaagccgctgcagagaaagtgagaaagtacaaacacctggaaacggaagtaagacatctcacgaatgcaaaggacgttacttttgtgggctttcccctaggagcgcgggggaaatggcaccaagataactttaaacttttgactgagcttggcctctccaaatcgaggcaagtgaaaatggcagagactttttccacagtagcgctcttttcatctgtggacattgtacatatgtttgccagtagggccagaaaatctatggttatgtgataataggctgccttctgcggggcttgccttctggccatgcccttcttctctcccttgcacctgtacctcttggtctttgaataaagcctgagtaggaaggaccggtaaaaaaaaaaaaaaaaaaaaaaaaaaaaaaacgttgactaaaaaaaaaaaaaaaaaaaaaaaaaaaaaaaaaaaaaaaaaaaaaaaaaaaaaaaaaaaaaaaaaaaaaa

SEQ ID NO: 10704 - DNA, 5408 bp, synthetic construct
  source 1..5408: mol_type = other DNA
gaaataagagagaaaagaagagtaagaagaaatataagagaattcgccaccatggcctacgccgccgacagcagcgacgaggaggaggagcacggcggccacaagaacgccagcagcttcccccagggctggagcctgggctaccagtaccccagcagccagcccagggccaagcagcagatgcccttctggatggccccccctaagaaaaagcggaaggtgaatatcagcggctctagctgcggcagccccaacagcgccgacaccagcagcgacttcaaggacctgtggaccaagctgaaggaatgccacgaccgggaagtgcagggactccaggtgaaggtcaccaaactcaagcaagaaagaatcctggacgcccagagactggaagaattcttcaccaagaaccagcagctgagagagcagcagaaagtgctgcacgagacaatcaaggttctggaagatagactgcgggccggcctgtgcgacagatgcgccgtgaccgaggaacacatgcgcaaaaagcagcaggagttcgagaacattagacagcaaaatctgaaattgatcacagagctgatgaacgagagaaacacactgcaggaggagaacaagaagctgagcgagcagctgcaacagaagatcgagaatgatcagcaacaccaggccgctgagctggaatgtgaagaggacgtgatccccgacagcccaatcacagctttcagcttttctggcgtgaacagactgaggcggaaggaaaacccccacgtgcggtacatcgagcagacccataccaagctggaacacagcgtgtgtgccaacgagatgagaaaggtgtccaagtcctccacccatccccagcacaaccctaacgaaaatgagatcctggtggctgatacctacgaccagtctcagagccctatggccaaggcccacggcaccagctcttatacccctgataagagctccttcaacctggccaccgtggtggccgagacactgggcctgggcgtgcaggaggaaagcgagacacagggcccaatgagccctctgggagatgagctgtaccactgcctggaaggcaaccacaagaaacagccttttgagtccggctccgagactcctggaacaagcgagagcgctacacctgagggcagccctaagagaaaggtgtccagcgccgagggcgctgccaaggaagagcctaaacggagaagcgccagactgagcgccaagccccccgccaaggtggaagccaagcctaagaaggccgccgctaaggacaagagcagcgataagaaagtccagaccaagggcaagcggggcgccaaaggcaaacaggccgaggtggccaaccaggagacaaaggaagatctgcctgctgagaacggcgaaaccaagaccgaggaatctccagcttctgacgaggccggagagaaggaggccaaaagcgacagcggctctgagacacctggaacaagcgagagcgccaccccggaatcctatgaacaacttgcaccacaaccgtgtgtgggagaaactttacattctagcctcccacgagacagtgaactgtttgtgcctgaagaggggagcagcgagaaggagagcgaggacgcgccaaaaacatctcctccgacgcctgggaaacatggtttggaacagactggggaggaaaaagtgatggtgactgttcctgacaaaaatccaccttgtccttgctgtggtacccgggtaaactctgtgttgaatctgattgaacatctgaaagtgtcacacgggaaaaggggggtttgttttcggtgtgcaaaatgtggaaaggaaaatagtaactatcacagtgttgtttgtcattttaagaaatgcaggggtccagagacggagaaagccccagctggggagtggatttgtgaggtatgcaacagagattttacaaccaaaattggcctgggacaacacaagagattggcacacccagcagtgagaaatcaggaaaggatcgttgcttcccaaccgaaagaaacatcaaatagaggtgctcacaaaaggtgctggacaaaggaggaggaagaattactaataagactggaggctcagttcgagggaaacaaaaatattaataagcttattgcagaacacataaccaccaaaacagctaagcagatcagtgacaaaaggcgattgctgtccagaaagccagcagaggagccacgtgaggagcctggaacgtgtcatcacaccaggagagcagctgcgagcctgagaacggagcctgagatgagtcatcacgcccaggcagaggacagagataatggacctgggagacgccctctgccaggcagggcagctgccggagggagaacaatggacgagataagacgccaccctgataagggcaacggacagcagagacccaccaagcaaaaatcagaagaacagctgcaggcttactataaaaagacactagaggaacgactttcagctggggcacttaacaccttcccccgagcattcaagcaggtaatggaaggccgggatataaagctagtaatcaatcagacagcgcaggactgcttcggatgcctggaatccataagccaaataagaacggcaacccgagataaaaaggacacggtgacccgggagaaacacccaaagaaaccttttcagaagtggatgaagaagagagcaatcaaaaaaggtaattatcttcggttccagcgtttattttatcttgatagagggaaactggctaaaatcattttagatgatattgaatgcttgtcttgtgacataccactcagtgaaatttattcggtttttaaaacaagatgggaaacaactggtagctttaaaagccttggggactttaaaacttacgggaaggctgacaacactgccttcagagaattaattacggctaaagaaattgagaaaaatgtgcaggaaatgagcaaaggctcggctcccggtccagacgggattactcttggggacgtcgtaaagatggatcccgagttttcccggaccatggagattttcaatttatggttaacaactggtaaaatcccggacatggtgagggggtgcagaaccgttttgattccaaaatcatcaaagccggatcgtttgaaagacattaataactggagacctatcacgatcggttccatcttgctgagactgttctccaggattgtaacagctaggctgagcaaagcgtgccccctgaacccaaggcaaagaggctttatcagagcggcgggatgctctgaaaacttaaaactcctgcaaactataatttggtcggccaaaagagaacacagaccactgggtgttgtattcgtggacatcgccaaggcttttgacaccgtaagccaccagcacatcattcatgctttgcagcaaagagaggtggatccccacatcgtcggtctggtgagcaatatgtacgagaacatcagtacgtatatcaccacaaagaggaacacacacacagacaaaatccagatccgggttggagtaaagcagggtgacccgatgtcgccccttttatttaacctggcaatggaccctctattatgcaagctggaagagagtggcaaaggataccaccgaggacagagcagcatcacagcgatggcatttgcagacgatctggttttgctgagcgactcctgggaaaatatgaatacaaatattagcatactggagaccttctgcaatctgaccggactcaaaacacaggggcaaaagtgccacggcttttacatcaagccgacaaagaagtcttacaccatcaatgactgcgctgcctggactatcaacggcacacccctgaacatgatcgaccccggcgaatctgagaaatacctcggcctgcagtttgacccgtggattggaatagcaaggtccggtctctccacaaaactagatttttggcttcagcggatcgatcaagcaccacttaaacctctgcagaaaactgatattctcaaaacatacaccatccctcggctgatctacatagctgaccactcagaagtgaaaagcgcactactcgaaacccttgaccagaagatccggacagcggtcaaggaatggcttcacctacctccgtgcacctgcgatgccatcctgtactcgagcacgagagacggcggtttgggcatcaccaaattggcaggactgatccccagcgtgcaggcccgtagactgcatcggatcgcacagtcatctgacgatacgatgaaatgcttcatggaaaaagagaaaatggaacagctgcataagaaattgtggattcaagctggaggggacagagagaacataccctcgatttgggaagcaccaccgtcgagtgaaccaccaaacaacgtgagcacaaattcggaatgggaagcaccgacccagaaagataaatttccaaagccttgcaattggaggaaaaacgaattcaaaaaatggaccaaattggcatcccaaggccgcggaattgtaaattttgaaagagacaaaattagtaaccattggatccaatactacagacgcatacctcacaggaaactcctcactgcactacaactcagggccaacgtttaccccacgagagaatttctagccaggggtagacaagaccaatacatcaaggcgtgtaggcactgcgatgcggacaacgaatcctgcgcccacatcatcggcaactgcccagtgacacaggacgcccgaatcaagaggcacaattacatctgcgaactgcttctcgaggaggcgaagaagaaggactgggtagtgttcaaggaaccgcacataagggattccaacaaggaactgtacaaacctgacctgatatttgtgaaggatgggcgtgcacttgtcgtggatgtgacagtacggtatgaagcagccaaatcatcgctggaggaagccgctgcagagaaagtgagaaagtacaaacacctggaaacggaagtaagacatctcacgaatgcaaaggacgttacttttgtgggctttcccctaggagcgcgggggaaatggcaccaagataactttaaacttttgactgagcttggcctctccaaatcgaggcaagtgaaaatggcagagactttttccacagtagcgctcttttcatctgtggacattgtacatatgtttgccagtagggccagaaaatctatggttatgtgataataggctgccttctgcggggcttgccttctggccatgcccttcttctctcccttgcacctgtacctcttggtctttgaataaagcctgagtaggaaggaccggtaaaaaaaaaaaaaaaaaaaaaaaaaaaaaaacgttgactaaaaaaaaaaaaaaaaaaaaaaaaaaaaaaaaaaaaaaaaaaaaaaaaaaaaaaaaaaaaaaaaaaaaaa

SEQ ID NO: 10705 - DNA, 6275 bp, synthetic construct
  source 1..6275: mol_type = other DNA
gaaataagagagaaaagaagagtaagaagaaatataagagaattcgccaccatgagcagcaggcccggcagggaggacgtgggcgccgccggcgccaggaggcccagggagccccccgagcaggagctgcagaggaggagggagcagaagaggaggaggcacgacgcccagcagctgcagcagctgaagcacctggagagcttctacgagaagcccccccccggcctgatcaaggaggacgagaccaagcccgaggactgcatccccgacgtgcccggcatggccaggggccccaagaagcacctgaagagggtggccgcccccaagcactggatgctggacaagctgaccggcgtgttcgcccccaggcccagcaccggcccccacaagctgagggagtgcctgcccctgatcgtgttcctgaggaacaggctgaagtacgccctgaccggcgacgaggtgaagaagatctgcatgcagcacttcctgaagatcgacggcaaggtgagggtggacatcacctaccccgccggcttcatcgacgtgatcagcatcgagaaaaccggcgagcacttcaggctggtgtacaacaccaagggctgcttcgccgtgcacaggatcaccgtggaggaggccaagtacaagctgtgcaaggtgaggaagatcaccgtgggcaccaagggcatcccccacctggtgacccacgacgccaggaccatcaggtaccccgaccccctgatcaaggtgaacgacaccgtgcagatcgacctgggcaccggcaagatcaccagcttcatcaagttcgacaccggcaacgtgtgcatggtgatcgccggcgccaacctgggcagggtgggcgtgatcaccaacagggagaggcaccccggcagctgcgacgtggtgcacgtgaaggacgccaacggcaacagcttcgccaccaggatcagcaacatcttcgtgatcggcaacggcaacaagccctggatcagcctgcccaggggcaagggcatcaggctgaccatcgccgaggagagggacaagaggctggccgccaagcagagcagcggccctaagaaaaagcggaaggtgaatatcagcggctctagctgcggcagccccaacagcgccgacaccagcagcgacttcaaggacctgtggaccaagctgaaggaatgccacgaccgggaagtgcagggactccaggtgaaggtcaccaaactcaagcaagaaagaatcctggacgcccagagactggaagaattcttcaccaagaaccagcagctgagagagcagcagaaagtgctgcacgagacaatcaaggttctggaagatagactgcgggccggcctgtgcgacagatgcgccgtgaccgaggaacacatgcgcaaaaagcagcaggagttcgagaacattagacagcaaaatctgaaattgatcacagagctgatgaacgagagaaacacactgcaggaggagaacaagaagctgagcgagcagctgcaacagaagatcgagaatgatcagcaacaccaggccgctgagctggaatgtgaagaggacgtgatccccgacagcccaatcacagctttcagcttttctggcgtgaacagactgaggcggaaggaaaacccccacgtgcggtacatcgagcagacccataccaagctggaacacagcgtgtgtgccaacgagatgagaaaggtgtccaagtcctccacccatccccagcacaaccctaacgaaaatgagatcctggtggctgatacctacgaccagtctcagagccctatggccaaggcccacggcaccagctcttatacccctgataagagctccttcaacctggccaccgtggtggccgagacactgggcctgggcgtgcaggaggaaagcgagacacagggcccaatgagccctctgggagatgagctgtaccactgcctggaaggcaaccacaagaaacagccttttgagtccggctccgagactcctggaacaagcgagagcgctacacctgagggcagccctaagagaaaggtgtccagcgccgagggcgctgccaaggaagagcctaaacggagaagcgccagactgagcgccaagccccccgccaaggtggaagccaagcctaagaaggccgccgctaaggacaagagcagcgataagaaagtccagaccaagggcaagcggggcgccaaaggcaaacaggccgaggtggccaaccaggagacaaaggaagatctgcctgctgagaacggcgaaaccaagaccgaggaatctccagcttctgacgaggccggagagaaggaggccaaaagcgacagcggctctgagacacctggaacaagcgagagcgccaccccggaatcctatgaacaacttgcaccacaaccgtgtgtgggagaaactttacattctagcctcccacgagacagtgaactgtttgtgcctgaagaggggagcagcgagaaggagagcgaggacgcgccaaaaacatctcctccgacgcctgggaaacatggtttggaacagactggggaggaaaaagtgatggtgactgttcctgacaaaaatccaccttgtccttgctgtggtacccgggtaaactctgtgttgaatctgattgaacatctgaaagtgtcacacgggaaaaggggggtttgttttcggtgtgcaaaatgtggaaaggaaaatagtaactatcacagtgttgtttgtcattttaagaaatgcaggggtccagagacggagaaagccccagctggggagtggatttgtgaggtatgcaacagagattttacaaccaaaattggcctgggacaacacaagagattggcacacccagcagtgagaaatcaggaaaggatcgttgcttcccaaccgaaagaaacatcaaatagaggtgctcacaaaaggtgctggacaaaggaggaggaagaattactaataagactggaggctcagttcgagggaaacaaaaatattaataagcttattgcagaacacataaccaccaaaacagctaagcagatcagtgacaaaaggcgattgctgtccagaaagccagcagaggagccacgtgaggagcctggaacgtgtcatcacaccaggagagcagctgcgagcctgagaacggagcctgagatgagtcatcacgcccaggcagaggacagagataatggacctgggagacgccctctgccaggcagggcagctgccggagggagaacaatggacgagataagacgccaccctgataagggcaacggacagcagagacccaccaagcaaaaatcagaagaacagctgcaggcttactataaaaagacactagaggaacgactttcagctggggcacttaacaccttcccccgagcattcaagcaggtaatggaaggccgggatataaagctagtaatcaatcagacagcgcaggactgcttcggatgcctggaatccataagccaaataagaacggcaacccgagataaaaaggacacggtgacccgggagaaacacccaaagaaaccttttcagaagtggatgaagaagagagcaatcaaaaaaggtaattatcttcggttccagcgtttattttatcttgatagagggaaactggctaaaatcattttagatgatattgaatgcttgtcttgtgacataccactcagtgaaatttattcggtttttaaaacaagatgggaaacaactggtagctttaaaagccttggggactttaaaacttacgggaaggctgacaacactgccttcagagaattaattacggctaaagaaattgagaaaaatgtgcaggaaatgagcaaaggctcggctcccggtccagacgggattactcttggggacgtcgtaaagatggatcccgagttttcccggaccatggagattttcaatttatggttaacaactggtaaaatcccggacatggtgagggggtgcagaaccgttttgattccaaaatcatcaaagccggatcgtttgaaagacattaataactggagacctatcacgatcggttccatcttgctgagactgttctccaggattgtaacagctaggctgagcaaagcgtgccccctgaacccaaggcaaagaggctttatcagagcggcgggatgctctgaaaacttaaaactcctgcaaactataatttggtcggccaaaagagaacacagaccactgggtgttgtattcgtggacatcgccaaggcttttgacaccgtaagccaccagcacatcattcatgctttgcagcaaagagaggtggatccccacatcgtcggtctggtgagcaatatgtacgagaacatcagtacgtatatcaccacaaagaggaacacacacacagacaaaatccagatccgggttggagtaaagcagggtgacccgatgtcgccccttttatttaacctggcaatggaccctctattatgcaagctggaagagagtggcaaaggataccaccgaggacagagcagcatcacagcgatggcatttgcagacgatctggttttgctgagcgactcctgggaaaatatgaatacaaatattagcatactggagaccttctgcaatctgaccggactcaaaacacaggggcaaaagtgccacggcttttacatcaagccgacaaagaagtcttacaccatcaatgactgcgctgcctggactatcaacggcacacccctgaacatgatcgaccccggcgaatctgagaaatacctcggcctgcagtttgacccgtggattggaatagcaaggtccggtctctccacaaaactagatttttggcttcagcggatcgatcaagcaccacttaaacctctgcagaaaactgatattctcaaaacatacaccatccctcggctgatctacatagctgaccactcagaagtgaaaagcgcactactcgaaacccttgaccagaagatccggacagcggtcaaggaatggcttcacctacctccgtgcacctgcgatgccatcctgtactcgagcacgagagacggcggtttgggcatcaccaaattggcaggactgatccccagcgtgcaggcccgtagactgcatcggatcgcacagtcatctgacgatacgatgaaatgcttcatggaaaaagagaaaatggaacagctgcataagaaattgtggattcaagctggaggggacagagagaacataccctcgatttgggaagcaccaccgtcgagtgaaccaccaaacaacgtgagcacaaattcggaatgggaagcaccgacccagaaagataaatttccaaagccttgcaattggaggaaaaacgaattcaaaaaatggaccaaattggcatcccaaggccgcggaattgtaaattttgaaagagacaaaattagtaaccattggatccaatactacagacgcatacctcacaggaaactcctcactgcactacaactcagggccaacgtttaccccacgagagaatttctagccaggggtagacaagaccaatacatcaaggcgtgtaggcactgcgatgcggacaacgaatcctgcgcccacatcatcggcaactgcccagtgacacaggacgcccgaatcaagaggcacaattacatctgcgaactgcttctcgaggaggcgaagaagaaggactgggtagtgttcaaggaaccgcacataagggattccaacaaggaactgtacaaacctgacctgatatttgtgaaggatgggcgtgcacttgtcgtggatgtgacagtacggtatgaagcagccaaatcatcgctggaggaagccgctgcagagaaagtgagaaagtacaaacacctggaaacggaagtaagacatctcacgaatgcaaaggacgttacttttgtgggctttcccctaggagcgcgggggaaatggcaccaagataactttaaacttttgactgagcttggcctctccaaatcgaggcaagtgaaaatggcagagactttttccacagtagcgctcttttcatctgtggacattgtacatatgtttgccagtagggccagaaaatctatggttatgtgataataggctgccttctgcggggcttgccttctggccatgcccttcttctctcccttgcacctgtacctcttggtctttgaataaagcctgagtaggaaggaccggtaaaaaaaaaaaaaaaaaaaaaaaaaaaaaaacgttgactaaaaaaaaaaaaaaaaaaaaaaaaaaaaaaaaaaaaaaaaaaaaaaaaaaaaaaaaaaaaaaaaaaaaaa

SEQ ID NO: 10706 - DNA, 5489 bp, synthetic construct
  source 1..5489: mol_type = other DNA
gaaataagagagaaaagaagagtaagaagaaatataagagaattcgccaccatggccgacaacaagaggcacgagaaggacgtgaggatccagcagctgaagcagctgctggaggacagcaccagcgacgaggacaggagcagcagcagcagcagcgagggcaaggagaagcacaagaagaagaagaagaaggagaagcacaagaagaggaagaaggagaagaagaagaagaagaagaggaagcacaagagcagcaagagcaacgagggcagcgacagcgagcctaagaaaaagcggaaggtgaatatcagcggctctagctgcggcagccccaacagcgccgacaccagcagcgacttcaaggacctgtggaccaagctgaaggaatgccacgaccgggaagtgcagggactccaggtgaaggtcaccaaactcaagcaagaaagaatcctggacgcccagagactggaagaattcttcaccaagaaccagcagctgagagagcagcagaaagtgctgcacgagacaatcaaggttctggaagatagactgcgggccggcctgtgcgacagatgcgccgtgaccgaggaacacatgcgcaaaaagcagcaggagttcgagaacattagacagcaaaatctgaaattgatcacagagctgatgaacgagagaaacacactgcaggaggagaacaagaagctgagcgagcagctgcaacagaagatcgagaatgatcagcaacaccaggccgctgagctggaatgtgaagaggacgtgatccccgacagcccaatcacagctttcagcttttctggcgtgaacagactgaggcggaaggaaaacccccacgtgcggtacatcgagcagacccataccaagctggaacacagcgtgtgtgccaacgagatgagaaaggtgtccaagtcctccacccatccccagcacaaccctaacgaaaatgagatcctggtggctgatacctacgaccagtctcagagccctatggccaaggcccacggcaccagctcttatacccctgataagagctccttcaacctggccaccgtggtggccgagacactgggcctgggcgtgcaggaggaaagcgagacacagggcccaatgagccctctgggagatgagctgtaccactgcctggaaggcaaccacaagaaacagccttttgagtccggctccgagactcctggaacaagcgagagcgctacacctgagggcagccctaagagaaaggtgtccagcgccgagggcgctgccaaggaagagcctaaacggagaagcgccagactgagcgccaagccccccgccaaggtggaagccaagcctaagaaggccgccgctaaggacaagagcagcgataagaaagtccagaccaagggcaagcggggcgccaaaggcaaacaggccgaggtggccaaccaggagacaaaggaagatctgcctgctgagaacggcgaaaccaagaccgaggaatctccagcttctgacgaggccggagagaaggaggccaaaagcgacagcggctctgagacacctggaacaagcgagagcgccaccccggaatcctatgaacaacttgcaccacaaccgtgtgtgggagaaactttacattctagcctcccacgagacagtgaactgtttgtgcctgaagaggggagcagcgagaaggagagcgaggacgcgccaaaaacatctcctccgacgcctgggaaacatggtttggaacagactggggaggaaaaagtgatggtgactgttcctgacaaaaatccaccttgtccttgctgtggtacccgggtaaactctgtgttgaatctgattgaacatctgaaagtgtcacacgggaaaaggggggtttgttttcggtgtgcaaaatgtggaaaggaaaatagtaactatcacagtgttgtttgtcattttaagaaatgcaggggtccagagacggagaaagccccagctggggagtggatttgtgaggtatgcaacagagattttacaaccaaaattggcctgggacaacacaagagattggcacacccagcagtgagaaatcaggaaaggatcgttgcttcccaaccgaaagaaacatcaaatagaggtgctcacaaaaggtgctggacaaaggaggaggaagaattactaataagactggaggctcagttcgagggaaacaaaaatattaataagcttattgcagaacacataaccaccaaaacagctaagcagatcagtgacaaaaggcgattgctgtccagaaagccagcagaggagccacgtgaggagcctggaacgtgtcatcacaccaggagagcagctgcgagcctgagaacggagcctgagatgagtcatcacgcccaggcagaggacagagataatggacctgggagacgccctctgccaggcagggcagctgccggagggagaacaatggacgagataagacgccaccctgataagggcaacggacagcagagacccaccaagcaaaaatcagaagaacagctgcaggcttactataaaaagacactagaggaacgactttcagctggggcacttaacaccttcccccgagcattcaagcaggtaatggaaggccgggatataaagctagtaatcaatcagacagcgcaggactgcttcggatgcctggaatccataagccaaataagaacggcaacccgagataaaaaggacacggtgacccgggagaaacacccaaagaaaccttttcagaagtggatgaagaagagagcaatcaaaaaaggtaattatcttcggttccagcgtttattttatcttgatagagggaaactggctaaaatcattttagatgatattgaatgcttgtcttgtgacataccactcagtgaaatttattcggtttttaaaacaagatgggaaacaactggtagctttaaaagccttggggactttaaaacttacgggaaggctgacaacactgccttcagagaattaattacggctaaagaaattgagaaaaatgtgcaggaaatgagcaaaggctcggctcccggtccagacgggattactcttggggacgtcgtaaagatggatcccgagttttcccggaccatggagattttcaatttatggttaacaactggtaaaatcccggacatggtgagggggtgcagaaccgttttgattccaaaatcatcaaagccggatcgtttgaaagacattaataactggagacctatcacgatcggttccatcttgctgagactgttctccaggattgtaacagctaggctgagcaaagcgtgccccctgaacccaaggcaaagaggctttatcagagcggcgggatgctctgaaaacttaaaactcctgcaaactataatttggtcggccaaaagagaacacagaccactgggtgttgtattcgtggacatcgccaaggcttttgacaccgtaagccaccagcacatcattcatgctttgcagcaaagagaggtggatccccacatcgtcggtctggtgagcaatatgtacgagaacatcagtacgtatatcaccacaaagaggaacacacacacagacaaaatccagatccgggttggagtaaagcagggtgacccgatgtcgccccttttatttaacctggcaatggaccctctattatgcaagctggaagagagtggcaaaggataccaccgaggacagagcagcatcacagcgatggcatttgcagacgatctggttttgctgagcgactcctgggaaaatatgaatacaaatattagcatactggagaccttctgcaatctgaccggactcaaaacacaggggcaaaagtgccacggcttttacatcaagccgacaaagaagtcttacaccatcaatgactgcgctgcctggactatcaacggcacacccctgaacatgatcgaccccggcgaatctgagaaatacctcggcctgcagtttgacccgtggattggaatagcaaggtccggtctctccacaaaactagatttttggcttcagcggatcgatcaagcaccacttaaacctctgcagaaaactgatattctcaaaacatacaccatccctcggctgatctacatagctgaccactcagaagtgaaaagcgcactactcgaaacccttgaccagaagatccggacagcggtcaaggaatggcttcacctacctccgtgcacctgcgatgccatcctgtactcgagcacgagagacggcggtttgggcatcaccaaattggcaggactgatccccagcgtgcaggcccgtagactgcatcggatcgcacagtcatctgacgatacgatgaaatgcttcatggaaaaagagaaaatggaacagctgcataagaaattgtggattcaagctggaggggacagagagaacataccctcgatttgggaagcaccaccgtcgagtgaaccaccaaacaacgtgagcacaaattcggaatgggaagcaccgacccagaaagataaatttccaaagccttgcaattggaggaaaaacgaattcaaaaaatggaccaaattggcatcccaaggccgcggaattgtaaattttgaaagagacaaaattagtaaccattggatccaatactacagacgcatacctcacaggaaactcctcactgcactacaactcagggccaacgtttaccccacgagagaatttctagccaggggtagacaagaccaatacatcaaggcgtgtaggcactgcgatgcggacaacgaatcctgcgcccacatcatcggcaactgcccagtgacacaggacgcccgaatcaagaggcacaattacatctgcgaactgcttctcgaggaggcgaagaagaaggactgggtagtgttcaaggaaccgcacataagggattccaacaaggaactgtacaaacctgacctgatatttgtgaaggatgggcgtgcacttgtcgtggatgtgacagtacggtatgaagcagccaaatcatcgctggaggaagccgctgcagagaaagtgagaaagtacaaacacctggaaacggaagtaagacatctcacgaatgcaaaggacgttacttttgtgggctttcccctaggagcgcgggggaaatggcaccaagataactttaaacttttgactgagcttggcctctccaaatcgaggcaagtgaaaatggcagagactttttccacagtagcgctcttttcatctgtggacattgtacatatgtttgccagtagggccagaaaatctatggttatgtgataataggctgccttctgcggggcttgccttctggccatgcccttcttctctcccttgcacctgtacctcttggtctttgaataaagcctgagtaggaaggaccggtaaaaaaaaaaaaaaaaaaaaaaaaaaaaaaacgttgactaaaaaaaaaaaaaaaaaaaaaaaaaaaaaaaaaaaaaaaaaaaaaaaaaaaaaaaaaaaaaaaaaaaaaa

SEQ ID NO: 10707 - DNA, 5633 bp, synthetic construct
  source 1..5633: mol_type = other DNA
gaaataagagagaaaagaagagtaagaagaaatataagagaattcgccaccatggccgtggccgacctggccctgatccccgacgtggacatcgacagcgacggcgtgttcaagtacgtgctgatcagggtgcacagcgcccccaggagcggcgcccccgccgccgagagcaaggagatcgtgaggggctacaagtgggccgagtaccacgccgacatctacgacaaggtgagcggcgacatgcagaagcagggctgcgactgcgagtgcctgggcggcggcaggatcagccaccagagccaggacaagaagatccacgtgtacggctacagcatggcctacggccccgcccagcacgccatcagcaccgagaagatcaaggccaagtaccccgactacgaggtgacctgggccaacgacggctaccctaagaaaaagcggaaggtgaatatcagcggctctagctgcggcagccccaacagcgccgacaccagcagcgacttcaaggacctgtggaccaagctgaaggaatgccacgaccgggaagtgcagggactccaggtgaaggtcaccaaactcaagcaagaaagaatcctggacgcccagagactggaagaattcttcaccaagaaccagcagctgagagagcagcagaaagtgctgcacgagacaatcaaggttctggaagatagactgcgggccggcctgtgcgacagatgcgccgtgaccgaggaacacatgcgcaaaaagcagcaggagttcgagaacattagacagcaaaatctgaaattgatcacagagctgatgaacgagagaaacacactgcaggaggagaacaagaagctgagcgagcagctgcaacagaagatcgagaatgatcagcaacaccaggccgctgagctggaatgtgaagaggacgtgatccccgacagcccaatcacagctttcagcttttctggcgtgaacagactgaggcggaaggaaaacccccacgtgcggtacatcgagcagacccataccaagctggaacacagcgtgtgtgccaacgagatgagaaaggtgtccaagtcctccacccatccccagcacaaccctaacgaaaatgagatcctggtggctgatacctacgaccagtctcagagccctatggccaaggcccacggcaccagctcttatacccctgataagagctccttcaacctggccaccgtggtggccgagacactgggcctgggcgtgcaggaggaaagcgagacacagggcccaatgagccctctgggagatgagctgtaccactgcctggaaggcaaccacaagaaacagccttttgagtccggctccgagactcctggaacaagcgagagcgctacacctgagggcagccctaagagaaaggtgtccagcgccgagggcgctgccaaggaagagcctaaacggagaagcgccagactgagcgccaagccccccgccaaggtggaagccaagcctaagaaggccgccgctaaggacaagagcagcgataagaaagtccagaccaagggcaagcggggcgccaaaggcaaacaggccgaggtggccaaccaggagacaaaggaagatctgcctgctgagaacggcgaaaccaagaccgaggaatctccagcttctgacgaggccggagagaaggaggccaaaagcgacagcggctctgagacacctggaacaagcgagagcgccaccccggaatcctatgaacaacttgcaccacaaccgtgtgtgggagaaactttacattctagcctcccacgagacagtgaactgtttgtgcctgaagaggggagcagcgagaaggagagcgaggacgcgccaaaaacatctcctccgacgcctgggaaacatggtttggaacagactggggaggaaaaagtgatggtgactgttcctgacaaaaatccaccttgtccttgctgtggtacccgggtaaactctgtgttgaatctgattgaacatctgaaagtgtcacacgggaaaaggggggtttgttttcggtgtgcaaaatgtggaaaggaaaatagtaactatcacagtgttgtttgtcattttaagaaatgcaggggtccagagacggagaaagccccagctggggagtggatttgtgaggtatgcaacagagattttacaaccaaaattggcctgggacaacacaagagattggcacacccagcagtgagaaatcaggaaaggatcgttgcttcccaaccgaaagaaacatcaaatagaggtgctcacaaaaggtgctggacaaaggaggaggaagaattactaataagactggaggctcagttcgagggaaacaaaaatattaataagcttattgcagaacacataaccaccaaaacagctaagcagatcagtgacaaaaggcgattgctgtccagaaagccagcagaggagccacgtgaggagcctggaacgtgtcatcacaccaggagagcagctgcgagcctgagaacggagcctgagatgagtcatcacgcccaggcagaggacagagataatggacctgggagacgccctctgccaggcagggcagctgccggagggagaacaatggacgagataagacgccaccctgataagggcaacggacagcagagacccaccaagcaaaaatcagaagaacagctgcaggcttactataaaaagacactagaggaacgactttcagctggggcacttaacaccttcccccgagcattcaagcaggtaatggaaggccgggatataaagctagtaatcaatcagacagcgcaggactgcttcggatgcctggaatccataagccaaataagaacggcaacccgagataaaaaggacacggtgacccgggagaaacacccaaagaaaccttttcagaagtggatgaagaagagagcaatcaaaaaaggtaattatcttcggttccagcgtttattttatcttgatagagggaaactggctaaaatcattttagatgatattgaatgcttgtcttgtgacataccactcagtgaaatttattcggtttttaaaacaagatgggaaacaactggtagctttaaaagccttggggactttaaaacttacgggaaggctgacaacactgccttcagagaattaattacggctaaagaaattgagaaaaatgtgcaggaaatgagcaaaggctcggctcccggtccagacgggattactcttggggacgtcgtaaagatggatcccgagttttcccggaccatggagattttcaatttatggttaacaactggtaaaatcccggacatggtgagggggtgcagaaccgttttgattccaaaatcatcaaagccggatcgtttgaaagacattaataactggagacctatcacgatcggttccatcttgctgagactgttctccaggattgtaacagctaggctgagcaaagcgtgccccctgaacccaaggcaaagaggctttatcagagcggcgggatgctctgaaaacttaaaactcctgcaaactataatttggtcggccaaaagagaacacagaccactgggtgttgtattcgtggacatcgccaaggcttttgacaccgtaagccaccagcacatcattcatgctttgcagcaaagagaggtggatccccacatcgtcggtctggtgagcaatatgtacgagaacatcagtacgtatatcaccacaaagaggaacacacacacagacaaaatccagatccgggttggagtaaagcagggtgacccgatgtcgccccttttatttaacctggcaatggaccctctattatgcaagctggaagagagtggcaaaggataccaccgaggacagagcagcatcacagcgatggcatttgcagacgatctggttttgctgagcgactcctgggaaaatatgaatacaaatattagcatactggagaccttctgcaatctgaccggactcaaaacacaggggcaaaagtgccacggcttttacatcaagccgacaaagaagtcttacaccatcaatgactgcgctgcctggactatcaacggcacacccctgaacatgatcgaccccggcgaatctgagaaatacctcggcctgcagtttgacccgtggattggaatagcaaggtccggtctctccacaaaactagatttttggcttcagcggatcgatcaagcaccacttaaacctctgcagaaaactgatattctcaaaacatacaccatccctcggctgatctacatagctgaccactcagaagtgaaaagcgcactactcgaaacccttgaccagaagatccggacagcggtcaaggaatggcttcacctacctccgtgcacctgcgatgccatcctgtactcgagcacgagagacggcggtttgggcatcaccaaattggcaggactgatccccagcgtgcaggcccgtagactgcatcggatcgcacagtcatctgacgatacgatgaaatgcttcatggaaaaagagaaaatggaacagctgcataagaaattgtggattcaagctggaggggacagagagaacataccctcgatttgggaagcaccaccgtcgagtgaaccaccaaacaacgtgagcacaaattcggaatgggaagcaccgacccagaaagataaatttccaaagccttgcaattggaggaaaaacgaattcaaaaaatggaccaaattggcatcccaaggccgcggaattgtaaattttgaaagagacaaaattagtaaccattggatccaatactacagacgcatacctcacaggaaactcctcactgcactacaactcagggccaacgtttaccccacgagagaatttctagccaggggtagacaagaccaatacatcaaggcgtgtaggcactgcgatgcggacaacgaatcctgcgcccacatcatcggcaactgcccagtgacacaggacgcccgaatcaagaggcacaattacatctgcgaactgcttctcgaggaggcgaagaagaaggactgggtagtgttcaaggaaccgcacataagggattccaacaaggaactgtacaaacctgacctgatatttgtgaaggatgggcgtgcacttgtcgtggatgtgacagtacggtatgaagcagccaaatcatcgctggaggaagccgctgcagagaaagtgagaaagtacaaacacctggaaacggaagtaagacatctcacgaatgcaaaggacgttacttttgtgggctttcccctaggagcgcgggggaaatggcaccaagataactttaaacttttgactgagcttggcctctccaaatcgaggcaagtgaaaatggcagagactttttccacagtagcgctcttttcatctgtggacattgtacatatgtttgccagtagggccagaaaatctatggttatgtgataataggctgccttctgcggggcttgccttctggccatgcccttcttctctcccttgcacctgtacctcttggtctttgaataaagcctgagtaggaaggaccggtaaaaaaaaaaaaaaaaaaaaaaaaaaaaaaacgttgactaaaaaaaaaaaaaaaaaaaaaaaaaaaaaaaaaaaaaaaaaaaaaaaaaaaaaaaaaaaaaaaaaaaaaa

SEQ ID NO: 10708 - DNA, 5858 bp, synthetic construct
  source 1..5858: mol_type = other DNA
gaaataagagagaaaagaagagtaagaagaaatataagagaattcgccaccatggccgaggaggagaagaagagggaggtgctgaacaaccccgtgaagatgaagaagatcaaggagctgctgcagatgagcctggagaagaaggagaagaagaagaagaaggagaagaagaagaagcacaagaagcacaagcacaggagcagcagcagcgacaggagcagcagcgaggacgagcacagcgccggcaggagccagaagaagatggccaacagcagccccgtgctgagcaaggtgcccggctacggcctgcaggtgaggaacagcgacaggaaccagggcctgcagggccccctgaccgccgagcagaagaggggccacggcatgaagaaccacagcaggagcaggagcagcagccacagcccccccaggcacgccagcaagaagagcaccagggaggccggcagcagggacaggaggagcaggagcctgggcaggaggagcaggagccccaggcccagcaagctgcacaacagcaaggtgaacaggagggagaccggccagaccaggagccccagccccaagaaggaggtgtaccagaggaggcacgcccccggctacaccaggaagctgagcgccgaggagctggagaggcctaagaaaaagcggaaggtgaatatcagcggctctagctgcggcagccccaacagcgccgacaccagcagcgacttcaaggacctgtggaccaagctgaaggaatgccacgaccgggaagtgcagggactccaggtgaaggtcaccaaactcaagcaagaaagaatcctggacgcccagagactggaagaattcttcaccaagaaccagcagctgagagagcagcagaaagtgctgcacgagacaatcaaggttctggaagatagactgcgggccggcctgtgcgacagatgcgccgtgaccgaggaacacatgcgcaaaaagcagcaggagttcgagaacattagacagcaaaatctgaaattgatcacagagctgatgaacgagagaaacacactgcaggaggagaacaagaagctgagcgagcagctgcaacagaagatcgagaatgatcagcaacaccaggccgctgagctggaatgtgaagaggacgtgatccccgacagcccaatcacagctttcagcttttctggcgtgaacagactgaggcggaaggaaaacccccacgtgcggtacatcgagcagacccataccaagctggaacacagcgtgtgtgccaacgagatgagaaaggtgtccaagtcctccacccatccccagcacaaccctaacgaaaatgagatcctggtggctgatacctacgaccagtctcagagccctatggccaaggcccacggcaccagctcttatacccctgataagagctccttcaacctggccaccgtggtggccgagacactgggcctgggcgtgcaggaggaaagcgagacacagggcccaatgagccctctgggagatgagctgtaccactgcctggaaggcaaccacaagaaacagccttttgagtccggctccgagactcctggaacaagcgagagcgctacacctgagggcagccctaagagaaaggtgtccagcgccgagggcgctgccaaggaagagcctaaacggagaagcgccagactgagcgccaagccccccgccaaggtggaagccaagcctaagaaggccgccgctaaggacaagagcagcgataagaaagtccagaccaagggcaagcggggcgccaaaggcaaacaggccgaggtggccaaccaggagacaaaggaagatctgcctgctgagaacggcgaaaccaagaccgaggaatctccagcttctgacgaggccggagagaaggaggccaaaagcgacagcggctctgagacacctggaacaagcgagagcgccaccccggaatcctatgaacaacttgcaccacaaccgtgtgtgggagaaactttacattctagcctcccacgagacagtgaactgtttgtgcctgaagaggggagcagcgagaaggagagcgaggacgcgccaaaaacatctcctccgacgcctgggaaacatggtttggaacagactggggaggaaaaagtgatggtgactgttcctgacaaaaatccaccttgtccttgctgtggtacccgggtaaactctgtgttgaatctgattgaacatctgaaagtgtcacacgggaaaaggggggtttgttttcggtgtgcaaaatgtggaaaggaaaatagtaactatcacagtgttgtttgtcattttaagaaatgcaggggtccagagacggagaaagccccagctggggagtggatttgtgaggtatgcaacagagattttacaaccaaaattggcctgggacaacacaagagattggcacacccagcagtgagaaatcaggaaaggatcgttgcttcccaaccgaaagaaacatcaaatagaggtgctcacaaaaggtgctggacaaaggaggaggaagaattactaataagactggaggctcagttcgagggaaacaaaaatattaataagcttattgcagaacacataaccaccaaaacagctaagcagatcagtgacaaaaggcgattgctgtccagaaagccagcagaggagccacgtgaggagcctggaacgtgtcatcacaccaggagagcagctgcgagcctgagaacggagcctgagatgagtcatcacgcccaggcagaggacagagataatggacctgggagacgccctctgccaggcagggcagctgccggagggagaacaatggacgagataagacgccaccctgataagggcaacggacagcagagacccaccaagcaaaaatcagaagaacagctgcaggcttactataaaaagacactagaggaacgactttcagctggggcacttaacaccttcccccgagcattcaagcaggtaatggaaggccgggatataaagctagtaatcaatcagacagcgcaggactgcttcggatgcctggaatccataagccaaataagaacggcaacccgagataaaaaggacacggtgacccgggagaaacacccaaagaaaccttttcagaagtggatgaagaagagagcaatcaaaaaaggtaattatcttcggttccagcgtttattttatcttgatagagggaaactggctaaaatcattttagatgatattgaatgcttgtcttgtgacataccactcagtgaaatttattcggtttttaaaacaagatgggaaacaactggtagctttaaaagccttggggactttaaaacttacgggaaggctgacaacactgccttcagagaattaattacggctaaagaaattgagaaaaatgtgcaggaaatgagcaaaggctcggctcccggtccagacgggattactcttggggacgtcgtaaagatggatcccgagttttcccggaccatggagattttcaatttatggttaacaactggtaaaatcccggacatggtgagggggtgcagaaccgttttgattccaaaatcatcaaagccggatcgtttgaaagacattaataactggagacctatcacgatcggttccatcttgctgagactgttctccaggattgtaacagctaggctgagcaaagcgtgccccctgaacccaaggcaaagaggctttatcagagcggcgggatgctctgaaaacttaaaactcctgcaaactataatttggtcggccaaaagagaacacagaccactgggtgttgtattcgtggacatcgccaaggcttttgacaccgtaagccaccagcacatcattcatgctttgcagcaaagagaggtggatccccacatcgtcggtctggtgagcaatatgtacgagaacatcagtacgtatatcaccacaaagaggaacacacacacagacaaaatccagatccgggttggagtaaagcagggtgacccgatgtcgccccttttatttaacctggcaatggaccctctattatgcaagctggaagagagtggcaaaggataccaccgaggacagagcagcatcacagcgatggcatttgcagacgatctggttttgctgagcgactcctgggaaaatatgaatacaaatattagcatactggagaccttctgcaatctgaccggactcaaaacacaggggcaaaagtgccacggcttttacatcaagccgacaaagaagtcttacaccatcaatgactgcgctgcctggactatcaacggcacacccctgaacatgatcgaccccggcgaatctgagaaatacctcggcctgcagtttgacccgtggattggaatagcaaggtccggtctctccacaaaactagatttttggcttcagcggatcgatcaagcaccacttaaacctctgcagaaaactgatattctcaaaacatacaccatccctcggctgatctacatagctgaccactcagaagtgaaaagcgcactactcgaaacccttgaccagaagatccggacagcggtcaaggaatggcttcacctacctccgtgcacctgcgatgccatcctgtactcgagcacgagagacggcggtttgggcatcaccaaattggcaggactgatccccagcgtgcaggcccgtagactgcatcggatcgcacagtcatctgacgatacgatgaaatgcttcatggaaaaagagaaaatggaacagctgcataagaaattgtggattcaagctggaggggacagagagaacataccctcgatttgggaagcaccaccgtcgagtgaaccaccaaacaacgtgagcacaaattcggaatgggaagcaccgacccagaaagataaatttccaaagccttgcaattggaggaaaaacgaattcaaaaaatggaccaaattggcatcccaaggccgcggaattgtaaattttgaaagagacaaaattagtaaccattggatccaatactacagacgcatacctcacaggaaactcctcactgcactacaactcagggccaacgtttaccccacgagagaatttctagccaggggtagacaagaccaatacatcaaggcgtgtaggcactgcgatgcggacaacgaatcctgcgcccacatcatcggcaactgcccagtgacacaggacgcccgaatcaagaggcacaattacatctgcgaactgcttctcgaggaggcgaagaagaaggactgggtagtgttcaaggaaccgcacataagggattccaacaaggaactgtacaaacctgacctgatatttgtgaaggatgggcgtgcacttgtcgtggatgtgacagtacggtatgaagcagccaaatcatcgctggaggaagccgctgcagagaaagtgagaaagtacaaacacctggaaacggaagtaagacatctcacgaatgcaaaggacgttacttttgtgggctttcccctaggagcgcgggggaaatggcaccaagataactttaaacttttgactgagcttggcctctccaaatcgaggcaagtgaaaatggcagagactttttccacagtagcgctcttttcatctgtggacattgtacatatgtttgccagtagggccagaaaatctatggttatgtgataataggctgccttctgcggggcttgccttctggccatgcccttcttctctcccttgcacctgtacctcttggtctttgaataaagcctgagtaggaaggaccggtaaaaaaaaaaaaaaaaaaaaaaaaaaaaaaacgttgactaaaaaaaaaaaaaaaaaaaaaaaaaaaaaaaaaaaaaaaaaaaaaaaaaaaaaaaaaaaaaaaaaaaaaa

SEQ ID NO: 10709 - DNA, 5492 bp, synthetic construct
  source 1..5492: mol_type = other DNA
gaaataagagagaaaagaagagtaagaagaaatataagagaattcgccaccatggccaggcccgtgaggcacaagaagcccgtgaactacagccagttcgaccacagcgacagcgacgacgacttcgtgagcgccaccgtgcccctgaacaagaagagcaggaccgcccccaaggagctgaagcaggacaagcccaagcccaacctgaacaacctgaggaaggaggagatccccgtgcaggagaaaacccccaagaagaggctgcccgagggcaccttcagcatccctaagaaaaagcggaaggtgaatatcagcggctctagctgcggcagccccaacagcgccgacaccagcagcgacttcaaggacctgtggaccaagctgaaggaatgccacgaccgggaagtgcagggactccaggtgaaggtcaccaaactcaagcaagaaagaatcctggacgcccagagactggaagaattcttcaccaagaaccagcagctgagagagcagcagaaagtgctgcacgagacaatcaaggttctggaagatagactgcgggccggcctgtgcgacagatgcgccgtgaccgaggaacacatgcgcaaaaagcagcaggagttcgagaacattagacagcaaaatctgaaattgatcacagagctgatgaacgagagaaacacactgcaggaggagaacaagaagctgagcgagcagctgcaacagaagatcgagaatgatcagcaacaccaggccgctgagctggaatgtgaagaggacgtgatccccgacagcccaatcacagctttcagcttttctggcgtgaacagactgaggcggaaggaaaacccccacgtgcggtacatcgagcagacccataccaagctggaacacagcgtgtgtgccaacgagatgagaaaggtgtccaagtcctccacccatccccagcacaaccctaacgaaaatgagatcctggtggctgatacctacgaccagtctcagagccctatggccaaggcccacggcaccagctcttatacccctgataagagctccttcaacctggccaccgtggtggccgagacactgggcctgggcgtgcaggaggaaagcgagacacagggcccaatgagccctctgggagatgagctgtaccactgcctggaaggcaaccacaagaaacagccttttgagtccggctccgagactcctggaacaagcgagagcgctacacctgagggcagccctaagagaaaggtgtccagcgccgagggcgctgccaaggaagagcctaaacggagaagcgccagactgagcgccaagccccccgccaaggtggaagccaagcctaagaaggccgccgctaaggacaagagcagcgataagaaagtccagaccaagggcaagcggggcgccaaaggcaaacaggccgaggtggccaaccaggagacaaaggaagatctgcctgctgagaacggcgaaaccaagaccgaggaatctccagcttctgacgaggccggagagaaggaggccaaaagcgacagcggctctgagacacctggaacaagcgagagcgccaccccggaatcctatgaacaacttgcaccacaaccgtgtgtgggagaaactttacattctagcctcccacgagacagtgaactgtttgtgcctgaagaggggagcagcgagaaggagagcgaggacgcgccaaaaacatctcctccgacgcctgggaaacatggtttggaacagactggggaggaaaaagtgatggtgactgttcctgacaaaaatccaccttgtccttgctgtggtacccgggtaaactctgtgttgaatctgattgaacatctgaaagtgtcacacgggaaaaggggggtttgttttcggtgtgcaaaatgtggaaaggaaaatagtaactatcacagtgttgtttgtcattttaagaaatgcaggggtccagagacggagaaagccccagctggggagtggatttgtgaggtatgcaacagagattttacaaccaaaattggcctgggacaacacaagagattggcacacccagcagtgagaaatcaggaaaggatcgttgcttcccaaccgaaagaaacatcaaatagaggtgctcacaaaaggtgctggacaaaggaggaggaagaattactaataagactggaggctcagttcgagggaaacaaaaatattaataagcttattgcagaacacataaccaccaaaacagctaagcagatcagtgacaaaaggcgattgctgtccagaaagccagcagaggagccacgtgaggagcctggaacgtgtcatcacaccaggagagcagctgcgagcctgagaacggagcctgagatgagtcatcacgcccaggcagaggacagagataatggacctgggagacgccctctgccaggcagggcagctgccggagggagaacaatggacgagataagacgccaccctgataagggcaacggacagcagagacccaccaagcaaaaatcagaagaacagctgcaggcttactataaaaagacactagaggaacgactttcagctggggcacttaacaccttcccccgagcattcaagcaggtaatggaaggccgggatataaagctagtaatcaatcagacagcgcaggactgcttcggatgcctggaatccataagccaaataagaacggcaacccgagataaaaaggacacggtgacccgggagaaacacccaaagaaaccttttcagaagtggatgaagaagagagcaatcaaaaaaggtaattatcttcggttccagcgtttattttatcttgatagagggaaactggctaaaatcattttagatgatattgaatgcttgtcttgtgacataccactcagtgaaatttattcggtttttaaaacaagatgggaaacaactggtagctttaaaagccttggggactttaaaacttacgggaaggctgacaacactgccttcagagaattaattacggctaaagaaattgagaaaaatgtgcaggaaatgagcaaaggctcggctcccggtccagacgggattactcttggggacgtcgtaaagatggatcccgagttttcccggaccatggagattttcaatttatggttaacaactggtaaaatcccggacatggtgagggggtgcagaaccgttttgattccaaaatcatcaaagccggatcgtttgaaagacattaataactggagacctatcacgatcggttccatcttgctgagactgttctccaggattgtaacagctaggctgagcaaagcgtgccccctgaacccaaggcaaagaggctttatcagagcggcgggatgctctgaaaacttaaaactcctgcaaactataatttggtcggccaaaagagaacacagaccactgggtgttgtattcgtggacatcgccaaggcttttgacaccgtaagccaccagcacatcattcatgctttgcagcaaagagaggtggatccccacatcgtcggtctggtgagcaatatgtacgagaacatcagtacgtatatcaccacaaagaggaacacacacacagacaaaatccagatccgggttggagtaaagcagggtgacccgatgtcgccccttttatttaacctggcaatggaccctctattatgcaagctggaagagagtggcaaaggataccaccgaggacagagcagcatcacagcgatggcatttgcagacgatctggttttgctgagcgactcctgggaaaatatgaatacaaatattagcatactggagaccttctgcaatctgaccggactcaaaacacaggggcaaaagtgccacggcttttacatcaagccgacaaagaagtcttacaccatcaatgactgcgctgcctggactatcaacggcacacccctgaacatgatcgaccccggcgaatctgagaaatacctcggcctgcagtttgacccgtggattggaatagcaaggtccggtctctccacaaaactagatttttggcttcagcggatcgatcaagcaccacttaaacctctgcagaaaactgatattctcaaaacatacaccatccctcggctgatctacatagctgaccactcagaagtgaaaagcgcactactcgaaacccttgaccagaagatccggacagcggtcaaggaatggcttcacctacctccgtgcacctgcgatgccatcctgtactcgagcacgagagacggcggtttgggcatcaccaaattggcaggactgatccccagcgtgcaggcccgtagactgcatcggatcgcacagtcatctgacgatacgatgaaatgcttcatggaaaaagagaaaatggaacagctgcataagaaattgtggattcaagctggaggggacagagagaacataccctcgatttgggaagcaccaccgtcgagtgaaccaccaaacaacgtgagcacaaattcggaatgggaagcaccgacccagaaagataaatttccaaagccttgcaattggaggaaaaacgaattcaaaaaatggaccaaattggcatcccaaggccgcggaattgtaaattttgaaagagacaaaattagtaaccattggatccaatactacagacgcatacctcacaggaaactcctcactgcactacaactcagggccaacgtttaccccacgagagaatttctagccaggggtagacaagaccaatacatcaaggcgtgtaggcactgcgatgcggacaacgaatcctgcgcccacatcatcggcaactgcccagtgacacaggacgcccgaatcaagaggcacaattacatctgcgaactgcttctcgaggaggcgaagaagaaggactgggtagtgttcaaggaaccgcacataagggattccaacaaggaactgtacaaacctgacctgatatttgtgaaggatgggcgtgcacttgtcgtggatgtgacagtacggtatgaagcagccaaatcatcgctggaggaagccgctgcagagaaagtgagaaagtacaaacacctggaaacggaagtaagacatctcacgaatgcaaaggacgttacttttgtgggctttcccctaggagcgcgggggaaatggcaccaagataactttaaacttttgactgagcttggcctctccaaatcgaggcaagtgaaaatggcagagactttttccacagtagcgctcttttcatctgtggacattgtacatatgtttgccagtagggccagaaaatctatggttatgtgataataggctgccttctgcggggcttgccttctggccatgcccttcttctctcccttgcacctgtacctcttggtctttgaataaagcctgagtaggaaggaccggtaaaaaaaaaaaaaaaaaaaaaaaaaaaaaaacgttgactaaaaaaaaaaaaaaaaaaaaaaaaaaaaaaaaaaaaaaaaaaaaaaaaaaaaaaaaaaaaaaaaaaaaaa

SEQ ID NO: 10710 - DNA, 5873 bp, synthetic construct
  source 1..5873: mol_type = other DNA
gaaataagagagaaaagaagagtaagaagaaatataagagaattcgccaccatggccacccccctgggctggagcaaggccggcagcggcagcgtgtgcctggccctggaccagctgagggacgtgatcgagagccaggaggagctgatccaccagctgaggaacgtgatggtgctgcaggacgagaacttcgtgagcaaggaggagttccaggccgtggagaagaagctggtggaggagaaggccgcccacgccaagaccaaggtgctgctggccaaggaggaggagaagctgcagttcgccctgggcgaggtggaggtgctgagcaagcagctggagaaggagaagctggccttcgagaaggccctgagcagcgtgaagagcaaggtgctgcaggagagcagcaagaaggaccagctgatcaccaagtgcaacgagatcgagagccacatcatcaagcaggaggacatcctgaacggcaaggagaacgagatcaaggagctgcagcaggtgatcagccagcagaagcagatcttcaggaaccacatgagcgacttcaggatccagaagcagcaggagagctacatggcccaggtgctggaccagaagcacaagaaggccagcggcaccaggcaggccaggagccaccagcaccccagggagaagcctaagaaaaagcggaaggtgaatatcagcggctctagctgcggcagccccaacagcgccgacaccagcagcgacttcaaggacctgtggaccaagctgaaggaatgccacgaccgggaagtgcagggactccaggtgaaggtcaccaaactcaagcaagaaagaatcctggacgcccagagactggaagaattcttcaccaagaaccagcagctgagagagcagcagaaagtgctgcacgagacaatcaaggttctggaagatagactgcgggccggcctgtgcgacagatgcgccgtgaccgaggaacacatgcgcaaaaagcagcaggagttcgagaacattagacagcaaaatctgaaattgatcacagagctgatgaacgagagaaacacactgcaggaggagaacaagaagctgagcgagcagctgcaacagaagatcgagaatgatcagcaacaccaggccgctgagctggaatgtgaagaggacgtgatccccgacagcccaatcacagctttcagcttttctggcgtgaacagactgaggcggaaggaaaacccccacgtgcggtacatcgagcagacccataccaagctggaacacagcgtgtgtgccaacgagatgagaaaggtgtccaagtcctccacccatccccagcacaaccctaacgaaaatgagatcctggtggctgatacctacgaccagtctcagagccctatggccaaggcccacggcaccagctcttatacccctgataagagctccttcaacctggccaccgtggtggccgagacactgggcctgggcgtgcaggaggaaagcgagacacagggcccaatgagccctctgggagatgagctgtaccactgcctggaaggcaaccacaagaaacagccttttgagtccggctccgagactcctggaacaagcgagagcgctacacctgagggcagccctaagagaaaggtgtccagcgccgagggcgctgccaaggaagagcctaaacggagaagcgccagactgagcgccaagccccccgccaaggtggaagccaagcctaagaaggccgccgctaaggacaagagcagcgataagaaagtccagaccaagggcaagcggggcgccaaaggcaaacaggccgaggtggccaaccaggagacaaaggaagatctgcctgctgagaacggcgaaaccaagaccgaggaatctccagcttctgacgaggccggagagaaggaggccaaaagcgacagcggctctgagacacctggaacaagcgagagcgccaccccggaatcctatgaacaacttgcaccacaaccgtgtgtgggagaaactttacattctagcctcccacgagacagtgaactgtttgtgcctgaagaggggagcagcgagaaggagagcgaggacgcgccaaaaacatctcctccgacgcctgggaaacatggtttggaacagactggggaggaaaaagtgatggtgactgttcctgacaaaaatccaccttgtccttgctgtggtacccgggtaaactctgtgttgaatctgattgaacatctgaaagtgtcacacgggaaaaggggggtttgttttcggtgtgcaaaatgtggaaaggaaaatagtaactatcacagtgttgtttgtcattttaagaaatgcaggggtccagagacggagaaagccccagctggggagtggatttgtgaggtatgcaacagagattttacaaccaaaattggcctgggacaacacaagagattggcacacccagcagtgagaaatcaggaaaggatcgttgcttcccaaccgaaagaaacatcaaatagaggtgctcacaaaaggtgctggacaaaggaggaggaagaattactaataagactggaggctcagttcgagggaaacaaaaatattaataagcttattgcagaacacataaccaccaaaacagctaagcagatcagtgacaaaaggcgattgctgtccagaaagccagcagaggagccacgtgaggagcctggaacgtgtcatcacaccaggagagcagctgcgagcctgagaacggagcctgagatgagtcatcacgcccaggcagaggacagagataatggacctgggagacgccctctgccaggcagggcagctgccggagggagaacaatggacgagataagacgccaccctgataagggcaacggacagcagagacccaccaagcaaaaatcagaagaacagctgcaggcttactataaaaagacactagaggaacgactttcagctggggcacttaacaccttcccccgagcattcaagcaggtaatggaaggccgggatataaagctagtaatcaatcagacagcgcaggactgcttcggatgcctggaatccataagccaaataagaacggcaacccgagataaaaaggacacggtgacccgggagaaacacccaaagaaaccttttcagaagtggatgaagaagagagcaatcaaaaaaggtaattatcttcggttccagcgtttattttatcttgatagagggaaactggctaaaatcattttagatgatattgaatgcttgtcttgtgacataccactcagtgaaatttattcggtttttaaaacaagatgggaaacaactggtagctttaaaagccttggggactttaaaacttacgggaaggctgacaacactgccttcagagaattaattacggctaaagaaattgagaaaaatgtgcaggaaatgagcaaaggctcggctcccggtccagacgggattactcttggggacgtcgtaaagatggatcccgagttttcccggaccatggagattttcaatttatggttaacaactggtaaaatcccggacatggtgagggggtgcagaaccgttttgattccaaaatcatcaaagccggatcgtttgaaagacattaataactggagacctatcacgatcggttccatcttgctgagactgttctccaggattgtaacagctaggctgagcaaagcgtgccccctgaacccaaggcaaagaggctttatcagagcggcgggatgctctgaaaacttaaaactcctgcaaactataatttggtcggccaaaagagaacacagaccactgggtgttgtattcgtggacatcgccaaggcttttgacaccgtaagccaccagcacatcattcatgctttgcagcaaagagaggtggatccccacatcgtcggtctggtgagcaatatgtacgagaacatcagtacgtatatcaccacaaagaggaacacacacacagacaaaatccagatccgggttggagtaaagcagggtgacccgatgtcgccccttttatttaacctggcaatggaccctctattatgcaagctggaagagagtggcaaaggataccaccgaggacagagcagcatcacagcgatggcatttgcagacgatctggttttgctgagcgactcctgggaaaatatgaatacaaatattagcatactggagaccttctgcaatctgaccggactcaaaacacaggggcaaaagtgccacggcttttacatcaagccgacaaagaagtcttacaccatcaatgactgcgctgcctggactatcaacggcacacccctgaacatgatcgaccccggcgaatctgagaaatacctcggcctgcagtttgacccgtggattggaatagcaaggtccggtctctccacaaaactagatttttggcttcagcggatcgatcaagcaccacttaaacctctgcagaaaactgatattctcaaaacatacaccatccctcggctgatctacatagctgaccactcagaagtgaaaagcgcactactcgaaacccttgaccagaagatccggacagcggtcaaggaatggcttcacctacctccgtgcacctgcgatgccatcctgtactcgagcacgagagacggcggtttgggcatcaccaaattggcaggactgatccccagcgtgcaggcccgtagactgcatcggatcgcacagtcatctgacgatacgatgaaatgcttcatggaaaaagagaaaatggaacagctgcataagaaattgtggattcaagctggaggggacagagagaacataccctcgatttgggaagcaccaccgtcgagtgaaccaccaaacaacgtgagcacaaattcggaatgggaagcaccgacccagaaagataaatttccaaagccttgcaattggaggaaaaacgaattcaaaaaatggaccaaattggcatcccaaggccgcggaattgtaaattttgaaagagacaaaattagtaaccattggatccaatactacagacgcatacctcacaggaaactcctcactgcactacaactcagggccaacgtttaccccacgagagaatttctagccaggggtagacaagaccaatacatcaaggcgtgtaggcactgcgatgcggacaacgaatcctgcgcccacatcatcggcaactgcccagtgacacaggacgcccgaatcaagaggcacaattacatctgcgaactgcttctcgaggaggcgaagaagaaggactgggtagtgttcaaggaaccgcacataagggattccaacaaggaactgtacaaacctgacctgatatttgtgaaggatgggcgtgcacttgtcgtggatgtgacagtacggtatgaagcagccaaatcatcgctggaggaagccgctgcagagaaagtgagaaagtacaaacacctggaaacggaagtaagacatctcacgaatgcaaaggacgttacttttgtgggctttcccctaggagcgcgggggaaatggcaccaagataactttaaacttttgactgagcttggcctctccaaatcgaggcaagtgaaaatggcagagactttttccacagtagcgctcttttcatctgtggacattgtacatatgtttgccagtagggccagaaaatctatggttatgtgataataggctgccttctgcggggcttgccttctggccatgcccttcttctctcccttgcacctgtacctcttggtctttgaataaagcctgagtaggaaggaccggtaaaaaaaaaaaaaaaaaaaaaaaaaaaaaaacgttgactaaaaaaaaaaaaaaaaaaaaaaaaaaaaaaaaaaaaaaaaaaaaaaaaaaaaaaaaaaaaaaaaaaaaaa

SEQ ID NO: 10711 - DNA, 5540 bp, synthetic construct
  source 1..5540: mol_type = other DNA
gaaataagagagaaaagaagagtaagaagaaatataagagaattcgccaccatggccatccccaagagcaccaggagcaaggccaagaagagcgtgagcgccaagaccaagaagctggtgctgagcagggacagcaagagccccaagaccgccaagaccaacaagagggccaagaagcccagggccaccacccccaagaccgtgaggagcggcaggaaggccaagggcgccaagggcaagcagcagcagaagagccccgtgaaggccagggccagcaagagcaagctgacccagcaccacgaggtgaacgtgaggaaggccaccagcaagaagcctaagaaaaagcggaaggtgaatatcagcggctctagctgcggcagccccaacagcgccgacaccagcagcgacttcaaggacctgtggaccaagctgaaggaatgccacgaccgggaagtgcagggactccaggtgaaggtcaccaaactcaagcaagaaagaatcctggacgcccagagactggaagaattcttcaccaagaaccagcagctgagagagcagcagaaagtgctgcacgagacaatcaaggttctggaagatagactgcgggccggcctgtgcgacagatgcgccgtgaccgaggaacacatgcgcaaaaagcagcaggagttcgagaacattagacagcaaaatctgaaattgatcacagagctgatgaacgagagaaacacactgcaggaggagaacaagaagctgagcgagcagctgcaacagaagatcgagaatgatcagcaacaccaggccgctgagctggaatgtgaagaggacgtgatccccgacagcccaatcacagctttcagcttttctggcgtgaacagactgaggcggaaggaaaacccccacgtgcggtacatcgagcagacccataccaagctggaacacagcgtgtgtgccaacgagatgagaaaggtgtccaagtcctccacccatccccagcacaaccctaacgaaaatgagatcctggtggctgatacctacgaccagtctcagagccctatggccaaggcccacggcaccagctcttatacccctgataagagctccttcaacctggccaccgtggtggccgagacactgggcctgggcgtgcaggaggaaagcgagacacagggcccaatgagccctctgggagatgagctgtaccactgcctggaaggcaaccacaagaaacagccttttgagtccggctccgagactcctggaacaagcgagagcgctacacctgagggcagccctaagagaaaggtgtccagcgccgagggcgctgccaaggaagagcctaaacggagaagcgccagactgagcgccaagccccccgccaaggtggaagccaagcctaagaaggccgccgctaaggacaagagcagcgataagaaagtccagaccaagggcaagcggggcgccaaaggcaaacaggccgaggtggccaaccaggagacaaaggaagatctgcctgctgagaacggcgaaaccaagaccgaggaatctccagcttctgacgaggccggagagaaggaggccaaaagcgacagcggctctgagacacctggaacaagcgagagcgccaccccggaatcctatgaacaacttgcaccacaaccgtgtgtgggagaaactttacattctagcctcccacgagacagtgaactgtttgtgcctgaagaggggagcagcgagaaggagagcgaggacgcgccaaaaacatctcctccgacgcctgggaaacatggtttggaacagactggggaggaaaaagtgatggtgactgttcctgacaaaaatccaccttgtccttgctgtggtacccgggtaaactctgtgttgaatctgattgaacatctgaaagtgtcacacgggaaaaggggggtttgttttcggtgtgcaaaatgtggaaaggaaaatagtaactatcacagtgttgtttgtcattttaagaaatgcaggggtccagagacggagaaagccccagctggggagtggatttgtgaggtatgcaacagagattttacaaccaaaattggcctgggacaacacaagagattggcacacccagcagtgagaaatcaggaaaggatcgttgcttcccaaccgaaagaaacatcaaatagaggtgctcacaaaaggtgctggacaaaggaggaggaagaattactaataagactggaggctcagttcgagggaaacaaaaatattaataagcttattgcagaacacataaccaccaaaacagctaagcagatcagtgacaaaaggcgattgctgtccagaaagccagcagaggagccacgtgaggagcctggaacgtgtcatcacaccaggagagcagctgcgagcctgagaacggagcctgagatgagtcatcacgcccaggcagaggacagagataatggacctgggagacgccctctgccaggcagggcagctgccggagggagaacaatggacgagataagacgccaccctgataagggcaacggacagcagagacccaccaagcaaaaatcagaagaacagctgcaggcttactataaaaagacactagaggaacgactttcagctggggcacttaacaccttcccccgagcattcaagcaggtaatggaaggccgggatataaagctagtaatcaatcagacagcgcaggactgcttcggatgcctggaatccataagccaaataagaacggcaacccgagataaaaaggacacggtgacccgggagaaacacccaaagaaaccttttcagaagtggatgaagaagagagcaatcaaaaaaggtaattatcttcggttccagcgtttattttatcttgatagagggaaactggctaaaatcattttagatgatattgaatgcttgtcttgtgacataccactcagtgaaatttattcggtttttaaaacaagatgggaaacaactggtagctttaaaagccttggggactttaaaacttacgggaaggctgacaacactgccttcagagaattaattacggctaaagaaattgagaaaaatgtgcaggaaatgagcaaaggctcggctcccggtccagacgggattactcttggggacgtcgtaaagatggatcccgagttttcccggaccatggagattttcaatttatggttaacaactggtaaaatcccggacatggtgagggggtgcagaaccgttttgattccaaaatcatcaaagccggatcgtttgaaagacattaataactggagacctatcacgatcggttccatcttgctgagactgttctccaggattgtaacagctaggctgagcaaagcgtgccccctgaacccaaggcaaagaggctttatcagagcggcgggatgctctgaaaacttaaaactcctgcaaactataatttggtcggccaaaagagaacacagaccactgggtgttgtattcgtggacatcgccaaggcttttgacaccgtaagccaccagcacatcattcatgctttgcagcaaagagaggtggatccccacatcgtcggtctggtgagcaatatgtacgagaacatcagtacgtatatcaccacaaagaggaacacacacacagacaaaatccagatccgggttggagtaaagcagggtgacccgatgtcgccccttttatttaacctggcaatggaccctctattatgcaagctggaagagagtggcaaaggataccaccgaggacagagcagcatcacagcgatggcatttgcagacgatctggttttgctgagcgactcctgggaaaatatgaatacaaatattagcatactggagaccttctgcaatctgaccggactcaaaacacaggggcaaaagtgccacggcttttacatcaagccgacaaagaagtcttacaccatcaatgactgcgctgcctggactatcaacggcacacccctgaacatgatcgaccccggcgaatctgagaaatacctcggcctgcagtttgacccgtggattggaatagcaaggtccggtctctccacaaaactagatttttggcttcagcggatcgatcaagcaccacttaaacctctgcagaaaactgatattctcaaaacatacaccatccctcggctgatctacatagctgaccactcagaagtgaaaagcgcactactcgaaacccttgaccagaagatccggacagcggtcaaggaatggcttcacctacctccgtgcacctgcgatgccatcctgtactcgagcacgagagacggcggtttgggcatcaccaaattggcaggactgatccccagcgtgcaggcccgtagactgcatcggatcgcacagtcatctgacgatacgatgaaatgcttcatggaaaaagagaaaatggaacagctgcataagaaattgtggattcaagctggaggggacagagagaacataccctcgatttgggaagcaccaccgtcgagtgaaccaccaaacaacgtgagcacaaattcggaatgggaagcaccgacccagaaagataaatttccaaagccttgcaattggaggaaaaacgaattcaaaaaatggaccaaattggcatcccaaggccgcggaattgtaaattttgaaagagacaaaattagtaaccattggatccaatactacagacgcatacctcacaggaaactcctcactgcactacaactcagggccaacgtttaccccacgagagaatttctagccaggggtagacaagaccaatacatcaaggcgtgtaggcactgcgatgcggacaacgaatcctgcgcccacatcatcggcaactgcccagtgacacaggacgcccgaatcaagaggcacaattacatctgcgaactgcttctcgaggaggcgaagaagaaggactgggtagtgttcaaggaaccgcacataagggattccaacaaggaactgtacaaacctgacctgatatttgtgaaggatgggcgtgcacttgtcgtggatgtgacagtacggtatgaagcagccaaatcatcgctggaggaagccgctgcagagaaagtgagaaagtacaaacacctggaaacggaagtaagacatctcacgaatgcaaaggacgttacttttgtgggctttcccctaggagcgcgggggaaatggcaccaagataactttaaacttttgactgagcttggcctctccaaatcgaggcaagtgaaaatggcagagactttttccacagtagcgctcttttcatctgtggacattgtacatatgtttgccagtagggccagaaaatctatggttatgtgataataggctgccttctgcggggcttgccttctggccatgcccttcttctctcccttgcacctgtacctcttggtctttgaataaagcctgagtaggaaggaccggtaaaaaaaaaaaaaaaaaaaaaaaaaaaaaaacgttgactaaaaaaaaaaaaaaaaaaaaaaaaaaaaaaaaaaaaaaaaaaaaaaaaaaaaaaaaaaaaaaaaaaaaaa

SEQ ID NO: 10712 - DNA, 5387 bp, synthetic construct
  source 1..5387: mol_type = other DNA
gaaataagagagaaaagaagagtaagaagaaatataagagaattcgccaccatggccagcggcaccaaggagcagatcaagggcggcaccggcgacgagaagaaggccaaggagaagatcgagaagaagggcgagaagaaggagaagaagcagcagagcatcgccggcagcgccgacagccctaagaaaaagcggaaggtgaatatcagcggctctagctgcggcagccccaacagcgccgacaccagcagcgacttcaaggacctgtggaccaagctgaaggaatgccacgaccgggaagtgcagggactccaggtgaaggtcaccaaactcaagcaagaaagaatcctggacgcccagagactggaagaattcttcaccaagaaccagcagctgagagagcagcagaaagtgctgcacgagacaatcaaggttctggaagatagactgcgggccggcctgtgcgacagatgcgccgtgaccgaggaacacatgcgcaaaaagcagcaggagttcgagaacattagacagcaaaatctgaaattgatcacagagctgatgaacgagagaaacacactgcaggaggagaacaagaagctgagcgagcagctgcaacagaagatcgagaatgatcagcaacaccaggccgctgagctggaatgtgaagaggacgtgatccccgacagcccaatcacagctttcagcttttctggcgtgaacagactgaggcggaaggaaaacccccacgtgcggtacatcgagcagacccataccaagctggaacacagcgtgtgtgccaacgagatgagaaaggtgtccaagtcctccacccatccccagcacaaccctaacgaaaatgagatcctggtggctgatacctacgaccagtctcagagccctatggccaaggcccacggcaccagctcttatacccctgataagagctccttcaacctggccaccgtggtggccgagacactgggcctgggcgtgcaggaggaaagcgagacacagggcccaatgagccctctgggagatgagctgtaccactgcctggaaggcaaccacaagaaacagccttttgagtccggctccgagactcctggaacaagcgagagcgctacacctgagggcagccctaagagaaaggtgtccagcgccgagggcgctgccaaggaagagcctaaacggagaagcgccagactgagcgccaagccccccgccaaggtggaagccaagcctaagaaggccgccgctaaggacaagagcagcgataagaaagtccagaccaagggcaagcggggcgccaaaggcaaacaggccgaggtggccaaccaggagacaaaggaagatctgcctgctgagaacggcgaaaccaagaccgaggaatctccagcttctgacgaggccggagagaaggaggccaaaagcgacagcggctctgagacacctggaacaagcgagagcgccaccccggaatcctatgaacaacttgcaccacaaccgtgtgtgggagaaactttacattctagcctcccacgagacagtgaactgtttgtgcctgaagaggggagcagcgagaaggagagcgaggacgcgccaaaaacatctcctccgacgcctgggaaacatggtttggaacagactggggaggaaaaagtgatggtgactgttcctgacaaaaatccaccttgtccttgctgtggtacccgggtaaactctgtgttgaatctgattgaacatctgaaagtgtcacacgggaaaaggggggtttgttttcggtgtgcaaaatgtggaaaggaaaatagtaactatcacagtgttgtttgtcattttaagaaatgcaggggtccagagacggagaaagccccagctggggagtggatttgtgaggtatgcaacagagattttacaaccaaaattggcctgggacaacacaagagattggcacacccagcagtgagaaatcaggaaaggatcgttgcttcccaaccgaaagaaacatcaaatagaggtgctcacaaaaggtgctggacaaaggaggaggaagaattactaataagactggaggctcagttcgagggaaacaaaaatattaataagcttattgcagaacacataaccaccaaaacagctaagcagatcagtgacaaaaggcgattgctgtccagaaagccagcagaggagccacgtgaggagcctggaacgtgtcatcacaccaggagagcagctgcgagcctgagaacggagcctgagatgagtcatcacgcccaggcagaggacagagataatggacctgggagacgccctctgccaggcagggcagctgccggagggagaacaatggacgagataagacgccaccctgataagggcaacggacagcagagacccaccaagcaaaaatcagaagaacagctgcaggcttactataaaaagacactagaggaacgactttcagctggggcacttaacaccttcccccgagcattcaagcaggtaatggaaggccgggatataaagctagtaatcaatcagacagcgcaggactgcttcggatgcctggaatccataagccaaataagaacggcaacccgagataaaaaggacacggtgacccgggagaaacacccaaagaaaccttttcagaagtggatgaagaagagagcaatcaaaaaaggtaattatcttcggttccagcgtttattttatcttgatagagggaaactggctaaaatcattttagatgatattgaatgcttgtcttgtgacataccactcagtgaaatttattcggtttttaaaacaagatgggaaacaactggtagctttaaaagccttggggactttaaaacttacgggaaggctgacaacactgccttcagagaattaattacggctaaagaaattgagaaaaatgtgcaggaaatgagcaaaggctcggctcccggtccagacgggattactcttggggacgtcgtaaagatggatcccgagttttcccggaccatggagattttcaatttatggttaacaactggtaaaatcccggacatggtgagggggtgcagaaccgttttgattccaaaatcatcaaagccggatcgtttgaaagacattaataactggagacctatcacgatcggttccatcttgctgagactgttctccaggattgtaacagctaggctgagcaaagcgtgccccctgaacccaaggcaaagaggctttatcagagcggcgggatgctctgaaaacttaaaactcctgcaaactataatttggtcggccaaaagagaacacagaccactgggtgttgtattcgtggacatcgccaaggcttttgacaccgtaagccaccagcacatcattcatgctttgcagcaaagagaggtggatccccacatcgtcggtctggtgagcaatatgtacgagaacatcagtacgtatatcaccacaaagaggaacacacacacagacaaaatccagatccgggttggagtaaagcagggtgacccgatgtcgccccttttatttaacctggcaatggaccctctattatgcaagctggaagagagtggcaaaggataccaccgaggacagagcagcatcacagcgatggcatttgcagacgatctggttttgctgagcgactcctgggaaaatatgaatacaaatattagcatactggagaccttctgcaatctgaccggactcaaaacacaggggcaaaagtgccacggcttttacatcaagccgacaaagaagtcttacaccatcaatgactgcgctgcctggactatcaacggcacacccctgaacatgatcgaccccggcgaatctgagaaatacctcggcctgcagtttgacccgtggattggaatagcaaggtccggtctctccacaaaactagatttttggcttcagcggatcgatcaagcaccacttaaacctctgcagaaaactgatattctcaaaacatacaccatccctcggctgatctacatagctgaccactcagaagtgaaaagcgcactactcgaaacccttgaccagaagatccggacagcggtcaaggaatggcttcacctacctccgtgcacctgcgatgccatcctgtactcgagcacgagagacggcggtttgggcatcaccaaattggcaggactgatccccagcgtgcaggcccgtagactgcatcggatcgcacagtcatctgacgatacgatgaaatgcttcatggaaaaagagaaaatggaacagctgcataagaaattgtggattcaagctggaggggacagagagaacataccctcgatttgggaagcaccaccgtcgagtgaaccaccaaacaacgtgagcacaaattcggaatgggaagcaccgacccagaaagataaatttccaaagccttgcaattggaggaaaaacgaattcaaaaaatggaccaaattggcatcccaaggccgcggaattgtaaattttgaaagagacaaaattagtaaccattggatccaatactacagacgcatacctcacaggaaactcctcactgcactacaactcagggccaacgtttaccccacgagagaatttctagccaggggtagacaagaccaatacatcaaggcgtgtaggcactgcgatgcggacaacgaatcctgcgcccacatcatcggcaactgcccagtgacacaggacgcccgaatcaagaggcacaattacatctgcgaactgcttctcgaggaggcgaagaagaaggactgggtagtgttcaaggaaccgcacataagggattccaacaaggaactgtacaaacctgacctgatatttgtgaaggatgggcgtgcacttgtcgtggatgtgacagtacggtatgaagcagccaaatcatcgctggaggaagccgctgcagagaaagtgagaaagtacaaacacctggaaacggaagtaagacatctcacgaatgcaaaggacgttacttttgtgggctttcccctaggagcgcgggggaaatggcaccaagataactttaaacttttgactgagcttggcctctccaaatcgaggcaagtgaaaatggcagagactttttccacagtagcgctcttttcatctgtggacattgtacatatgtttgccagtagggccagaaaatctatggttatgtgataataggctgccttctgcggggcttgccttctggccatgcccttcttctctcccttgcacctgtacctcttggtctttgaataaagcctgagtaggaaggaccggtaaaaaaaaaaaaaaaaaaaaaaaaaaaaaaacgttgactaaaaaaaaaaaaaaaaaaaaaaaaaaaaaaaaaaaaaaaaaaaaaaaaaaaaaaaaaaaaaaaaaaaaaa

SEQ ID NO: 10713 - DNA, 5465 bp, synthetic construct
  source 1..5465: mol_type = other DNA
gaaataagagagaaaagaagagtaagaagaaatataagagaattcgccaccatggcccagaggggccacagctaccacggcccccagatcaaggtggaccacagcagggagaaggagaacgcccccgagggccccacccagaagggcctgagggaggccagggagcagaacaagtgcaagaccaagatgaagggcaacaccaaggacagcgagttccccatcgacatgcagcccaaccccaacctgaacgtgagcaagcctaagaaaaagcggaaggtgaatatcagcggctctagctgcggcagccccaacagcgccgacaccagcagcgacttcaaggacctgtggaccaagctgaaggaatgccacgaccgggaagtgcagggactccaggtgaaggtcaccaaactcaagcaagaaagaatcctggacgcccagagactggaagaattcttcaccaagaaccagcagctgagagagcagcagaaagtgctgcacgagacaatcaaggttctggaagatagactgcgggccggcctgtgcgacagatgcgccgtgaccgaggaacacatgcgcaaaaagcagcaggagttcgagaacattagacagcaaaatctgaaattgatcacagagctgatgaacgagagaaacacactgcaggaggagaacaagaagctgagcgagcagctgcaacagaagatcgagaatgatcagcaacaccaggccgctgagctggaatgtgaagaggacgtgatccccgacagcccaatcacagctttcagcttttctggcgtgaacagactgaggcggaaggaaaacccccacgtgcggtacatcgagcagacccataccaagctggaacacagcgtgtgtgccaacgagatgagaaaggtgtccaagtcctccacccatccccagcacaaccctaacgaaaatgagatcctggtggctgatacctacgaccagtctcagagccctatggccaaggcccacggcaccagctcttatacccctgataagagctccttcaacctggccaccgtggtggccgagacactgggcctgggcgtgcaggaggaaagcgagacacagggcccaatgagccctctgggagatgagctgtaccactgcctggaaggcaaccacaagaaacagccttttgagtccggctccgagactcctggaacaagcgagagcgctacacctgagggcagccctaagagaaaggtgtccagcgccgagggcgctgccaaggaagagcctaaacggagaagcgccagactgagcgccaagccccccgccaaggtggaagccaagcctaagaaggccgccgctaaggacaagagcagcgataagaaagtccagaccaagggcaagcggggcgccaaaggcaaacaggccgaggtggccaaccaggagacaaaggaagatctgcctgctgagaacggcgaaaccaagaccgaggaatctccagcttctgacgaggccggagagaaggaggccaaaagcgacagcggctctgagacacctggaacaagcgagagcgccaccccggaatcctatgaacaacttgcaccacaaccgtgtgtgggagaaactttacattctagcctcccacgagacagtgaactgtttgtgcctgaagaggggagcagcgagaaggagagcgaggacgcgccaaaaacatctcctccgacgcctgggaaacatggtttggaacagactggggaggaaaaagtgatggtgactgttcctgacaaaaatccaccttgtccttgctgtggtacccgggtaaactctgtgttgaatctgattgaacatctgaaagtgtcacacgggaaaaggggggtttgttttcggtgtgcaaaatgtggaaaggaaaatagtaactatcacagtgttgtttgtcattttaagaaatgcaggggtccagagacggagaaagccccagctggggagtggatttgtgaggtatgcaacagagattttacaaccaaaattggcctgggacaacacaagagattggcacacccagcagtgagaaatcaggaaaggatcgttgcttcccaaccgaaagaaacatcaaatagaggtgctcacaaaaggtgctggacaaaggaggaggaagaattactaataagactggaggctcagttcgagggaaacaaaaatattaataagcttattgcagaacacataaccaccaaaacagctaagcagatcagtgacaaaaggcgattgctgtccagaaagccagcagaggagccacgtgaggagcctggaacgtgtcatcacaccaggagagcagctgcgagcctgagaacggagcctgagatgagtcatcacgcccaggcagaggacagagataatggacctgggagacgccctctgccaggcagggcagctgccggagggagaacaatggacgagataagacgccaccctgataagggcaacggacagcagagacccaccaagcaaaaatcagaagaacagctgcaggcttactataaaaagacactagaggaacgactttcagctggggcacttaacaccttcccccgagcattcaagcaggtaatggaaggccgggatataaagctagtaatcaatcagacagcgcaggactgcttcggatgcctggaatccataagccaaataagaacggcaacccgagataaaaaggacacggtgacccgggagaaacacccaaagaaaccttttcagaagtggatgaagaagagagcaatcaaaaaaggtaattatcttcggttccagcgtttattttatcttgatagagggaaactggctaaaatcattttagatgatattgaatgcttgtcttgtgacataccactcagtgaaatttattcggtttttaaaacaagatgggaaacaactggtagctttaaaagccttggggactttaaaacttacgggaaggctgacaacactgccttcagagaattaattacggctaaagaaattgagaaaaatgtgcaggaaatgagcaaaggctcggctcccggtccagacgggattactcttggggacgtcgtaaagatggatcccgagttttcccggaccatggagattttcaatttatggttaacaactggtaaaatcccggacatggtgagggggtgcagaaccgttttgattccaaaatcatcaaagccggatcgtttgaaagacattaataactggagacctatcacgatcggttccatcttgctgagactgttctccaggattgtaacagctaggctgagcaaagcgtgccccctgaacccaaggcaaagaggctttatcagagcggcgggatgctctgaaaacttaaaactcctgcaaactataatttggtcggccaaaagagaacacagaccactgggtgttgtattcgtggacatcgccaaggcttttgacaccgtaagccaccagcacatcattcatgctttgcagcaaagagaggtggatccccacatcgtcggtctggtgagcaatatgtacgagaacatcagtacgtatatcaccacaaagaggaacacacacacagacaaaatccagatccgggttggagtaaagcagggtgacccgatgtcgccccttttatttaacctggcaatggaccctctattatgcaagctggaagagagtggcaaaggataccaccgaggacagagcagcatcacagcgatggcatttgcagacgatctggttttgctgagcgactcctgggaaaatatgaatacaaatattagcatactggagaccttctgcaatctgaccggactcaaaacacaggggcaaaagtgccacggcttttacatcaagccgacaaagaagtcttacaccatcaatgactgcgctgcctggactatcaacggcacacccctgaacatgatcgaccccggcgaatctgagaaatacctcggcctgcagtttgacccgtggattggaatagcaaggtccggtctctccacaaaactagatttttggcttcagcggatcgatcaagcaccacttaaacctctgcagaaaactgatattctcaaaacatacaccatccctcggctgatctacatagctgaccactcagaagtgaaaagcgcactactcgaaacccttgaccagaagatccggacagcggtcaaggaatggcttcacctacctccgtgcacctgcgatgccatcctgtactcgagcacgagagacggcggtttgggcatcaccaaattggcaggactgatccccagcgtgcaggcccgtagactgcatcggatcgcacagtcatctgacgatacgatgaaatgcttcatggaaaaagagaaaatggaacagctgcataagaaattgtggattcaagctggaggggacagagagaacataccctcgatttgggaagcaccaccgtcgagtgaaccaccaaacaacgtgagcacaaattcggaatgggaagcaccgacccagaaagataaatttccaaagccttgcaattggaggaaaaacgaattcaaaaaatggaccaaattggcatcccaaggccgcggaattgtaaattttgaaagagacaaaattagtaaccattggatccaatactacagacgcatacctcacaggaaactcctcactgcactacaactcagggccaacgtttaccccacgagagaatttctagccaggggtagacaagaccaatacatcaaggcgtgtaggcactgcgatgcggacaacgaatcctgcgcccacatcatcggcaactgcccagtgacacaggacgcccgaatcaagaggcacaattacatctgcgaactgcttctcgaggaggcgaagaagaaggactgggtagtgttcaaggaaccgcacataagggattccaacaaggaactgtacaaacctgacctgatatttgtgaaggatgggcgtgcacttgtcgtggatgtgacagtacggtatgaagcagccaaatcatcgctggaggaagccgctgcagagaaagtgagaaagtacaaacacctggaaacggaagtaagacatctcacgaatgcaaaggacgttacttttgtgggctttcccctaggagcgcgggggaaatggcaccaagataactttaaacttttgactgagcttggcctctccaaatcgaggcaagtgaaaatggcagagactttttccacagtagcgctcttttcatctgtggacattgtacatatgtttgccagtagggccagaaaatctatggttatgtgataataggctgccttctgcggggcttgccttctggccatgcccttcttctctcccttgcacctgtacctcttggtctttgaataaagcctgagtaggaaggaccggtaaaaaaaaaaaaaaaaaaaaaaaaaaaaaaacgttgactaaaaaaaaaaaaaaaaaaaaaaaaaaaaaaaaaaaaaaaaaaaaaaaaaaaaaaaaaaaaaaaaaaaaaa

SEQ ID NO: 10714 - DNA, 5744 bp, synthetic construct
  source 1..5744: mol_type = other DNA
gaaataagagagaaaagaagagtaagaagaaatataagagaattcgccaccatggcttcttgcccgaaacctggccccccggtttcagcaggggcaatgagtttggaaagtggactgaccacccactccgttctcgccatcgaacgtggtcccaattcgttggcaaattccggatcagactttgggggggggggtctggggctaccgttacgcctattgagggtatcggtcggcactcagacctcccgctccgactgggtagacctggtgtcctggagccacccaggacccacgtctaagtcccagcaggttgacctggtgtctttatttcctaaacaccgggttgacctgttatccaaaaacgaccaggtagacctggtggctcaatttttaccatctaaatttccccccaatttggcagaaaatgatttggctttgctggtgaacttagagttctacagatcggatttgcatgtgtatgagtgtgttcattttgctgcacattgggagggattaagtggtttgcctgaggtggcccctaagaaaaagcggaaggtgaatatcagcggctctagctgcggcagccccaacagcgccgacaccagcagcgacttcaaggacctgtggaccaagctgaaggaatgccacgaccgggaagtgcagggactccaggtgaaggtcaccaaactcaagcaagaaagaatcctggacgcccagagactggaagaattcttcaccaagaaccagcagctgagagagcagcagaaagtgctgcacgagacaatcaaggttctggaagatagactgcgggccggcctgtgcgacagatgcgccgtgaccgaggaacacatgcgcaaaaagcagcaggagttcgagaacattagacagcaaaatctgaaattgatcacagagctgatgaacgagagaaacacactgcaggaggagaacaagaagctgagcgagcagctgcaacagaagatcgagaatgatcagcaacaccaggccgctgagctggaatgtgaagaggacgtgatccccgacagcccaatcacagctttcagcttttctggcgtgaacagactgaggcggaaggaaaacccccacgtgcggtacatcgagcagacccataccaagctggaacacagcgtgtgtgccaacgagatgagaaaggtgtccaagtcctccacccatccccagcacaaccctaacgaaaatgagatcctggtggctgatacctacgaccagtctcagagccctatggccaaggcccacggcaccagctcttatacccctgataagagctccttcaacctggccaccgtggtggccgagacactgggcctgggcgtgcaggaggaaagcgagacacagggcccaatgagccctctgggagatgagctgtaccactgcctggaaggcaaccacaagaaacagccttttgagtccggctccgagactcctggaacaagcgagagcgctacacctgagggcagccctaagagaaaggtgtccagcgccgagggcgctgccaaggaagagcctaaacggagaagcgccagactgagcgccaagccccccgccaaggtggaagccaagcctaagaaggccgccgctaaggacaagagcagcgataagaaagtccagaccaagggcaagcggggcgccaaaggcaaacaggccgaggtggccaaccaggagacaaaggaagatctgcctgctgagaacggcgaaaccaagaccgaggaatctccagcttctgacgaggccggagagaaggaggccaaaagcgacagcggctctgagacacctggaacaagcgagagcgccaccccggaatcctatgaacaacttgcaccacaaccgtgtgtgggagaaactttacattctagcctcccacgagacagtgaactgtttgtgcctgaagaggggagcagcgagaaggagagcgaggacgcgccaaaaacatctcctccgacgcctgggaaacatggtttggaacagactggggaggaaaaagtgatggtgactgttcctgacaaaaatccaccttgtccttgctgtggtacccgggtaaactctgtgttgaatctgattgaacatctgaaagtgtcacacgggaaaaggggggtttgttttcggtgtgcaaaatgtggaaaggaaaatagtaactatcacagtgttgtttgtcattttaagaaatgcaggggtccagagacggagaaagccccagctggggagtggatttgtgaggtatgcaacagagattttacaaccaaaattggcctgggacaacacaagagattggcacacccagcagtgagaaatcaggaaaggatcgttgcttcccaaccgaaagaaacatcaaatagaggtgctcacaaaaggtgctggacaaaggaggaggaagaattactaataagactggaggctcagttcgagggaaacaaaaatattaataagcttattgcagaacacataaccaccaaaacagctaagcagatcagtgacaaaaggcgattgctgtccagaaagccagcagaggagccacgtgaggagcctggaacgtgtcatcacaccaggagagcagctgcgagcctgagaacggagcctgagatgagtcatcacgcccaggcagaggacagagataatggacctgggagacgccctctgccaggcagggcagctgccggagggagaacaatggacgagataagacgccaccctgataagggcaacggacagcagagacccaccaagcaaaaatcagaagaacagctgcaggcttactataaaaagacactagaggaacgactttcagctggggcacttaacaccttcccccgagcattcaagcaggtaatggaaggccgggatataaagctagtaatcaatcagacagcgcaggactgcttcggatgcctggaatccataagccaaataagaacggcaacccgagataaaaaggacacggtgacccgggagaaacacccaaagaaaccttttcagaagtggatgaagaagagagcaatcaaaaaaggtaattatcttcggttccagcgtttattttatcttgatagagggaaactggctaaaatcattttagatgatattgaatgcttgtcttgtgacataccactcagtgaaatttattcggtttttaaaacaagatgggaaacaactggtagctttaaaagccttggggactttaaaacttacgggaaggctgacaacactgccttcagagaattaattacggctaaagaaattgagaaaaatgtgcaggaaatgagcaaaggctcggctcccggtccagacgggattactcttggggacgtcgtaaagatggatcccgagttttcccggaccatggagattttcaatttatggttaacaactggtaaaatcccggacatggtgagggggtgcagaaccgttttgattccaaaatcatcaaagccggatcgtttgaaagacattaataactggagacctatcacgatcggttccatcttgctgagactgttctccaggattgtaacagctaggctgagcaaagcgtgccccctgaacccaaggcaaagaggctttatcagagcggcgggatgctctgaaaacttaaaactcctgcaaactataatttggtcggccaaaagagaacacagaccactgggtgttgtattcgtggacatcgccaaggcttttgacaccgtaagccaccagcacatcattcatgctttgcagcaaagagaggtggatccccacatcgtcggtctggtgagcaatatgtacgagaacatcagtacgtatatcaccacaaagaggaacacacacacagacaaaatccagatccgggttggagtaaagcagggtgacccgatgtcgccccttttatttaacctggcaatggaccctctattatgcaagctggaagagagtggcaaaggataccaccgaggacagagcagcatcacagcgatggcatttgcagacgatctggttttgctgagcgactcctgggaaaatatgaatacaaatattagcatactggagaccttctgcaatctgaccggactcaaaacacaggggcaaaagtgccacggcttttacatcaagccgacaaagaagtcttacaccatcaatgactgcgctgcctggactatcaacggcacacccctgaacatgatcgaccccggcgaatctgagaaatacctcggcctgcagtttgacccgtggattggaatagcaaggtccggtctctccacaaaactagatttttggcttcagcggatcgatcaagcaccacttaaacctctgcagaaaactgatattctcaaaacatacaccatccctcggctgatctacatagctgaccactcagaagtgaaaagcgcactactcgaaacccttgaccagaagatccggacagcggtcaaggaatggcttcacctacctccgtgcacctgcgatgccatcctgtactcgagcacgagagacggcggtttgggcatcaccaaattggcaggactgatccccagcgtgcaggcccgtagactgcatcggatcgcacagtcatctgacgatacgatgaaatgcttcatggaaaaagagaaaatggaacagctgcataagaaattgtggattcaagctggaggggacagagagaacataccctcgatttgggaagcaccaccgtcgagtgaaccaccaaacaacgtgagcacaaattcggaatgggaagcaccgacccagaaagataaatttccaaagccttgcaattggaggaaaaacgaattcaaaaaatggaccaaattggcatcccaaggccgcggaattgtaaattttgaaagagacaaaattagtaaccattggatccaatactacagacgcatacctcacaggaaactcctcactgcactacaactcagggccaacgtttaccccacgagagaatttctagccaggggtagacaagaccaatacatcaaggcgtgtaggcactgcgatgcggacaacgaatcctgcgcccacatcatcggcaactgcccagtgacacaggacgcccgaatcaagaggcacaattacatctgcgaactgcttctcgaggaggcgaagaagaaggactgggtagtgttcaaggaaccgcacataagggattccaacaaggaactgtacaaacctgacctgatatttgtgaaggatgggcgtgcacttgtcgtggatgtgacagtacggtatgaagcagccaaatcatcgctggaggaagccgctgcagagaaagtgagaaagtacaaacacctggaaacggaagtaagacatctcacgaatgcaaaggacgttacttttgtgggctttcccctaggagcgcgggggaaatggcaccaagataactttaaacttttgactgagcttggcctctccaaatcgaggcaagtgaaaatggcagagactttttccacagtagcgctcttttcatctgtggacattgtacatatgtttgccagtagggccagaaaatctatggttatgtgataataggctgccttctgcggggcttgccttctggccatgcccttcttctctcccttgcacctgtacctcttggtctttgaataaagcctgagtaggaaggaccggtaaaaaaaaaaaaaaaaaaaaaaaaaaaaaaacgttgactaaaaaaaaaaaaaaaaaaaaaaaaaaaaaaaaaaaaaaaaaaaaaaaaaaaaaaaaaaaaaaaaaaaaaa

SEQ ID NO: 10715 - DNA, 5264 bp, synthetic construct
  source 1..5264: mol_type = other DNA
gaaataagagagaaaagaagagtaagaagaaatataagagaattcgccaccatggcccctaagaaaaagcggaaggtgaatatcagcggctctagctgcggcagccccaacagcgccgacaccagcagcgacttcaaggacctgtggaccaagctgaaggaatgccacgaccgggaagtgcagggactccaggtgaaggtcaccaaactcaagcaagaaagaatcctggacgcccagagactggaagaattcttcaccaagaaccagcagctgagagagcagcagaaagtgctgcacgagacaatcaaggttctggaagatagactgcgggccggcctgtgcgacagatgcgccgtgaccgaggaacacatgcgcaaaaagcagcaggagttcgagaacattagacagcaaaatctgaaattgatcacagagctgatgaacgagagaaacacactgcaggaggagaacaagaagctgagcgagcagctgcaacagaagatcgagaatgatcagcaacaccaggccgctgagctggaatgtgaagaggacgtgatccccgacagcccaatcacagctttcagcttttctggcgtgaacagactgaggcggaaggaaaacccccacgtgcggtacatcgagcagacccataccaagctggaacacagcgtgtgtgccaacgagatgagaaaggtgtccaagtcctccacccatccccagcacaaccctaacgaaaatgagatcctggtggctgatacctacgaccagtctcagagccctatggccaaggcccacggcaccagctcttatacccctgataagagctccttcaacctggccaccgtggtggccgagacactgggcctgggcgtgcaggaggaaagcgagacacagggcccaatgagccctctgggagatgagctgtaccactgcctggaaggcaaccacaagaaacagccttttgagtccggctccgagactcctggaacaagcgagagcgctacacctgagggcagccctaagagaaaggtgtccagcgccgagggcgctgccaaggaagagcctaaacggagaagcgccagactgagcgccaagccccccgccaaggtggaagccaagcctaagaaggccgccgctaaggacaagagcagcgataagaaagtccagaccaagggcaagcggggcgccaaaggcaaacaggccgaggtggccaaccaggagacaaaggaagatctgcctgctgagaacggcgaaaccaagaccgaggaatctccagcttctgacgaggccggagagaaggaggccaaaagcgacagcggctctgagacacctggaacaagcgagagcgccaccccggaatcctatgaacaacttgcaccacaaccgtgtgtgggagaaactttacattctagcctcccacgagacagtgaactgtttgtgcctgaagaggggagcagcgagaaggagagcgaggacgcgccaaaaacatctcctccgacgcctgggaaacatggtttggaacagactggggaggaaaaagtgatggtgactgttcctgacaaaaatccaccttgtccttgctgtggtacccgggtaaactctgtgttgaatctgattgaacatctgaaagtgtcacacgggaaaaggggggtttgttttcggtgtgcaaaatgtggaaaggaaaatagtaactatcacagtgttgtttgtcattttaagaaatgcaggggtccagagacggagaaagccccagctggggagtggatttgtgaggtatgcaacagagattttacaaccaaaattggcctgggacaacacaagagattggcacacccagcagtgagaaatcaggaaaggatcgttgcttcccaaccgaaagaaacatcaaatagaggtgctcacaaaaggtgctggacaaaggaggaggaagaattactaataagactggaggctcagttcgagggaaacaaaaatattaataagcttattgcagaacacataaccaccaaaacagctaagcagatcagtgacaaaaggcgattgctgtccagaaagccagcagaggagccacgtgaggagcctggaacgtgtcatcacaccaggagagcagctgcgagcctgagaacggagcctgagatgagtcatcacgcccaggcagaggacagagataatggacctgggagacgccctctgccaggcagggcagctgccggagggagaacaatggacgagataagacgccaccctgataagggcaacggacagcagagacccaccaagcaaaaatcagaagaacagctgcaggcttactataaaaagacactagaggaacgactttcagctggggcacttaacaccttcccccgagcattcaagcaggtaatggaaggccgggatataaagctagtaatcaatcagacagcgcaggactgcttcggatgcctggaatccataagccaaataagaacggcaacccgagataaaaaggacacggtgacccgggagaaacacccaaagaaaccttttcagaagtggatgaagaagagagcaatcaaaaaaggtaattatcttcggttccagcgtttattttatcttgatagagggaaactggctaaaatcattttagatgatattgaatgcttgtcttgtgacataccactcagtgaaatttattcggtttttaaaacaagatgggaaacaactggtagctttaaaagccttggggactttaaaacttacgggaaggctgacaacactgccttcagagaattaattacggctaaagaaattgagaaaaatgtgcaggaaatgagcaaaggctcggctcccggtccagacgggattactcttggggacgtcgtaaagatggatcccgagttttcccggaccatggagattttcaatttatggttaacaactggtaaaatcccggacatggtgagggggtgcagaaccgttttgattccaaaatcatcaaagccggatcgtttgaaagacattaataactggagacctatcacgatcggttccatcttgctgagactgttctccaggattgtaacagctaggctgagcaaagcgtgccccctgaacccaaggcaaagaggctttatcagagcggcgggatgctctgaaaacttaaaactcctgcaaactataatttggtcggccaaaagagaacacagaccactgggtgttgtattcgtggacatcgccaaggcttttgacaccgtaagccaccagcacatcattcatgctttgcagcaaagagaggtggatccccacatcgtcggtctggtgagcaatatgtacgagaacatcagtacgtatatcaccacaaagaggaacacacacacagacaaaatccagatccgggttggagtaaagcagggtgacccgatgtcgccccttttatttaacctggcaatggaccctctattatgcaagctggaagagagtggcaaaggataccaccgaggacagagcagcatcacagcgatggcatttgcagacgatctggttttgctgagcgactcctgggaaaatatgaatacaaatattagcatactggagaccttctgcaatctgaccggactcaaaacacaggggcaaaagtgccacggcttttacatcaagccgacaaagaagtcttacaccatcaatgactgcgctgcctggactatcaacggcacacccctgaacatgatcgaccccggcgaatctgagaaatacctcggcctgcagtttgacccgtggattggaatagcaaggtccggtctctccacaaaactagatttttggcttcagcggatcgatcaagcaccacttaaacctctgcagaaaactgatattctcaaaacatacaccatccctcggctgatctacatagctgaccactcagaagtgaaaagcgcactactcgaaacccttgaccagaagatccggacagcggtcaaggaatggcttcacctacctccgtgcacctgcgatgccatcctgtactcgagcacgagagacggcggtttgggcatcaccaaattggcaggactgatccccagcgtgcaggcccgtagactgcatcggatcgcacagtcatctgacgatacgatgaaatgcttcatggaaaaagagaaaatggaacagctgcataagaaattgtggattcaagctggaggggacagagagaacataccctcgatttgggaagcaccaccgtcgagtgaaccaccaaacaacgtgagcacaaattcggaatgggaagcaccgacccagaaagataaatttccaaagccttgcaattggaggaaaaacgaattcaaaaaatggaccaaattggcatcccaaggccgcggaattgtaaattttgaaagagacaaaattagtaaccattggatccaatactacagacgcatacctcacaggaaactcctcactgcactacaactcagggccaacgtttaccccacgagagaatttctagccaggggtagacaagaccaatacatcaaggcgtgtaggcactgcgatgcggacaacgaatcctgcgcccacatcatcggcaactgcccagtgacacaggacgcccgaatcaagaggcacaattacatctgcgaactgcttctcgaggaggcgaagaagaaggactgggtagtgttcaaggaaccgcacataagggattccaacaaggaactgtacaaacctgacctgatatttgtgaaggatgggcgtgcacttgtcgtggatgtgacagtacggtatgaagcagccaaatcatcgctggaggaagccgctgcagagaaagtgagaaagtacaaacacctggaaacggaagtaagacatctcacgaatgcaaaggacgttacttttgtgggctttcccctaggagcgcgggggaaatggcaccaagataactttaaacttttgactgagcttggcctctccaaatcgaggcaagtgaaaatggcagagactttttccacagtagcgctcttttcatctgtggacattgtacatatgtttgccagtagggccagaaaatctatggttatgtgataataggctgccttctgcggggcttgccttctggccatgcccttcttctctcccttgcacctgtacctcttggtctttgaataaagcctgagtaggaaggaccggtaaaaaaaaaaaaaaaaaaaaaaaaaaaaaaacgttgactaaaaaaaaaaaaaaaaaaaaaaaaaaaaaaaaaaaaaaaaaaaaaaaaaaaaaaaaaaaaaaaaaaaaaa

SEQ ID NO: 10716 - DNA, 5309 bp, synthetic construct
  source 1..5309: mol_type = other DNA
gaaataagagagaaaagaagagtaagaagaaatataagagaattcgccaccatggccaaacggacagccgacggaagcgagttcgagtcaccaaagaagaagcggaaagtctctggcggctcaaatatcagcggctctagctgcggcagccccaacagcgccgacaccagcagcgacttcaaggacctgtggaccaagctgaaggaatgccacgaccgggaagtgcagggactccaggtgaaggtcaccaaactcaagcaagaaagaatcctggacgcccagagactggaagaattcttcaccaagaaccagcagctgagagagcagcagaaagtgctgcacgagacaatcaaggttctggaagatagactgcgggccggcctgtgcgacagatgcgccgtgaccgaggaacacatgcgcaaaaagcagcaggagttcgagaacattagacagcaaaatctgaaattgatcacagagctgatgaacgagagaaacacactgcaggaggagaacaagaagctgagcgagcagctgcaacagaagatcgagaatgatcagcaacaccaggccgctgagctggaatgtgaagaggacgtgatccccgacagcccaatcacagctttcagcttttctggcgtgaacagactgaggcggaaggaaaacccccacgtgcggtacatcgagcagacccataccaagctggaacacagcgtgtgtgccaacgagatgagaaaggtgtccaagtcctccacccatccccagcacaaccctaacgaaaatgagatcctggtggctgatacctacgaccagtctcagagccctatggccaaggcccacggcaccagctcttatacccctgataagagctccttcaacctggccaccgtggtggccgagacactgggcctgggcgtgcaggaggaaagcgagacacagggcccaatgagccctctgggagatgagctgtaccactgcctggaaggcaaccacaagaaacagccttttgagtccggctccgagactcctggaacaagcgagagcgctacacctgagggcagccctaagagaaaggtgtccagcgccgagggcgctgccaaggaagagcctaaacggagaagcgccagactgagcgccaagccccccgccaaggtggaagccaagcctaagaaggccgccgctaaggacaagagcagcgataagaaagtccagaccaagggcaagcggggcgccaaaggcaaacaggccgaggtggccaaccaggagacaaaggaagatctgcctgctgagaacggcgaaaccaagaccgaggaatctccagcttctgacgaggccggagagaaggaggccaaaagcgacagcggctctgagacacctggaacaagcgagagcgccaccccggaatcctatgaacaacttgcaccacaaccgtgtgtgggagaaactttacattctagcctcccacgagacagtgaactgtttgtgcctgaagaggggagcagcgagaaggagagcgaggacgcgccaaaaacatctcctccgacgcctgggaaacatggtttggaacagactggggaggaaaaagtgatggtgactgttcctgacaaaaatccaccttgtccttgctgtggtacccgggtaaactctgtgttgaatctgattgaacatctgaaagtgtcacacgggaaaaggggggtttgttttcggtgtgcaaaatgtggaaaggaaaatagtaactatcacagtgttgtttgtcattttaagaaatgcaggggtccagagacggagaaagccccagctggggagtggatttgtgaggtatgcaacagagattttacaaccaaaattggcctgggacaacacaagagattggcacacccagcagtgagaaatcaggaaaggatcgttgcttcccaaccgaaagaaacatcaaatagaggtgctcacaaaaggtgctggacaaaggaggaggaagaattactaataagactggaggctcagttcgagggaaacaaaaatattaataagcttattgcagaacacataaccaccaaaacagctaagcagatcagtgacaaaaggcgattgctgtccagaaagccagcagaggagccacgtgaggagcctggaacgtgtcatcacaccaggagagcagctgcgagcctgagaacggagcctgagatgagtcatcacgcccaggcagaggacagagataatggacctgggagacgccctctgccaggcagggcagctgccggagggagaacaatggacgagataagacgccaccctgataagggcaacggacagcagagacccaccaagcaaaaatcagaagaacagctgcaggcttactataaaaagacactagaggaacgactttcagctggggcacttaacaccttcccccgagcattcaagcaggtaatggaaggccgggatataaagctagtaatcaatcagacagcgcaggactgcttcggatgcctggaatccataagccaaataagaacggcaacccgagataaaaaggacacggtgacccgggagaaacacccaaagaaaccttttcagaagtggatgaagaagagagcaatcaaaaaaggtaattatcttcggttccagcgtttattttatcttgatagagggaaactggctaaaatcattttagatgatattgaatgcttgtcttgtgacataccactcagtgaaatttattcggtttttaaaacaagatgggaaacaactggtagctttaaaagccttggggactttaaaacttacgggaaggctgacaacactgccttcagagaattaattacggctaaagaaattgagaaaaatgtgcaggaaatgagcaaaggctcggctcccggtccagacgggattactcttggggacgtcgtaaagatggatcccgagttttcccggaccatggagattttcaatttatggttaacaactggtaaaatcccggacatggtgagggggtgcagaaccgttttgattccaaaatcatcaaagccggatcgtttgaaagacattaataactggagacctatcacgatcggttccatcttgctgagactgttctccaggattgtaacagctaggctgagcaaagcgtgccccctgaacccaaggcaaagaggctttatcagagcggcgggatgctctgaaaacttaaaactcctgcaaactataatttggtcggccaaaagagaacacagaccactgggtgttgtattcgtggacatcgccaaggcttttgacaccgtaagccaccagcacatcattcatgctttgcagcaaagagaggtggatccccacatcgtcggtctggtgagcaatatgtacgagaacatcagtacgtatatcaccacaaagaggaacacacacacagacaaaatccagatccgggttggagtaaagcagggtgacccgatgtcgccccttttatttaacctggcaatggaccctctattatgcaagctggaagagagtggcaaaggataccaccgaggacagagcagcatcacagcgatggcatttgcagacgatctggttttgctgagcgactcctgggaaaatatgaatacaaatattagcatactggagaccttctgcaatctgaccggactcaaaacacaggggcaaaagtgccacggcttttacatcaagccgacaaagaagtcttacaccatcaatgactgcgctgcctggactatcaacggcacacccctgaacatgatcgaccccggcgaatctgagaaatacctcggcctgcagtttgacccgtggattggaatagcaaggtccggtctctccacaaaactagatttttggcttcagcggatcgatcaagcaccacttaaacctctgcagaaaactgatattctcaaaacatacaccatccctcggctgatctacatagctgaccactcagaagtgaaaagcgcactactcgaaacccttgaccagaagatccggacagcggtcaaggaatggcttcacctacctccgtgcacctgcgatgccatcctgtactcgagcacgagagacggcggtttgggcatcaccaaattggcaggactgatccccagcgtgcaggcccgtagactgcatcggatcgcacagtcatctgacgatacgatgaaatgcttcatggaaaaagagaaaatggaacagctgcataagaaattgtggattcaagctggaggggacagagagaacataccctcgatttgggaagcaccaccgtcgagtgaaccaccaaacaacgtgagcacaaattcggaatgggaagcaccgacccagaaagataaatttccaaagccttgcaattggaggaaaaacgaattcaaaaaatggaccaaattggcatcccaaggccgcggaattgtaaattttgaaagagacaaaattagtaaccattggatccaatactacagacgcatacctcacaggaaactcctcactgcactacaactcagggccaacgtttaccccacgagagaatttctagccaggggtagacaagaccaatacatcaaggcgtgtaggcactgcgatgcggacaacgaatcctgcgcccacatcatcggcaactgcccagtgacacaggacgcccgaatcaagaggcacaattacatctgcgaactgcttctcgaggaggcgaagaagaaggactgggtagtgttcaaggaaccgcacataagggattccaacaaggaactgtacaaacctgacctgatatttgtgaaggatgggcgtgcacttgtcgtggatgtgacagtacggtatgaagcagccaaatcatcgctggaggaagccgctgcagagaaagtgagaaagtacaaacacctggaaacggaagtaagacatctcacgaatgcaaaggacgttacttttgtgggctttcccctaggagcgcgggggaaatggcaccaagataactttaaacttttgactgagcttggcctctccaaatcgaggcaagtgaaaatggcagagactttttccacagtagcgctcttttcatctgtggacattgtacatatgtttgccagtagggccagaaaatctatggttatgtgataataggctgccttctgcggggcttgccttctggccatgcccttcttctctcccttgcacctgtacctcttggtctttgaataaagcctgagtaggaaggaccggtaaaaaaaaaaaaaaaaaaaaaaaaaaaaaaacgttgactaaaaaaaaaaaaaaaaaaaaaaaaaaaaaaaaaaaaaaaaaaaaaaaaaaaaaaaaaaaaaaaaaaaaaa

SEQ ID NO: 10717 - DNA, 5348 bp, synthetic construct
  source 1..5348: mol_type = other DNA
gaaataagagagaaaagaagagtaagaagaaatataagagaattcgccaccatgcctaagaaaaaaacaggcgctagaaagaaggccgagaaccggagagagcgggaaaagcagctgagagcctctagaagcaccatcgacctggccaagtctggcggctcaaatatcagcggctctagctgcggcagccccaacagcgccgacaccagcagcgacttcaaggacctgtggaccaagctgaaggaatgccacgaccgggaagtgcagggactccaggtgaaggtcaccaaactcaagcaagaaagaatcctggacgcccagagactggaagaattcttcaccaagaaccagcagctgagagagcagcagaaagtgctgcacgagacaatcaaggttctggaagatagactgcgggccggcctgtgcgacagatgcgccgtgaccgaggaacacatgcgcaaaaagcagcaggagttcgagaacattagacagcaaaatctgaaattgatcacagagctgatgaacgagagaaacacactgcaggaggagaacaagaagctgagcgagcagctgcaacagaagatcgagaatgatcagcaacaccaggccgctgagctggaatgtgaagaggacgtgatccccgacagcccaatcacagctttcagcttttctggcgtgaacagactgaggcggaaggaaaacccccacgtgcggtacatcgagcagacccataccaagctggaacacagcgtgtgtgccaacgagatgagaaaggtgtccaagtcctccacccatccccagcacaaccctaacgaaaatgagatcctggtggctgatacctacgaccagtctcagagccctatggccaaggcccacggcaccagctcttatacccctgataagagctccttcaacctggccaccgtggtggccgagacactgggcctgggcgtgcaggaggaaagcgagacacagggcccaatgagccctctgggagatgagctgtaccactgcctggaaggcaaccacaagaaacagccttttgagtccggctccgagactcctggaacaagcgagagcgctacacctgagggcagccctaagagaaaggtgtccagcgccgagggcgctgccaaggaagagcctaaacggagaagcgccagactgagcgccaagccccccgccaaggtggaagccaagcctaagaaggccgccgctaaggacaagagcagcgataagaaagtccagaccaagggcaagcggggcgccaaaggcaaacaggccgaggtggccaaccaggagacaaaggaagatctgcctgctgagaacggcgaaaccaagaccgaggaatctccagcttctgacgaggccggagagaaggaggccaaaagcgacagcggctctgagacacctggaacaagcgagagcgccaccccggaatcctatgaacaacttgcaccacaaccgtgtgtgggagaaactttacattctagcctcccacgagacagtgaactgtttgtgcctgaagaggggagcagcgagaaggagagcgaggacgcgccaaaaacatctcctccgacgcctgggaaacatggtttggaacagactggggaggaaaaagtgatggtgactgttcctgacaaaaatccaccttgtccttgctgtggtacccgggtaaactctgtgttgaatctgattgaacatctgaaagtgtcacacgggaaaaggggggtttgttttcggtgtgcaaaatgtggaaaggaaaatagtaactatcacagtgttgtttgtcattttaagaaatgcaggggtccagagacggagaaagccccagctggggagtggatttgtgaggtatgcaacagagattttacaaccaaaattggcctgggacaacacaagagattggcacacccagcagtgagaaatcaggaaaggatcgttgcttcccaaccgaaagaaacatcaaatagaggtgctcacaaaaggtgctggacaaaggaggaggaagaattactaataagactggaggctcagttcgagggaaacaaaaatattaataagcttattgcagaacacataaccaccaaaacagctaagcagatcagtgacaaaaggcgattgctgtccagaaagccagcagaggagccacgtgaggagcctggaacgtgtcatcacaccaggagagcagctgcgagcctgagaacggagcctgagatgagtcatcacgcccaggcagaggacagagataatggacctgggagacgccctctgccaggcagggcagctgccggagggagaacaatggacgagataagacgccaccctgataagggcaacggacagcagagacccaccaagcaaaaatcagaagaacagctgcaggcttactataaaaagacactagaggaacgactttcagctggggcacttaacaccttcccccgagcattcaagcaggtaatggaaggccgggatataaagctagtaatcaatcagacagcgcaggactgcttcggatgcctggaatccataagccaaataagaacggcaacccgagataaaaaggacacggtgacccgggagaaacacccaaagaaaccttttcagaagtggatgaagaagagagcaatcaaaaaaggtaattatcttcggttccagcgtttattttatcttgatagagggaaactggctaaaatcattttagatgatattgaatgcttgtcttgtgacataccactcagtgaaatttattcggtttttaaaacaagatgggaaacaactggtagctttaaaagccttggggactttaaaacttacgggaaggctgacaacactgccttcagagaattaattacggctaaagaaattgagaaaaatgtgcaggaaatgagcaaaggctcggctcccggtccagacgggattactcttggggacgtcgtaaagatggatcccgagttttcccggaccatggagattttcaatttatggttaacaactggtaaaatcccggacatggtgagggggtgcagaaccgttttgattccaaaatcatcaaagccggatcgtttgaaagacattaataactggagacctatcacgatcggttccatcttgctgagactgttctccaggattgtaacagctaggctgagcaaagcgtgccccctgaacccaaggcaaagaggctttatcagagcggcgggatgctctgaaaacttaaaactcctgcaaactataatttggtcggccaaaagagaacacagaccactgggtgttgtattcgtggacatcgccaaggcttttgacaccgtaagccaccagcacatcattcatgctttgcagcaaagagaggtggatccccacatcgtcggtctggtgagcaatatgtacgagaacatcagtacgtatatcaccacaaagaggaacacacacacagacaaaatccagatccgggttggagtaaagcagggtgacccgatgtcgccccttttatttaacctggcaatggaccctctattatgcaagctggaagagagtggcaaaggataccaccgaggacagagcagcatcacagcgatggcatttgcagacgatctggttttgctgagcgactcctgggaaaatatgaatacaaatattagcatactggagaccttctgcaatctgaccggactcaaaacacaggggcaaaagtgccacggcttttacatcaagccgacaaagaagtcttacaccatcaatgactgcgctgcctggactatcaacggcacacccctgaacatgatcgaccccggcgaatctgagaaatacctcggcctgcagtttgacccgtggattggaatagcaaggtccggtctctccacaaaactagatttttggcttcagcggatcgatcaagcaccacttaaacctctgcagaaaactgatattctcaaaacatacaccatccctcggctgatctacatagctgaccactcagaagtgaaaagcgcactactcgaaacccttgaccagaagatccggacagcggtcaaggaatggcttcacctacctccgtgcacctgcgatgccatcctgtactcgagcacgagagacggcggtttgggcatcaccaaattggcaggactgatccccagcgtgcaggcccgtagactgcatcggatcgcacagtcatctgacgatacgatgaaatgcttcatggaaaaagagaaaatggaacagctgcataagaaattgtggattcaagctggaggggacagagagaacataccctcgatttgggaagcaccaccgtcgagtgaaccaccaaacaacgtgagcacaaattcggaatgggaagcaccgacccagaaagataaatttccaaagccttgcaattggaggaaaaacgaattcaaaaaatggaccaaattggcatcccaaggccgcggaattgtaaattttgaaagagacaaaattagtaaccattggatccaatactacagacgcatacctcacaggaaactcctcactgcactacaactcagggccaacgtttaccccacgagagaatttctagccaggggtagacaagaccaatacatcaaggcgtgtaggcactgcgatgcggacaacgaatcctgcgcccacatcatcggcaactgcccagtgacacaggacgcccgaatcaagaggcacaattacatctgcgaactgcttctcgaggaggcgaagaagaaggactgggtagtgttcaaggaaccgcacataagggattccaacaaggaactgtacaaacctgacctgatatttgtgaaggatgggcgtgcacttgtcgtggatgtgacagtacggtatgaagcagccaaatcatcgctggaggaagccgctgcagagaaagtgagaaagtacaaacacctggaaacggaagtaagacatctcacgaatgcaaaggacgttacttttgtgggctttcccctaggagcgcgggggaaatggcaccaagataactttaaacttttgactgagcttggcctctccaaatcgaggcaagtgaaaatggcagagactttttccacagtagcgctcttttcatctgtggacattgtacatatgtttgccagtagggccagaaaatctatggttatgtgataataggctgccttctgcggggcttgccttctggccatgcccttcttctctcccttgcacctgtacctcttggtctttgaataaagcctgagtaggaaggaccggtaaaaaaaaaaaaaaaaaaaaaaaaaaaaaaacgttgactaaaaaaaaaaaaaaaaaaaaaaaaaaaaaaaaaaaaaaaaaaaaaaaaaaaaaaaaaaaaaaaaaaaaaa

SEQ ID NO: 10718 - DNA, 5282 bp, synthetic construct
  source 1..5282: mol_type = other DNA
gaaataagagagaaaagaagagtaagaagaaatataagagaattcgccaccatggcccctaagaaaaagcggaaggtgaggaggagaaggaggagaaatatcagcggctctagctgcggcagccccaacagcgccgacaccagcagcgacttcaaggacctgtggaccaagctgaaggaatgccacgaccgggaagtgcagggactccaggtgaaggtcaccaaactcaagcaagaaagaatcctggacgcccagagactggaagaattcttcaccaagaaccagcagctgagagagcagcagaaagtgctgcacgagacaatcaaggttctggaagatagactgcgggccggcctgtgcgacagatgcgccgtgaccgaggaacacatgcgcaaaaagcagcaggagttcgagaacattagacagcaaaatctgaaattgatcacagagctgatgaacgagagaaacacactgcaggaggagaacaagaagctgagcgagcagctgcaacagaagatcgagaatgatcagcaacaccaggccgctgagctggaatgtgaagaggacgtgatccccgacagcccaatcacagctttcagcttttctggcgtgaacagactgaggcggaaggaaaacccccacgtgcggtacatcgagcagacccataccaagctggaacacagcgtgtgtgccaacgagatgagaaaggtgtccaagtcctccacccatccccagcacaaccctaacgaaaatgagatcctggtggctgatacctacgaccagtctcagagccctatggccaaggcccacggcaccagctcttatacccctgataagagctccttcaacctggccaccgtggtggccgagacactgggcctgggcgtgcaggaggaaagcgagacacagggcccaatgagccctctgggagatgagctgtaccactgcctggaaggcaaccacaagaaacagccttttgagtccggctccgagactcctggaacaagcgagagcgctacacctgagggcagccctaagagaaaggtgtccagcgccgagggcgctgccaaggaagagcctaaacggagaagcgccagactgagcgccaagccccccgccaaggtggaagccaagcctaagaaggccgccgctaaggacaagagcagcgataagaaagtccagaccaagggcaagcggggcgccaaaggcaaacaggccgaggtggccaaccaggagacaaaggaagatctgcctgctgagaacggcgaaaccaagaccgaggaatctccagcttctgacgaggccggagagaaggaggccaaaagcgacagcggctctgagacacctggaacaagcgagagcgccaccccggaatcctatgaacaacttgcaccacaaccgtgtgtgggagaaactttacattctagcctcccacgagacagtgaactgtttgtgcctgaagaggggagcagcgagaaggagagcgaggacgcgccaaaaacatctcctccgacgcctgggaaacatggtttggaacagactggggaggaaaaagtgatggtgactgttcctgacaaaaatccaccttgtccttgctgtggtacccgggtaaactctgtgttgaatctgattgaacatctgaaagtgtcacacgggaaaaggggggtttgttttcggtgtgcaaaatgtggaaaggaaaatagtaactatcacagtgttgtttgtcattttaagaaatgcaggggtccagagacggagaaagccccagctggggagtggatttgtgaggtatgcaacagagattttacaaccaaaattggcctgggacaacacaagagattggcacacccagcagtgagaaatcaggaaaggatcgttgcttcccaaccgaaagaaacatcaaatagaggtgctcacaaaaggtgctggacaaaggaggaggaagaattactaataagactggaggctcagttcgagggaaacaaaaatattaataagcttattgcagaacacataaccaccaaaacagctaagcagatcagtgacaaaaggcgattgctgtccagaaagccagcagaggagccacgtgaggagcctggaacgtgtcatcacaccaggagagcagctgcgagcctgagaacggagcctgagatgagtcatcacgcccaggcagaggacagagataatggacctgggagacgccctctgccaggcagggcagctgccggagggagaacaatggacgagataagacgccaccctgataagggcaacggacagcagagacccaccaagcaaaaatcagaagaacagctgcaggcttactataaaaagacactagaggaacgactttcagctggggcacttaacaccttcccccgagcattcaagcaggtaatggaaggccgggatataaagctagtaatcaatcagacagcgcaggactgcttcggatgcctggaatccataagccaaataagaacggcaacccgagataaaaaggacacggtgacccgggagaaacacccaaagaaaccttttcagaagtggatgaagaagagagcaatcaaaaaaggtaattatcttcggttccagcgtttattttatcttgatagagggaaactggctaaaatcattttagatgatattgaatgcttgtcttgtgacataccactcagtgaaatttattcggtttttaaaacaagatgggaaacaactggtagctttaaaagccttggggactttaaaacttacgggaaggctgacaacactgccttcagagaattaattacggctaaagaaattgagaaaaatgtgcaggaaatgagcaaaggctcggctcccggtccagacgggattactcttggggacgtcgtaaagatggatcccgagttttcccggaccatggagattttcaatttatggttaacaactggtaaaatcccggacatggtgagggggtgcagaaccgttttgattccaaaatcatcaaagccggatcgtttgaaagacattaataactggagacctatcacgatcggttccatcttgctgagactgttctccaggattgtaacagctaggctgagcaaagcgtgccccctgaacccaaggcaaagaggctttatcagagcggcgggatgctctgaaaacttaaaactcctgcaaactataatttggtcggccaaaagagaacacagaccactgggtgttgtattcgtggacatcgccaaggcttttgacaccgtaagccaccagcacatcattcatgctttgcagcaaagagaggtggatccccacatcgtcggtctggtgagcaatatgtacgagaacatcagtacgtatatcaccacaaagaggaacacacacacagacaaaatccagatccgggttggagtaaagcagggtgacccgatgtcgccccttttatttaacctggcaatggaccctctattatgcaagctggaagagagtggcaaaggataccaccgaggacagagcagcatcacagcgatggcatttgcagacgatctggttttgctgagcgactcctgggaaaatatgaatacaaatattagcatactggagaccttctgcaatctgaccggactcaaaacacaggggcaaaagtgccacggcttttacatcaagccgacaaagaagtcttacaccatcaatgactgcgctgcctggactatcaacggcacacccctgaacatgatcgaccccggcgaatctgagaaatacctcggcctgcagtttgacccgtggattggaatagcaaggtccggtctctccacaaaactagatttttggcttcagcggatcgatcaagcaccacttaaacctctgcagaaaactgatattctcaaaacatacaccatccctcggctgatctacatagctgaccactcagaagtgaaaagcgcactactcgaaacccttgaccagaagatccggacagcggtcaaggaatggcttcacctacctccgtgcacctgcgatgccatcctgtactcgagcacgagagacggcggtttgggcatcaccaaattggcaggactgatccccagcgtgcaggcccgtagactgcatcggatcgcacagtcatctgacgatacgatgaaatgcttcatggaaaaagagaaaatggaacagctgcataagaaattgtggattcaagctggaggggacagagagaacataccctcgatttgggaagcaccaccgtcgagtgaaccaccaaacaacgtgagcacaaattcggaatgggaagcaccgacccagaaagataaatttccaaagccttgcaattggaggaaaaacgaattcaaaaaatggaccaaattggcatcccaaggccgcggaattgtaaattttgaaagagacaaaattagtaaccattggatccaatactacagacgcatacctcacaggaaactcctcactgcactacaactcagggccaacgtttaccccacgagagaatttctagccaggggtagacaagaccaatacatcaaggcgtgtaggcactgcgatgcggacaacgaatcctgcgcccacatcatcggcaactgcccagtgacacaggacgcccgaatcaagaggcacaattacatctgcgaactgcttctcgaggaggcgaagaagaaggactgggtagtgttcaaggaaccgcacataagggattccaacaaggaactgtacaaacctgacctgatatttgtgaaggatgggcgtgcacttgtcgtggatgtgacagtacggtatgaagcagccaaatcatcgctggaggaagccgctgcagagaaagtgagaaagtacaaacacctggaaacggaagtaagacatctcacgaatgcaaaggacgttacttttgtgggctttcccctaggagcgcgggggaaatggcaccaagataactttaaacttttgactgagcttggcctctccaaatcgaggcaagtgaaaatggcagagactttttccacagtagcgctcttttcatctgtggacattgtacatatgtttgccagtagggccagaaaatctatggttatgtgataataggctgccttctgcggggcttgccttctggccatgcccttcttctctcccttgcacctgtacctcttggtctttgaataaagcctgagtaggaaggaccggtaaaaaaaaaaaaaaaaaaaaaaaaaaaaaaacgttgactaaaaaaaaaaaaaaaaaaaaaaaaaaaaaaaaaaaaaaaaaaaaaaaaaaaaaaaaaaaaaaaaaaaaaa

SEQ ID NO: 10719 - DNA, 4564 bp, synthetic construct
  source 1..4564: mol_type = other DNA
ggtctagttacaactgggcatcgctgcagagatcgcacctcctcgtggtcccgctggtagcccttcgaagggtgactaagtcgatctctgccccaggtacggagccgttgggactcaccagtccaacgtaactcctgcctaaattcggtgaaacaaattcctcggtaaaaagccccatggctagctgccctaagcctggacctcctgtgtctgctggcgctatgagcctggagagcggacttaccacccactctgtgctggccatcgagagaggccccaactctctggccaactctggcagcgatttcggcggaggaggacttggcctgcctctgagacttctgagagtttctgtgggcacccagaccagcagaagcgactgggtcgaccttgtgagctggagccaccctggtcctacaagcaagagccagcaggtcgatctggtgagcctgttccccaagcacagagtcgacctgctgagcaagaacgaccaggtcgacttggtggcccagttcctgcctagcaagttccctcccaacctggctgagaacgacttagccctgctggtgaacctggagttctatcgttccgacctgcacgtgtacgagtgcgtgcacttcgctgcccattgggagggcttaagcggccttcctgaggtgtacgaacagctggctccccagccctgtgtaggcgagacattacacagcagcctgcccagagacagcgagctgttcgttccggaagagggctctagcgagaaggagagcgaggacgctcctaagaccagccctcctacccctggcaaacacggcctggagcaaacaggcgaggagaaggtcatggtgaccgtgcccgacaagaaccctccctgtccttgctgtggcacaagagtcaacagcgtgctgaacctcatcgagcacctgaaggtgtcccacggcaagagaggcgtgtgcttcagatgcgccaagtgcggcaaggagaacagcaactaccacagcgtcgtgtgccacttcaagaagtgcagaggccctgagaccgagaaggctcccgctggcgaatggatttgcgaggtgtgcaacagagacttcaccaccaagatcggcctgggccagcacaagcggttagctcaccctgctgtgagaaaccaggagagaatcgtggccagccagcccaaggagacaagcaacaggggcgctcacaagagatgctggaccaaggaggaagaggagctgctcatcagactggaggctcagttcgagggcaacaagaacatcaataagcttatcgccgagcacatcaccacaaagaccgccaagcagatcagcgacaagaggagactgctgtccagaaagcccgccgaggagcctagagaggaacctggtacatgtcaccacaccagaagagccgccgctagcctgagaaccgagcccgaaatgtctcaccacgctcaggccgaggacagagacaacggccctggcaggagacctcttcccggcagagctgctgctggaggcagaaccatggacgagatcaggagacaccccgataagggcaacggccagcagagacccacaaagcagaagtccgaggaacagctccaggcctactacaagaaaaccctggaggagagactgtccgcgggagctctgaacaccttccctagagccttcaaacaagtcatggagggcagagacatcaagctggtgatcaaccagaccgcccaggactgcttcggctgccttgagtctatcagccagatcaggaccgccacacgggataagaaggacaccgtcaccagagagaagcaccccaagaagcccttccagaaatggatgaagaagagggccatcaagaagggcaattacctgagattccagaggctgttctacctggacagaggcaagctggccaagatcatcctggacgacatcgagtgcctgagctgcgacatccctctgagcgagatctacagcgtgttcaagaccagatgggagaccaccggcagcttcaagtctctgggcgacttcaagacatacggcaaggccgacaacaccgccttcagagagctcatcaccgctaaggagatcgagaagaacgtgcaggagatgagcaagggcagcgctcctggccccgatggaattacactgggcgatgtggtgaagatggaccccgagttcagcagaacaatggagatcttcaacctgtggctcaccacaggcaagatccccgacatggtgagaggctgcagaaccgtgcttatccccaagagcagcaagcccgacagactgaaggatatcaacaactggagacccatcaccatcggcagcatcctgctgcggctgttcagccggattgtgaccgctagactgagcaaagcctgtcccctgaaccccagacagagaggcttcatcagagccgctggctgcagcgagaacctgaagctgctccagacaatcatctggagcgccaagagagagcacagacccctgggcgttgttttcgtggacatcgccaaggccttcgacaccgtgtcccatcagcacattatccacgccctgcagcagagggaggtcgaccctcatattgtgggcctggtgtccaacatgtacgagaacatctccacctatattacgaccaagagaaacacccacacagacaagatccagatccgggtcggcgtcaagcagggcgatcctatgtctcctctgctgttcaacctcgccatggaccctctgctctgcaagctcgaggagtctggaaagggctaccatagaggccaatcatcgatcaccgccatggccttcgccgacgacctggtgcttttaagcgacagctgggagaacatgaacaccaacatctctatcctggagacattctgcaaccttaccggcctgaaaacccagggccagaagtgtcatggcttctacatcaaacccaccaagaagagctacaccatcaacgactgcgccgcctggacaatcaacggcacccctctcaacatgatcgaccccggcgagtctgagaagtacctgggcctgcagttcgatccctggatcggcatcgctagaagcggcttgagcaccaagctggacttttggctccaacgcatagaccaggcccccctgaagcctcttcagaaaaccgacattttgaaaacttatacgatccccagactcatctacatcgccgaccactccgaggtcaagagcgctctgctggaaaccctggaccagaaaatcagaaccgccgtcaaggaatggctgcacctgcccccttgcacatgcgacgctatcctgtacagcagcaccagggacggcggcttaggaatcaccaagttagccggcctcatccccagcgtgcaggctaggagactccacagaatcgcccagagcagcgacgacaccatgaagtgcttcatggagaaggaaaagatggagcagctgcacaagaagctgtggatccaagcgggcggagatcgtgagaacattcccagcatctgggaggcccctcccagctcagaacctcccaataacgtgtccaccaattctgaatgggaggctcccacccagaaggataagtttcccaagccctgcaactggcggaagaacgagttcaaaaaatggacaaagctggctagccagggcaggggcatcgtgaacttcgaaagggacaagattagcaaccactggatccagtactacagaagaatcccccacagaaagctcctcaccgccctccagttacgtgcaaacgtgtacccaaccagagaattcctggccagaggcagacaggaccagtacatcaaggcctgccggcactgcgatgccgataacgagagctgtgctcacatcatcggcaactgccccgtcacccaggacgccagaatcaagagacacaactacatctgcgagttacttctggaggaagccaagaagaaggattgggttgtgttcaaggagccccacatcagagactccaacaaggagctgtacaagccagacctcatcttcgtgaaggacgctagagccctggtggtggacgtcaccgtcagatacgaggctgctaagtccagccttgaggaggctgccgccgagaaagtgcggaagtacaagcacctggaaacagaggtcagacacctcaccaacgccaaggacgttaccttcgtgggcttccccctaggtgctagaggcaaatggcaccaggacaacttcaagctgcttaccgagctgggcctctccaagagccgacaggttaagatggccgagaccttcagcaccgtcgccctgttctcttctgtggacattgtgcacatgttcgcctccagagccagaaagagcatggtgatgtgataataggctgccttctgcggggcttgccttctggccatgcccttcttctctcccttgcacctgtacctcttggtctttgaataaagcctgagtaggaaggaccggtaaaaaaaaaaaaaaaaaaaaaaaaaaaaaaacgttgactaaaaaaaaaaaaaaaaaaaaaaaaaaaaaaaaaaaaaaaaaaaaaaaaaaaaaaaaaaaaaaaaaaaaaa

SEQ ID NO: 10720 - DNA, 4564 bp, synthetic construct
  source 1..4564: mol_type = other DNA
ggtctagttacaactgggcatcgctgcagagatcgcacctcctcgtggtcccgctggtagcccttcgaagggtgactaagtcgatctctgccccaggtacggagccgttgggactcaccagtccaacgtaactcctgcctaaattcggtgaaacaaattcctcggtaaaaagccccatggctagctgccctaagcctggacctcctgtgtctgctggcgctatgagcctggagagcggacttaccacccactctgtgctggccatcgagagaggccccaactctctggccaactctggcagcgatttcggcggaggaggacttggcctgcctctgagacttctgagagtttctgtgggcacccagaccagcagaagcgactgggtcgaccttgtgagctggagccaccctggtcctacaagcaagagccagcaggtcgatctggtgagcctgttccccaagcacagagtcgacctgctgagcaagaacgaccaggtcgacttggtggcccagttcctgcctagcaagttccctcccaacctggctgagaacgacttagccctgctggtgaacctggagttctatcgttccgacctgcacgtgtacgagtgcgtgcacttcgctgcccattgggagggcttaagcggccttcctgaggtgtacgaacagctggctccccagccctgtgtaggcgagacattacacagcagcctgcccagagacagcgagctgttcgttccggaagagggctctagcgagaaggagagcgaggacgctcctaagaccagccctcctacccctggcaaacacggcctggagcaaacaggcgaggagaaggtcatggtgaccgtgcccgacaagaaccctccctgtccttgctgtggcacaagagtcaacagcgtgctgaacctcatcgagcacctgaaggtgtcccacggcaagagaggcgtgtgcttcagatgcgccaagtgcggcaaggagaacagcaactaccacagcgtcgtgtgccacttcaagaagtgcagaggccctgagaccgagaaggctcccgctggcgaatggatttgcgaggtgtgcaacagagacttcaccaccaagatcggcctgggccagcacaagcggttagctcaccctgctgtgagaaaccaggagagaatcgtggccagccagcccaaggagacaagcaacaggggcgctcacaagagatgctggaccaaggaggaagaggagctgctcatcagactggaggctcagttcgagggcaacaagaacatcaataagcttatcgccgagcacatcaccacaaagaccgccaagcagatcagcgacaagaggagactgctgtccagaaagcccgccgaggagcctagagaggaacctggtacatgtcaccacaccagaagagccgccgctagcctgagaaccgagcccgaaatgtctcaccacgctcaggccgaggacagagacaacggccctggcaggagacctcttcccggcagagctgctgctggaggcagaaccatggacgagatcaggagacaccccgataagggcaacggccagcagagacccacaaagcagaagtccgaggaacagctccaggcctactacaagaaaaccctggaggagagactgtccgcgggagctctgaacaccttccctagagccttcaaacaagtcatggagggcagagacatcaagctggtgatcaaccagaccgcccaggactgcttcggctgccttgagtctatcagccagatcaggaccgccacacgggataagaaggacaccgtcaccagagagaagcaccccaagaagcccttccagaaatggatgaagaagagggccatcaagaagggcaattacctgagattccagaggctgttctacctggacagaggcaagctggccaagatcatcctggacgacatcgagtgcctgagctgcgacatccctctgagcgagatctacagcgtgttcaagaccagatgggagaccaccggcagcttcaagtctctgggcgacttcaagacatacggcaaggccgacaacaccgccttcagagagctcatcaccgctaaggagatcgagaagaacgtgcaggagatgagcaagggcagcgctcctggccccgatggaattacactgggcgatgtggtgaagatggaccccgagttcagcagaacaatggagatcttcaacctgtggctcaccacaggcaagatccccgacatggtgagaggctgcagaaccgtgcttatccccaagagcagcaagcccgacagactgaaggatatcaacaactggagacccatcaccatcggcagcatcctgctgcggctgttcagccggattgtgaccgctagactgagcaaagcctgtcccctgaaccccagacagagaggcttcatcagagccgctggctgcagcgagaacctgaagctgctccagacaatcatctggagcgccaagagagagcacagacccctgggcgttgttttcgtggacatcgccaaggccttcgacaccgtgtcccatcagcacattatccacgccctgcagcagagggaggtcgaccctcatattgtgggcctggtgtccaacatgtacgagaacatctccacctatattacgaccaagagaaacacccacacagacaagatccagatccgggtcggcgtcaagcagggcgatcctatgtctcctctgctgttcaacctcgccatggaccctctgctctgcaagctcgaggagtctggaaagggctaccatagaggccaatcatcgatcaccgccatggccttcgccgacgacctggtgcttttaagcgacagctgggagaacatgaacaccaacatctctatcctggagacattctgcaaccttaccggcctgaaaacccagggccagaagtgtcatggcttctacatcaaacccaccaagaagagctacaccatcaacgactgcgccgcctggacaatcaacggcacccctctcaacatgatcgaccccggcgagtctgagaagtacctgggcctgcagttcgatccctggatcggcatcgctagaagcggcttgagcaccaagctggacttttggctccaacgcatagaccaggcccccctgaagcctcttcagaaaaccgacattttgaaaacttatacgatccccagactcatctacatcgccgaccactccgaggtcaagagcgctctgctggaaaccctggaccagaaaatcagaaccgccgtcaaggaatggctgcacctgcccccttgcacatgcgacgctatcctgtacagcagcaccagggacggcggcttaggaatcaccaagttagccggcctcatccccagcgtgcaggctaggagactccacagaatcgcccagagcagcgacgacaccatgaagtgcttcatggagaaggaaaagatggagcagctgcacaagaagctgtggatccaagcgggcggagatcgtgagaacattcccagcatctgggaggcccctcccagctcagaacctcccaataacgtgtccaccaattctgaatgggaggctcccacccagaaggataagtttcccaagccctgcaactggcggaagaacgagttcaaaaaatggacaaagctggctagccagggcaggggcatcgtgaacttcgaaagggacaagattagcaaccactggatccagtactacagaagaatcccccacagaaagctcctcaccgccctccagttacgtgcaaacgtgtacccaaccagagaattcctggccagaggcagacaggaccagtacatcaaggcctgccggcactgcgatgccgataacgagagctgtgctcacatcatcggcaactgccccgtcacccaggacgccagaatcaagagacacaactacatctgcgagttacttctggaggaagccaagaagaaggattgggttgtgttcaaggagccccacatcagagactccaacaaggagctgtacaagccagacctcatcttcgtgaaggacggcagagccctggtggtggacgtcaccgtcagatacgaggctgctaagtccagccttgaggaggctgccgccgagaaagtgcggaagtacaagcacctggaaacagaggtcagacacctcaccaacgccaaggacgttaccttcgtgggcttccccctaggtgctagaggcaaatggcaccaggacaacttcaagctgcttaccgagctgggcctctccaagagccgacaggttaagatggccgagaccttcagcaccgtcgccctgttctcttctgtggacattgtgcacatgttcgcctccagagccagaaagagcatggtgatgtgataataggctgccttctgcggggcttgccttctggccatgcccttcttctctcccttgcacctgtacctcttggtctttgaataaagcctgagtaggaaggaccggtaaaaaaaaaaaaaaaaaaaaaaaaaaaaaaacgttgactaaaaaaaaaaaaaaaaaaaaaaaaaaaaaaaaaaaaaaaaaaaaaaaaaaaaaaaaaaaaaaaaaaaaaa

SEQ ID NO: 10721 - DNA, 5389 bp, synthetic construct
  source 1..5389: mol_type = other DNA
ggtctagttacaactgggcatcgctgcagagatcgcacctcctcgtggtcccgctggtagcccttcgaagggtgactaagtcgatctctgccccaggtacggagccgttgggactcaccagtccaacgtaactcctgcctaaattcggtgaaacaaattcctcggtaaaaagccccatggcccctaagaaaaagcggaaggtgaatatcagcggctctagctgcggcagccccaacagcgccgacaccagcagcgacttcaaggacctgtggaccaagctgaaggaatgccacgaccgggaagtgcagggactccaggtgaaggtcaccaaactcaagcaagaaagaatcctggacgcccagagactggaagaattcttcaccaagaaccagcagctgagagagcagcagaaagtgctgcacgagacaatcaaggttctggaagatagactgcgggccggcctgtgcgacagatgcgccgtgaccgaggaacacatgcgcaaaaagcagcaggagttcgagaacattagacagcaaaatctgaaattgatcacagagctgatgaacgagagaaacacactgcaggaggagaacaagaagctgagcgagcagctgcaacagaagatcgagaatgatcagcaacaccaggccgctgagctggaatgtgaagaggacgtgatccccgacagcccaatcacagctttcagcttttctggcgtgaacagactgaggcggaaggaaaacccccacgtgcggtacatcgagcagacccataccaagctggaacacagcgtgtgtgccaacgagatgagaaaggtgtccaagtcctccacccatccccagcacaaccctaacgaaaatgagatcctggtggctgatacctacgaccagtctcagagccctatggccaaggcccacggcaccagctcttatacccctgataagagctccttcaacctggccaccgtggtggccgagacactgggcctgggcgtgcaggaggaaagcgagacacagggcccaatgagccctctgggagatgagctgtaccactgcctggaaggcaaccacaagaaacagccttttgagtccggctccgagactcctggaacaagcgagagcgctacacctgagggcagccctaagagaaaggtgtccagcgccgagggcgctgccaaggaagagcctaaacggagaagcgccagactgagcgccaagccccccgccaaggtggaagccaagcctaagaaggccgccgctaaggacaagagcagcgataagaaagtccagaccaagggcaagcggggcgccaaaggcaaacaggccgaggtggccaaccaggagacaaaggaagatctgcctgctgagaacggcgaaaccaagaccgaggaatctccagcttctgacgaggccggagagaaggaggccaaaagcgacagcggctctgagacacctggaacaagcgagagcgccaccccggaatcctacgaacagctggctccccagccctgtgtaggcgagacattacacagcagcctgcccagagacagcgagctgttcgttccggaagagggctctagcgagaaggagagcgaggacgctcctaagaccagccctcctacccctggcaaacacggcctggagcaaacaggcgaggagaaggtcatggtgaccgtgcccgacaagaaccctccctgtccttgctgtggcacaagagtcaacagcgtgctgaacctcatcgagcacctgaaggtgtcccacggcaagagaggcgtgtgcttcagatgcgccaagtgcggcaaggagaacagcaactaccacagcgtcgtgtgccacttcaagaagtgcagaggccctgagaccgagaaggctcccgctggcgaatggatttgcgaggtgtgcaacagagacttcaccaccaagatcggcctgggccagcacaagcggttagctcaccctgctgtgagaaaccaggagagaatcgtggccagccagcccaaggagacaagcaacaggggcgctcacaagagatgctggaccaaggaggaagaggagctgctcatcagactggaggctcagttcgagggcaacaagaacatcaataagcttatcgccgagcacatcaccacaaagaccgccaagcagatcagcgacaagaggagactgctgtccagaaagcccgccgaggagcctagagaggaacctggtacatgtcaccacaccagaagagccgccgctagcctgagaaccgagcccgaaatgtctcaccacgctcaggccgaggacagagacaacggccctggcaggagacctcttcccggcagagctgctgctggaggcagaaccatggacgagatcaggagacaccccgataagggcaacggccagcagagacccacaaagcagaagtccgaggaacagctccaggcctactacaagaaaaccctggaggagagactgtccgcgggagctctgaacaccttccctagagccttcaaacaagtcatggagggcagagacatcaagctggtgatcaaccagaccgcccaggactgcttcggctgccttgagtctatcagccagatcaggaccgccacacgggataagaaggacaccgtcaccagagagaagcaccccaagaagcccttccagaaatggatgaagaagagggccatcaagaagggcaattacctgagattccagaggctgttctacctggacagaggcaagctggccaagatcatcctggacgacatcgagtgcctgagctgcgacatccctctgagcgagatctacagcgtgttcaagaccagatgggagaccaccggcagcttcaagtctctgggcgacttcaagacatacggcaaggccgacaacaccgccttcagagagctcatcaccgctaaggagatcgagaagaacgtgcaggagatgagcaagggcagcgctcctggccccgatggaattacactgggcgatgtggtgaagatggaccccgagttcagcagaacaatggagatcttcaacctgtggctcaccacaggcaagatccccgacatggtgagaggctgcagaaccgtgcttatccccaagagcagcaagcccgacagactgaaggatatcaacaactggagacccatcaccatcggcagcatcctgctgcggctgttcagccggattgtgaccgctagactgagcaaagcctgtcccctgaaccccagacagagaggcttcatcagagccgctggctgcagcgagaacctgaagctgctccagacaatcatctggagcgccaagagagagcacagacccctgggcgttgttttcgtggacatcgccaaggccttcgacaccgtgtcccatcagcacattatccacgccctgcagcagagggaggtcgaccctcatattgtgggcctggtgtccaacatgtacgagaacatctccacctatattacgaccaagagaaacacccacacagacaagatccagatccgggtcggcgtcaagcagggcgatcctatgtctcctctgctgttcaacctcgccatggaccctctgctctgcaagctcgaggagtctggaaagggctaccatagaggccaatcatcgatcaccgccatggccttcgccgacgacctggtgcttttaagcgacagctgggagaacatgaacaccaacatctctatcctggagacattctgcaaccttaccggcctgaaaacccagggccagaagtgtcatggcttctacatcaaacccaccaagaagagctacaccatcaacgactgcgccgcctggacaatcaacggcacccctctcaacatgatcgaccccggcgagtctgagaagtacctgggcctgcagttcgatccctggatcggcatcgctagaagcggcttgagcaccaagctggacttttggctccaacgcatagaccaggcccccctgaagcctcttcagaaaaccgacattttgaaaacttatacgatccccagactcatctacatcgccgaccactccgaggtcaagagcgctctgctggaaaccctggaccagaaaatcagaaccgccgtcaaggaatggctgcacctgcccccttgcacatgcgacgctatcctgtacagcagcaccagggacggcggcttaggaatcaccaagttagccggcctcatccccagcgtgcaggctaggagactccacagaatcgcccagagcagcgacgacaccatgaagtgcttcatggagaaggaaaagatggagcagctgcacaagaagctgtggatccaagcgggcggagatcgtgagaacattcccagcatctgggaggcccctcccagctcagaacctcccaataacgtgtccaccaattctgaatgggaggctcccacccagaaggataagtttcccaagccctgcaactggcggaagaacgagttcaaaaaatggacaaagctggctagccagggcaggggcatcgtgaacttcgaaagggacaagattagcaaccactggatccagtactacagaagaatcccccacagaaagctcctcaccgccctccagttacgtgcaaacgtgtacccaaccagagaattcctggccagaggcagacaggaccagtacatcaaggcctgccggcactgcgatgccgataacgagagctgtgctcacatcatcggcaactgccccgtcacccaggacgccagaatcaagagacacaactacatctgcgagttacttctggaggaagccaagaagaaggattgggttgtgttcaaggagccccacatcagagactccaacaaggagctgtacaagccagacctcatcttcgtgaaggacggcagagccctggtggtggacgtcaccgtcagatacgaggctgctaagtccagccttgaggaggctgccgccgagaaagtgcggaagtacaagcacctggaaacagaggtcagacacctcaccaacgccaaggacgttaccttcgtgggcttccccctaggtgctagaggcaaatggcaccaggacaacttcaagctgcttaccgagctgggcctctccaagagccgacaggttaagatggccgagaccttcagcaccgtcgccctgttctcttctgtggacattgtgcacatgttcgcctccagagccagaaagagcatggtgatgtgataataggctgccttctgcggggcttgccttctggccatgcccttcttctctcccttgcacctgtacctcttggtctttgaataaagcctgagtaggaaggaccggtaaaaaaaaaaaaaaaaaaaaaaaaaaaaaaacgttgactaaaaaaaaaaaaaaaaaaaaaaaaaaaaaaaaaaaaaaaaaaaaaaaaaaaaaaaaaaaaaaaaaaaaaa

SEQ ID NO: 10722 - DNA, 5264 bp, synthetic construct
  source 1..5264: mol_type = other DNA
gaaataagagagaaaagaagagtaagaagaaatataagagaattcgccaccatggcccctaagaaaaagcggaaggtgaatatcagcggctctagctgcggcagccccaacagcgccgacaccagcagcgacttcaaggacctgtggaccaagctgaaggaatgccacgaccgggaagtgcagggactccaggtgaaggtcaccaaactcaagcaagaaagaatcctggacgcccagagactggaagaattcttcaccaagaaccagcagctgagagagcagcagaaagtgctgcacgagacaatcaaggttctggaagatagactgcgggccggcctgtgcgacagatgcgccgtgaccgaggaacacatgcgcaaaaagcagcaggagttcgagaacattagacagcaaaatctgaaattgatcacagagctgatgaacgagagaaacacactgcaggaggagaacaagaagctgagcgagcagctgcaacagaagatcgagaatgatcagcaacaccaggccgctgagctggaatgtgaagaggacgtgatccccgacagcccaatcacagctttcagcttttctggcgtgaacagactgaggcggaaggaaaacccccacgtgcggtacatcgagcagacccataccaagctggaacacagcgtgtgtgccaacgagatgagaaaggtgtccaagtcctccacccatccccagcacaaccctaacgaaaatgagatcctggtggctgatacctacgaccagtctcagagccctatggccaaggcccacggcaccagctcttatacccctgataagagctccttcaacctggccaccgtggtggccgagacactgggcctgggcgtgcaggaggaaagcgagacacagggcccaatgagccctctgggagatgagctgtaccactgcctggaaggcaaccacaagaaacagccttttgagtccggctccgagactcctggaacaagcgagagcgctacacctgagggcagccctaagagaaaggtgtccagcgccgagggcgctgccaaggaagagcctaaacggagaagcgccagactgagcgccaagccccccgccaaggtggaagccaagcctaagaaggccgccgctaaggacaagagcagcgataagaaagtccagaccaagggcaagcggggcgccaaaggcaaacaggccgaggtggccaaccaggagacaaaggaagatctgcctgctgagaacggcgaaaccaagaccgaggaatctccagcttctgacgaggccggagagaaggaggccaaaagcgacagcggctctgagacacctggaacaagcgagagcgccaccccggaatcctatgaacaacttgcaccacaaccgtgtgtgggagaaactttacattctagcctcccacgagacagtgaactgtttgtgcctgaagaggggagcagcgagaaggagagcgaggacgcgccaaaaacatctcctccgacgcctgggaaacatggtttggaacagactggggaggaaaaagtgatggtgactgttcctgacaaaaatccaccttgtccttgctgtggtacccgggtaaactctgtgttgaatctgattgaacatctgaaagtgtcacacgggaaaaggggggtttgttttcggtgtgcaaaatgtggaaaggaaaatagtaactatcacagtgttgtttgtcattttaagaaatgcaggggtccagagacggagaaagccccagctggggagtggatttgtgaggtatgcaacagagattttacaaccaaaattggcctgggacaacacaagagattggcacacccagcagtgagaaatcaggaaaggatcgttgcttcccaaccgaaagaaacatcaaatagaggtgctcacaaaaggtgctggacaaaggaggaggaagaattactaataagactggaggctcagttcgagggaaacaaaaatattaataagcttattgcagaacacataaccaccaaaacagctaagcagatcagtgacaaaaggcgattgctgtccagaaagccagcagaggagccacgtgaggagcctggaacgtgtcatcacaccaggagagcagctgcgagcctgagaacggagcctgagatgagtcatcacgcccaggcagaggacagagataatggacctgggagacgccctctgccaggcagggcagctgccggagggagaacaatggacgagataagacgccaccctgataagggcaacggacagcagagacccaccaagcaaaaatcagaagaacagctgcaggcttactataaaaagacactagaggaacgactttcagctggggcacttaacaccttcccccgagcattcaagcaggtaatggaaggccgggatataaagctagtaatcaatcagacagcgcaggactgcttcggatgcctggaatccataagccaaataagaacggcaacccgagataaaaaggacacggtgacccgggagaaacacccaaagaaaccttttcagaagtggatgaagaagagagcaatcaaaaaaggtaattatcttcggttccagcgtttattttatcttgatagagggaaactggctaaaatcattttagatgatattgaatgcttgtcttgtgacataccactcagtgaaatttattcggtttttaaaacaagatgggaaacaactggtagctttaaaagccttggggactttaaaacttacgggaaggctgacaacactgccttcagagaattaattacggctaaagaaattgagaaaaatgtgcaggaaatgagcaaaacatcggctcccggtccagacgggattactcttggggacgtcgtaaagatggatcccgagttttcccggaccatggagattttcaatttatggttaacaactggtaaaatcccggacatggtgagggggtgcagaaccgttttgattccaaaatcatcaaagccggatcgtttgaaagacattaataactggagacctatcacgatcggttccatcttgctgagactgttctccaggattgtaacagctaggctgagcaaagcgtgccccctgaacccaaggcaaagaggctttatcagagcggcgggatgctctgaaaacttaaaactcctgcaaactataatttggtcggccaaaagagaacacagaccactgggtgttgtattcgtggacatcgccaaggcttttgacaccgtaagccaccagcacatcattcatgctttgcagcaaagagaggtggatccccacatcgtcggtctggtgagcaatatgtacgagaacatcagtacgtatatcaccacaaagaggaacacacacacagacaaaatccagatccgggttggagtaaagcagggtgacccgatgtcgccccttttatttaacctggcaatggaccctctattatgcaagctggaagagagtggcaaaggataccaccgaggacagagcagcatcacagcgatggcatttgcagacgatctggttttgctgagcgactcctgggaaaatatgaatacaaatattagcatactggagaccttctgcaatctgaccggactcaaaacacaggggcaaaagtgccacggcttttacatcaagccgacaaagaagtcttacaccatcaatgactgcgctgcctggactatcaacggcacacccctgaacatgatcgaccccggcgaatctgagaaatacctcggcctgcagtttgacccgtggattggaatagcaaggtccggtctctccacaaaactagatttttggcttcagcggatcgatcaagcaccacttaaacctctgcagaaaactgatattctcaaaacatacaccatccctcggctgatctacatagctgaccactcagaagtgaaaagcgcactactcgaaacccttgaccagaagatccggacagcggtcaaggaatggcttcacctacctccgtgcacctgcgatgccatcctgtactcgagcacgagagacggcggtttgggcatcaccaaattggcaggactgatccccagcgtgcaggcccgtagactgcatcggatcgcacagtcatctgacgatacgatgaaatgcttcatggaaaaagagaaaatggaacagctgcataagaaattgtggattcaagctggaggggacagagagaacataccctcgatttgggaagcaccaccgtcgagtgaaccaccaaacaacgtgagcacaaattcggaatgggaagcaccgacccagaaagataaatttccaaagccttgcaattggaggaaaaacgaattcaaaaaatggaccaaattggcatcccaaggccgcggaattgtaaattttgaaagagacaaaattagtaaccattggatccaatactacagacgcatacctcacaggaaactcctcactgcactacaactcagggccaacgtttaccccacgagagaatttctagccaggggtagacaagaccaatacatcaaggcgtgtaggcactgcgatgcggacaacgaatcctgcgcccacatcatcggcaactgcccagtgacacaggacgcccgaatcaagaggcacaattacatctgcgaactgcttctcgaggaggcgaagaagaaggactgggtagtgttcaaggaaccgcacataagggattccaacaaggaactgtacaaacctgacctgatatttgtgaaggatgggcgtgcacttgtcgtggatgtgacagtacggtatgaagcagccaaatcatcgctggaggaagccgctgcagagaaagtgagaaagtacaaacacctggaaacggaagtaagacatctcacgaatgcaaaggacgttacttttgtgggctttcccctaggagcgcgggggaaatggcaccaagataactttaaacttttgactgagcttggcctctccaaatcgaggcaagtgaaaatggcagagactttttccacagtagcgctcttttcatctgtggacattgtacatatgtttgccagtagggccagaaaatctatggttatgtgataataggctgccttctgcggggcttgccttctggccatgcccttcttctctcccttgcacctgtacctcttggtctttgaataaagcctgagtaggaaggaccggtaaaaaaaaaaaaaaaaaaaaaaaaaaaaaaacgttgactaaaaaaaaaaaaaaaaaaaaaaaaaaaaaaaaaaaaaaaaaaaaaaaaaaaaaaaaaaaaaaaaaaaaaa

SEQ ID NO: 10723 - DNA, 5264 bp, synthetic construct
  source 1..5264: mol_type = other DNA
gaaataagagagaaaagaagagtaagaagaaatataagagaattcgccaccatggcccctaagaaaaagcggaaggtgaatatcagcggctctagctgcggcagccccaacagcgccgacaccagcagcgacttcaaggacctgtggaccaagctgaaggaatgccacgaccgggaagtgcagggactccaggtgaaggtcaccaaactcaagcaagaaagaatcctggacgcccagagactggaagaattcttcaccaagaaccagcagctgagagagcagcagaaagtgctgcacgagacaatcaaggttctggaagatagactgcgggccggcctgtgcgacagatgcgccgtgaccgaggaacacatgcgcaaaaagcagcaggagttcgagaacattagacagcaaaatctgaaattgatcacagagctgatgaacgagagaaacacactgcaggaggagaacaagaagctgagcgagcagctgcaacagaagatcgagaatgatcagcaacaccaggccgctgagctggaatgtgaagaggacgtgatccccgacagcccaatcacagctttcagcttttctggcgtgaacagactgaggcggaaggaaaacccccacgtgcggtacatcgagcagacccataccaagctggaacacagcgtgtgtgccaacgagatgagaaaggtgtccaagtcctccacccatccccagcacaaccctaacgaaaatgagatcctggtggctgatacctacgaccagtctcagagccctatggccaaggcccacggcaccagctcttatacccctgataagagctccttcaacctggccaccgtggtggccgagacactgggcctgggcgtgcaggaggaaagcgagacacagggcccaatgagccctctgggagatgagctgtaccactgcctggaaggcaaccacaagaaacagccttttgagtccggctccgagactcctggaacaagcgagagcgctacacctgagggcagccctaagagaaaggtgtccagcgccgagggcgctgccaaggaagagcctaaacggagaagcgccagactgagcgccaagccccccgccaaggtggaagccaagcctaagaaggccgccgctaaggacaagagcagcgataagaaagtccagaccaagggcaagcggggcgccaaaggcaaacaggccgaggtggccaaccaggagacaaaggaagatctgcctgctgagaacggcgaaaccaagaccgaggaatctccagcttctgacgaggccggagagaaggaggccaaaagcgacagcggctctgagacacctggaacaagcgagagcgccaccccggaatcctatgaacaacttgcaccacaaccgtgtgtgggagaaactttacattctagcctcccacgagacagtgaactgtttgtgcctgaagaggggagcagcgagaaggagagcgaggacgcgccaaaaacatctcctccgacgcctgggaaacatggtttggaacagactggggaggaaaaagtgatggtgactgttcctgacaaaaatccaccttgtccttgctgtggtacccgggtaaactctgtgttgaatctgattgaacatctgaaagtgtcacacgggaaaaggggggtttgttttcggtgtgcaaaatgtggaaaggaaaatagtaactatcacagtgttgtttgtcattttaagaaatgcaggggtccagagacggagaaagccccagctggggagtggatttgtgaggtatgcaacagagattttacaaccaaaattggcctgggacaacacaagagattggcacacccagcagtgagaaatcaggaaaggatcgttgcttcccaaccgaaagaaacatcaaatagaggtgctcacaaaaggtgctggacaaaggaggaggaagaattactaataagactggaggctcagttcgagggaaacaaaaatattaataagcttattgcagaacacataaccaccaaaacagctaagcagatcagtgacaaaaggcgattgctgtccagaaagccagcagaggagccacgtgaggagcctggaacgtgtcatcacaccaggagagcagctgcgagcctgagaacggagcctgagatgagtcatcacgcccaggcagaggacagagataatggacctgggagacgccctctgccaggcagggcagctgccggagggagaacaatggacgagataagacgccaccctgataagggcaacggacagcagagacccaccaagcaaaaatcagaagaacagctgcaggcttactataaaaagacactagaggaacgactttcagctggggcacttaacaccttcccccgagcattcaagcaggtaatggaaggccgggatataaagctagtaatcaatcagacagcgcaggactgcttcggatgcctggaatccataagccaaataagaacggcaacccgagataaaaaggacacggtgacccgggagaaacacccaaagaaaccttttcagaagtggatgaagaagagagcaatcaaaaaaggtaattatcttcggttccagcgtttattttatcttgatagagggaaactggctaaaatcattttagatgatattgaatgcttgtcttgtgacataccactcagtgaaatttattcggtttttaaaacaagatgggaaacaactggtagctttaaaagccttggggactttaaaacttacgggaaggctgacaacactgccttcagagaattaattacggctaaagaaattgagaaaaatgtgcaggaaatgagcaaaggctcggctcccggtccagacgggattactcttggggacgtcgtaaagatggatcccgagttttcccggaccatggagattttcaatttatggttaacaactggtaaaatcccggacatggtgagggggtgcagaaccgttttgattccaaaatcatcaaagccggatcgtttgaaagacattaataactggagacctatcacgatcggttccatcttgctgagactgttctccaggattgtaacagctaggctgagcaaagcgtgccccctgaacccaaggcaaagaggctttatcagagcggcgggatgctctgaaaacttaaaactcctgcaaactataatttggtcggccaaaagagaacacagaccactgggtgttgtattcgtggacatcgccaaggcttttgacaccgtaagccaccagcacatcattcatgctttgcagcaaagagaggtggatccccacatcgtcggtctggtgagcaatatgtacgagaacatcagtacgtatatcaccacaaagaggaacacacacacagacaaaatccagatccgggttggagtaaagcagggtgacccgatgtcgccccttttatttaacctggcaatggaccctctattatgcaagctggaagagagtggcaaaggataccaccgaggacagagcagcatcacagcgatggcatttgcagacgatctggttttgctgagcgactcctgggaaaatatgaatacaaatattagcatactggagaccttctgcaatctgaccggactcaaaacacaggggcaaaagtgccacggcttttacatcaagccgacaaagaagtcttacaccatcaatgactgcgctgcctggactatcaacggcacacccctgaacatgatcgaccccggcgaatctgagaaatacctcggcctgcagtttgacccgtggattggaatagcaaggtccggtctctccacaaaactagatttttggcttcagcggatcgatcaagcaccacttaaacctctgcagaaaactgtgattctcaaaacatacaccatccctcggctgatctacatagctgaccactcagaagtgaaaagcgcactactcgaaacccttgaccagaagatccggacagcggtcaaggaatggcttcacctacctccgtgcacctgcgatgccatcctgtactcgagcacgagagacggcggtttgggcatcaccaaattggcaggactgatccccagcgtgcaggcccgtagactgcatcggatcgcacagtcatctgacgatacgatgaaatgcttcatggaaaaagagaaaatggaacagctgcataagaaattgtggattcaagctggaggggacagagagaacataccctcgatttgggaagcaccaccgtcgagtgaaccaccaaacaacgtgagcacaaattcggaatgggaagcaccgacccagaaagataaatttccaaagccttgcaattggaggaaaaacgaattcaaaaaatggaccaaattggcatcccaaggccgcggaattgtaaattttgaaagagacaaaattagtaaccattggatccaatactacagacgcatacctcacaggaaactcctcactgcactacaactcagggccaacgtttaccccacgagagaatttctagccaggggtagacaagaccaatacatcaaggcgtgtaggcactgcgatgcggacaacgaatcctgcgcccacatcatcggcaactgcccagtgacacaggacgcccgaatcaagaggcacaattacatctgcgaactgcttctcgaggaggcgaagaagaaggactgggtagtgttcaaggaaccgcacataagggattccaacaaggaactgtacaaacctgacctgatatttgtgaaggatgggcgtgcacttgtcgtggatgtgacagtacggtatgaagcagccaaatcatcgctggaggaagccgctgcagagaaagtgagaaagtacaaacacctggaaacggaagtaagacatctcacgaatgcaaaggacgttacttttgtgggctttcccctaggagcgcgggggaaatggcaccaagataactttaaacttttgactgagcttggcctctccaaatcgaggcaagtgaaaatggcagagactttttccacagtagcgctcttttcatctgtggacattgtacatatgtttgccagtagggccagaaaatctatggttatgtgataataggctgccttctgcggggcttgccttctggccatgcccttcttctctcccttgcacctgtacctcttggtctttgaataaagcctgagtaggaaggaccggtaaaaaaaaaaaaaaaaaaaaaaaaaaaaaaacgttgactaaaaaaaaaaaaaaaaaaaaaaaaaaaaaaaaaaaaaaaaaaaaaaaaaaaaaaaaaaaaaaaaaaaaaa

SEQ ID NO: 10724 - DNA, 5264 bp, synthetic construct
  source 1..5264: mol_type = other DNA
gaaataagagagaaaagaagagtaagaagaaatataagagaattcgccaccatggcccctaagaaaaagcggaaggtgaatatcagcggctctagctgcggcagccccaacagcgccgacaccagcagcgacttcaaggacctgtggaccaagctgaaggaatgccacgaccgggaagtgcagggactccaggtgaaggtcaccaaactcaagcaagaaagaatcctggacgcccagagactggaagaattcttcaccaagaaccagcagctgagagagcagcagaaagtgctgcacgagacaatcaaggttctggaagatagactgcgggccggcctgtgcgacagatgcgccgtgaccgaggaacacatgcgcaaaaagcagcaggagttcgagaacattagacagcaaaatctgaaattgatcacagagctgatgaacgagagaaacacactgcaggaggagaacaagaagctgagcgagcagctgcaacagaagatcgagaatgatcagcaacaccaggccgctgagctggaatgtgaagaggacgtgatccccgacagcccaatcacagctttcagcttttctggcgtgaacagactgaggcggaaggaaaacccccacgtgcggtacatcgagcagacccataccaagctggaacacagcgtgtgtgccaacgagatgagaaaggtgtccaagtcctccacccatccccagcacaaccctaacgaaaatgagatcctggtggctgatacctacgaccagtctcagagccctatggccaaggcccacggcaccagctcttatacccctgataagagctccttcaacctggccaccgtggtggccgagacactgggcctgggcgtgcaggaggaaagcgagacacagggcccaatgagccctctgggagatgagctgtaccactgcctggaaggcaaccacaagaaacagccttttgagtccggctccgagactcctggaacaagcgagagcgctacacctgagggcagccctaagagaaaggtgtccagcgccgagggcgctgccaaggaagagcctaaacggagaagcgccagactgagcgccaagccccccgccaaggtggaagccaagcctaagaaggccgccgctaaggacaagagcagcgataagaaagtccagaccaagggcaagcggggcgccaaaggcaaacaggccgaggtggccaaccaggagacaaaggaagatctgcctgctgagaacggcgaaaccaagaccgaggaatctccagcttctgacgaggccggagagaaggaggccaaaagcgacagcggctctgagacacctggaacaagcgagagcgccaccccggaatcctatgaacaacttgcaccacaaccgtgtgtgggagaaactttacattctagcctcccacgagacagtgaactgtttgtgcctgaagaggggagcagcgagaaggagagcgaggacgcgccaaaaacatctcctccgacgcctgggaaacatggtttggaacagactggggaggaaaaagtgatggtgactgttcctgacaaaaatccaccttgtccttgctgtggtacccgggtaaactctgtgttgaatctgattgaacatctgaaagtgtcacacgggaaaaggggggtttgttttcggtgtgcaaaatgtggaaaggaaaatagtaactatcacagtgttgtttgtcattttaagaaatgcaggggtccagagacggagaaagccccagctggggagtggatttgtgaggtatgcaacagagattttacaaccaaaattggcctgggacaacacaagagattggcacacccagcagtgagaaatcaggaaaggatcgttgcttcccaaccgaaagaaacatcaaatagaggtgctcacaaaaggtgctggacaaaggaggaggaagaattactaataagactggaggctcagttcgagggaaacaaaaatattaataagcttattgcagaacacataaccaccaaaacagctaagcagatcagtgacaaaaggcgattgctgtccagaaagccagcagaggagccacgtgaggagcctggaacgtgtcatcacaccaggagagcagctgcgagcctgagaacggagcctgagatgagtcatcacgcccaggcagaggacagagataatggacctgggagacgccctctgccaggcagggcagctgccggagggagaacaatggacgagataagacgccaccctgataagggcaacggacagcagagacccaccaagcaaaaatcagaagaacagctgcaggcttactataaaaagacactagaggaacgactttcagctggggcacttaacaccttcccccgagcattcaagcaggtaatggaaggccgggatataaagctagtaatcaatcagacagcgcaggactgcttcggatgcctggaatccataagccaaataagaacggcaacccgagataaaaaggacacggtgacccgggagaaacacccaaagaaaccttttcagaagtggatgaagaagagagcaatcaaaaaaggtaattatcttcggttccagcgtttattttatcttgatagagggaaactggctaaaatcattttagatgatattgaatgcttgtcttgtgacataccactcagtgaaatttattcggtttttaaaacaagatgggaaacaactggtagctttaaaagccttggggactttaaaacttacgggaaggctgacaacactgccttcagagaattaattacggctaaagaaattgagaaaaatgtgcaggaaatgagcaaaggctcggctcccggtccagacgggattactcttggggacgtcgtaaagatggatcccgagttttcccggaccatggagattttcaatttatggttaacaactggtaaaatcccggacatggtgagggggtgcagaaccgttttgattccaaaatcatcaaagccggatcgtttgaaagacattaataactggagacctatcacgatcggttccatcttgctgagactgttctccaggattgtaacagctaggctgagcaaagcgtgccccctgaacccaaggcaaagaggctttatcagagcggcgggatgctctgaaaacttaaaactcctgcaaactataatttggtcggccaaaagagaacacagaccactgggtgttgtattcgtggacatcgccaaggcttttgacaccgtaagccaccagcacatcattcatgctttgcagcaaagagaggtggatccccacatcgtcggtctggtgagcaatatgtacgagaacatcagtacgtatatcaccacaaagaggaacacacacacagacaaaatccagatccgggttggagtaaagcagggtgacccgatgtcgccccttttatttaacctggcaatggaccctctattatgcaagctggaagagagtggcaaaggataccaccgaggacagagcagcatcacagcgatggcatttgcagacgatctggttttgctgagcgactcctgggaaaatatgaatacaaatattagcatactggagaccttctgcaatctgaccggactcaaaacacaggggcaaaagtgccacggcttttacatcaagccgacaaagaagtcttacaccatcaatgactgcgctgcctggactatcaacggcacacccctgaacatgatcgaccccggcgaatctgagaaatacctcggcctgcagtttgacccgtggattggaatagcaaggtccggtctctccacaaaactagatttttggcttcagcggatcgatcaagcaccacttaaacctctgcagaaaactagaattctcaaaacatacaccatccctcggctgatctacatagctgaccactcagaagtgaaaagcgcactactcgaaacccttgaccagaagatccggacagcggtcaaggaatggcttcacctacctccgtgcacctgcgatgccatcctgtactcgagcacgagagacggcggtttgggcatcaccaaattggcaggactgatccccagcgtgcaggcccgtagactgcatcggatcgcacagtcatctgacgatacgatgaaatgcttcatggaaaaagagaaaatggaacagctgcataagaaattgtggattcaagctggaggggacagagagaacataccctcgatttgggaagcaccaccgtcgagtgaaccaccaaacaacgtgagcacaaattcggaatgggaagcaccgacccagaaagataaatttccaaagccttgcaattggaggaaaaacgaattcaaaaaatggaccaaattggcatcccaaggccgcggaattgtaaattttgaaagagacaaaattagtaaccattggatccaatactacagacgcatacctcacaggaaactcctcactgcactacaactcagggccaacgtttaccccacgagagaatttctagccaggggtagacaagaccaatacatcaaggcgtgtaggcactgcgatgcggacaacgaatcctgcgcccacatcatcggcaactgcccagtgacacaggacgcccgaatcaagaggcacaattacatctgcgaactgcttctcgaggaggcgaagaagaaggactgggtagtgttcaaggaaccgcacataagggattccaacaaggaactgtacaaacctgacctgatatttgtgaaggatgggcgtgcacttgtcgtggatgtgacagtacggtatgaagcagccaaatcatcgctggaggaagccgctgcagagaaagtgagaaagtacaaacacctggaaacggaagtaagacatctcacgaatgcaaaggacgttacttttgtgggctttcccctaggagcgcgggggaaatggcaccaagataactttaaacttttgactgagcttggcctctccaaatcgaggcaagtgaaaatggcagagactttttccacagtagcgctcttttcatctgtggacattgtacatatgtttgccagtagggccagaaaatctatggttatgtgataataggctgccttctgcggggcttgccttctggccatgcccttcttctctcccttgcacctgtacctcttggtctttgaataaagcctgagtaggaaggaccggtaaaaaaaaaaaaaaaaaaaaaaaaaaaaaaacgttgactaaaaaaaaaaaaaaaaaaaaaaaaaaaaaaaaaaaaaaaaaaaaaaaaaaaaaaaaaaaaaaaaaaaaaa

SEQ ID NO: 10725 - DNA, 5264 bp, synthetic construct
  source 1..5264: mol_type = other DNA
gaaataagagagaaaagaagagtaagaagaaatataagagaattcgccaccatggcccctaagaaaaagcggaaggtgaatatcagcggctctagctgcggcagccccaacagcgccgacaccagcagcgacttcaaggacctgtggaccaagctgaaggaatgccacgaccgggaagtgcagggactccaggtgaaggtcaccaaactcaagcaagaaagaatcctggacgcccagagactggaagaattcttcaccaagaaccagcagctgagagagcagcagaaagtgctgcacgagacaatcaaggttctggaagatagactgcgggccggcctgtgcgacagatgcgccgtgaccgaggaacacatgcgcaaaaagcagcaggagttcgagaacattagacagcaaaatctgaaattgatcacagagctgatgaacgagagaaacacactgcaggaggagaacaagaagctgagcgagcagctgcaacagaagatcgagaatgatcagcaacaccaggccgctgagctggaatgtgaagaggacgtgatccccgacagcccaatcacagctttcagcttttctggcgtgaacagactgaggcggaaggaaaacccccacgtgcggtacatcgagcagacccataccaagctggaacacagcgtgtgtgccaacgagatgagaaaggtgtccaagtcctccacccatccccagcacaaccctaacgaaaatgagatcctggtggctgatacctacgaccagtctcagagccctatggccaaggcccacggcaccagctcttatacccctgataagagctccttcaacctggccaccgtggtggccgagacactgggcctgggcgtgcaggaggaaagcgagacacagggcccaatgagccctctgggagatgagctgtaccactgcctggaaggcaaccacaagaaacagccttttgagtccggctccgagactcctggaacaagcgagagcgctacacctgagggcagccctaagagaaaggtgtccagcgccgagggcgctgccaaggaagagcctaaacggagaagcgccagactgagcgccaagccccccgccaaggtggaagccaagcctaagaaggccgccgctaaggacaagagcagcgataagaaagtccagaccaagggcaagcggggcgccaaaggcaaacaggccgaggtggccaaccaggagacaaaggaagatctgcctgctgagaacggcgaaaccaagaccgaggaatctccagcttctgacgaggccggagagaaggaggccaaaagcgacagcggctctgagacacctggaacaagcgagagcgccaccccggaatcctatgaacaacttgcaccacaaccgtgtgtgggagaaactttacattctagcctcccacgagacagtgaactgtttgtgcctgaagaggggagcagcgagaaggagagcgaggacgcgccaaaaacatctcctccgacgcctgggaaacatggtttggaacagactggggaggaaaaagtgatggtgactgttcctgacaaaaatccaccttgtccttgctgtggtacccgggtaaactctgtgttgaatctgattgaacatctgaaagtgtcacacgggaaaaggggggtttgttttcggtgtgcaaaatgtggaaaggaaaatagtaactatcacagtgttgtttgtcattttaagaaatgcaggggtccagagacggagaaagccccagctggggagtggatttgtgaggtatgcaacagagattttacaaccaaaattggcctgggacaacacaagagattggcacacccagcagtgagaaatcaggaaaggatcgttgcttcccaaccgaaagaaacatcaaatagaggtgctcacaaaaggtgctggacaaaggaggaggaagaattactaataagactggaggctcagttcgagggaaacaaaaatattaataagcttattgcagaacacataaccaccaaaacagctaagcagatcagtgacaaaaggcgattgctgtccagaaagccagcagaggagccacgtgaggagcctggaacgtgtcatcacaccaggagagcagctgcgagcctgagaacggagcctgagatgagtcatcacgcccaggcagaggacagagataatggacctgggagacgccctctgccaggcagggcagctgccggagggagaacaatggacgagataagacgccaccctgataagggcaacggacagcagagacccaccaagcaaaaatcagaagaacagctgcaggcttactataaaaagacactagaggaacgactttcagctggggcacttaacaccttcccccgagcattcaagcaggtaatggaaggccgggatataaagctagtaatcaatcagacagcgcaggactgcttcggatgcctggaatccataagccaaataagaacggcaacccgagataaaaaggacacggtgacccgggagaaacacccaaagaaaccttttcagaagtggatgaagaagagagcaatcaaaaaaggtaattatcttcggttccagcgtttattttatcttgatagagggaaactggctaaaatcattttagatgatattgaatgcttgtcttgtgacataccactcagtgaaatttattcggtttttaaaacaagatgggaaacaactggtagctttaaaagccttggggactttaaaacttacgggaaggctgacaacactgccttcagagaattaattacggctaaagaaattgagaaaaatgtgcaggaaatgagcaaaggctcggctcccggtccagacgggattactcttggggacgtcgtaaagatggatcccgagttttcccggaccatggagattttcaatttatggttaacaactggtaaaatcccggacatggtgagggggtgcagaaccgttttgattccaaaatcatcaaagccggatcgtttgaaagacattaataactggagacctatcacgatcggttccatcttgctgagactgttctccaggattctcacagctaggctgagcaaagcgtgccccctgaacccaaggcaaagaggctttatcagagcggcgggatgctctgaaaacttaaaactcctgcaaactataatttggtcggccaaaagagaacacagaccactgggtgttgtattcgtggacatcgccaaggcttttgacaccgtaagccaccagcacatcattcatgctttgcagcaaagagaggtggatccccacatcgtcggtctggtgagcaatatgtacgagaacatcagtacgtatatcaccacaaagaggaacacacacacagacaaaatccagatccgggttggagtaaagcagggtgacccgatgtcgccccttttatttaacctggcaatggaccctctattatgcaagctggaagagagtggcaaaggataccaccgaggacagagcagcatcacagcgatggcatttgcagacgatctggttttgctgagcgactcctgggaaaatatgaatacaaatattagcatactggagaccttctgcaatctgaccggactcaaaacacaggggcaaaagtgccacggcttttacatcaagccgacaaagaagtcttacaccatcaatgactgcgctgcctggactatcaacggcacacccctgaacatgatcgaccccggcgaatctgagaaatacctcggcctgcagtttgacccgtggattggaatagcaaggtccggtctctccacaaaactagatttttggcttcagcggatcgatcaagcaccacttaaacctctgcagaaaactgatattctcaaaacatacaccatccctcggctgatctacatagctgaccactcagaagtgaaaagcgcactactcgaaacccttgaccagaagatccggacagcggtcaaggaatggcttcacctacctccgtgcacctgcgatgccatcctgtactcgagcacgagagacggcggtttgggcatcaccaaattggcaggactgatccccagcgtgcaggcccgtagactgcatcggatcgcacagtcatctgacgatacgatgaaatgcttcatggaaaaagagaaaatggaacagctgcataagaaattgtggattcaagctggaggggacagagagaacataccctcgatttgggaagcaccaccgtcgagtgaaccaccaaacaacgtgagcacaaattcggaatgggaagcaccgacccagaaagataaatttccaaagccttgcaattggaggaaaaacgaattcaaaaaatggaccaaattggcatcccaaggccgcggaattgtaaattttgaaagagacaaaattagtaaccattggatccaatactacagacgcatacctcacaggaaactcctcactgcactacaactcagggccaacgtttaccccacgagagaatttctagccaggggtagacaagaccaatacatcaaggcgtgtaggcactgcgatgcggacaacgaatcctgcgcccacatcatcggcaactgcccagtgacacaggacgcccgaatcaagaggcacaattacatctgcgaactgcttctcgaggaggcgaagaagaaggactgggtagtgttcaaggaaccgcacataagggattccaacaaggaactgtacaaacctgacctgatatttgtgaaggatgggcgtgcacttgtcgtggatgtgacagtacggtatgaagcagccaaatcatcgctggaggaagccgctgcagagaaagtgagaaagtacaaacacctggaaacggaagtaagacatctcacgaatgcaaaggacgttacttttgtgggctttcccctaggagcgcgggggaaatggcaccaagataactttaaacttttgactgagcttggcctctccaaatcgaggcaagtgaaaatggcagagactttttccacagtagcgctcttttcatctgtggacattgtacatatgtttgccagtagggccagaaaatctatggttatgtgataataggctgccttctgcggggcttgccttctggccatgcccttcttctctcccttgcacctgtacctcttggtctttgaataaagcctgagtaggaaggaccggtaaaaaaaaaaaaaaaaaaaaaaaaaaaaaaacgttgactaaaaaaaaaaaaaaaaaaaaaaaaaaaaaaaaaaaaaaaaaaaaaaaaaaaaaaaaaaaaaaaaaaaaaa

SEQ ID NO: 10726 - DNA, 5264 bp, synthetic construct
  source 1..5264: mol_type = other DNA
gaaataagagagaaaagaagagtaagaagaaatataagagaattcgccaccatggcccctaagaaaaagcggaaggtgaatatcagcggctctagctgcggcagccccaacagcgccgacaccagcagcgacttcaaggacctgtggaccaagctgaaggaatgccacgaccgggaagtgcagggactccaggtgaaggtcaccaaactcaagcaagaaagaatcctggacgcccagagactggaagaattcttcaccaagaaccagcagctgagagagcagcagaaagtgctgcacgagacaatcaaggttctggaagatagactgcgggccggcctgtgcgacagatgcgccgtgaccgaggaacacatgcgcaaaaagcagcaggagttcgagaacattagacagcaaaatctgaaattgatcacagagctgatgaacgagagaaacacactgcaggaggagaacaagaagctgagcgagcagctgcaacagaagatcgagaatgatcagcaacaccaggccgctgagctggaatgtgaagaggacgtgatccccgacagcccaatcacagctttcagcttttctggcgtgaacagactgaggcggaaggaaaacccccacgtgcggtacatcgagcagacccataccaagctggaacacagcgtgtgtgccaacgagatgagaaaggtgtccaagtcctccacccatccccagcacaaccctaacgaaaatgagatcctggtggctgatacctacgaccagtctcagagccctatggccaaggcccacggcaccagctcttatacccctgataagagctccttcaacctggccaccgtggtggccgagacactgggcctgggcgtgcaggaggaaagcgagacacagggcccaatgagccctctgggagatgagctgtaccactgcctggaaggcaaccacaagaaacagccttttgagtccggctccgagactcctggaacaagcgagagcgctacacctgagggcagccctaagagaaaggtgtccagcgccgagggcgctgccaaggaagagcctaaacggagaagcgccagactgagcgccaagccccccgccaaggtggaagccaagcctaagaaggccgccgctaaggacaagagcagcgataagaaagtccagaccaagggcaagcggggcgccaaaggcaaacaggccgaggtggccaaccaggagacaaaggaagatctgcctgctgagaacggcgaaaccaagaccgaggaatctccagcttctgacgaggccggagagaaggaggccaaaagcgacagcggctctgagacacctggaacaagcgagagcgccaccccggaatcctatgaacaacttgcaccacaaccgtgtgtgggagaaactttacattctagcctcccacgagacagtgaactgtttgtgcctgaagaggggagcagcgagaaggagagcgaggacgcgccaaaaacatctcctccgacgcctgggaaacatggtttggaacagactggggaggaaaaagtgatggtgactgttcctgacaaaaatccaccttgtccttgctgtggtacccgggtaaactctgtgttgaatctgattgaacatctgaaagtgtcacacgggaaaaggggggtttgttttcggtgtgcaaaatgtggaaaggaaaatagtaactatcacagtgttgtttgtcattttaagaaatgcaggggtccagagacggagaaagccccagctggggagtggatttgtgaggtatgcaacagagattttacaaccaaaattggcctgggacaacacaagagattggcacacccagcagtgagaaatcaggaaaggatcgttgcttcccaaccgaaagaaacatcaaatagaggtgctcacaaaaggtgctggacaaaggaggaggaagaattactaataagactggaggctcagttcgagggaaacaaaaatattaataagcttattgcagaacacataaccaccaaaacagctaagcagatcagtgacaaaaggcgattgctgtccagaaagccagcagaggagccacgtgaggagcctggaacgtgtcatcacaccaggagagcagctgcgagcctgagaacggagcctgagatgagtcatcacgcccaggcagaggacagagataatggacctgggagacgccctctgccaggcagggcagctgccggagggagaacaatggacgagataagacgccaccctgataagggcaacggacagcagagacccaccaagcaaaaatcagaagaacagctgcaggcttactataaaaagacactagaggaacgactttcagctggggcacttaacaccttcccccgagcattcaagcaggtaatggaaggccgggatataaagctagtaatcaatcagacagcgcaggactgcttcggatgcctggaatccataagccaaataagaacggcaacccgagataaaaaggacacggtgacccgggagaaacacccaaagaaaccttttcagaagtggatgaagaagagagcaatcaaaaaaggtaattatcttcggttccagcgtttatttcaccttgatagagggaaactggctaaaatcattttagatgatattgaatgcttgtcttgtgacataccactcagtgaaatttattcggtttttaaaacaagatgggaaacaactggtagctttaaaagccttggggactttaaaacttacgggaaggctgacaacactgccttcagagaattaattacggctaaagaaattgagaaaaatgtgcaggaaatgaagaaaggctcggctcccggtccagacgggattactcttggggacgtcgtaaagatggatcccgagttttcccggaccatggagattttcaatttatggttaacaactggtaaaatcccggacatggtgagggggtgcagaaccgttttgattccaaaatcatcaaagccggatcgtttgaaagacattaataactggagacctatcacgatcggttccatcttgctgagactgttctccaggattgtaacagctaggctgagcaaagcgtgccccctgaacccaaggcaaagaggctttatcagagcggcgggatgctctgaaaacttaaaactcctgcaaactataatttggtcggccaaaagagaacacagaccactgggtgttgtattcgtggacatcgccaaggcttttgacaccgtaagccaccagcacatcattcatgctttgcagcaaagagaggtggatccccacatcgtcggtctggtgagcaatatgtacgagaacatcagtacgtatatcaccacaaagaggaacacacacacagacaaaatccagatccgggttggagtaaagcagggtgacccgatgtcgccccttttatttaacctggcactcgaccctctattatgcaagctggaagagagtggcaaaggataccaccgaggacagagcagcatcacagcgatggcatttgcagacgatctggttttgctgagcgactcctgggaaaatatgaatacaaatattagcatactggagaccttctgcaatctgaccggactcaaaacacaggggcaaaagtgccacggcttttacatcaagccgacaaaggactcttacaccatcaatgactgcgctgcctggactatcaacggcacacccctgaacatgatcgaccccggcgaatctgagaaatacctcggcctgcagtttgacccgtggattggaatagcaaggtccggtctctccacaaaactagatttttggcttcagcggatcgatcaagcaccacttaaacctctgcagaaaactgatattctcaaaacatacaccatccctcggctgatctacatagctgaccactcagaagtgaaaagcgcactactcgaaacccttgaccagaagatccggacagcggtcaaggaatggcttcacctacctccgtgcacctgcgatgccatcctgtactcgagcacgagagacggcggtttgggcatcaccaaattggcaggactgatccccagcgtgcaggcccgtagactgcatcggatcgcacagtcatctgacgatacgatgaaatgcttcatggaaaaagagaaaatggaacagctgcataagaaattgtggattcaagctggaggggacagagagaacataccctcgatttgggaagcaccaccgtcgagtgaaccaccaaacaacgtgagcacaaattcggaatgggaagcaccgacccagaaagataaatttccaaagccttgcaattggaggaaaaacgaattcaaaaaatggaccaaattggcatcccaaggccgcggaattgtaaattttgaaagagacaaaattagtaaccattggatccaatactacagacgcatacctcacaggaaactcctcactgcactacaactcagggccaacgtttaccccacgagagaatttctagccaggggtagacaagaccaatacatcaaggcgtgtaggcactgcgatgcggacaacgaatcctgcgcccacatcatcggcaactgcccagtgacacaggacgcccgaatcaagaggcacaattacatctgcgaactgcttctcgaggaggcgaagaagaaggactgggtagtgttcaaggaaccgcacataagggattccaacaaggaactgtacaaacctgacctgatatttgtgaaggatgggcgtgcacttgtcgtggatgtgacagtacggtatgaagcagccaaatcatcgctggaggaagccgctgcagagaaagtgagaaagtacaaacacctggaaacggaagtaagacatctcacgaatgcaaaggacgttacttttgtgggctttcccctaggagcgcgggggaaatggcaccaagataactttaaacttttgactgagcttggcctctccaaatcgaggcaagtgaaaatggcagagactttttccacagtagcgctcttttcatctgtggacattgtacatatgtttgccagtagggccagaaaatctatggttatgtgataataggctgccttctgcggggcttgccttctggccatgcccttcttctctcccttgcacctgtacctcttggtctttgaataaagcctgagtaggaaggaccggtaaaaaaaaaaaaaaaaaaaaaaaaaaaaaaacgttgactaaaaaaaaaaaaaaaaaaaaaaaaaaaaaaaaaaaaaaaaaaaaaaaaaaaaaaaaaaaaaaaaaaaaaa

SEQ ID NO: 10727 - DNA, 5264 bp, synthetic construct
  source 1..5264: mol_type = other DNA
gaaataagagagaaaagaagagtaagaagaaatataagagaattcgccaccatggcccctaagaaaaagcggaaggtgaatatcagcggctctagctgcggcagccccaacagcgccgacaccagcagcgacttcaaggacctgtggaccaagctgaaggaatgccacgaccgggaagtgcagggactccaggtgaaggtcaccaaactcaagcaagaaagaatcctggacgcccagagactggaagaattcttcaccaagaaccagcagctgagagagcagcagaaagtgctgcacgagacaatcaaggttctggaagatagactgcgggccggcctgtgcgacagatgcgccgtgaccgaggaacacatgcgcaaaaagcagcaggagttcgagaacattagacagcaaaatctgaaattgatcacagagctgatgaacgagagaaacacactgcaggaggagaacaagaagctgagcgagcagctgcaacagaagatcgagaatgatcagcaacaccaggccgctgagctggaatgtgaagaggacgtgatccccgacagcccaatcacagctttcagcttttctggcgtgaacagactgaggcggaaggaaaacccccacgtgcggtacatcgagcagacccataccaagctggaacacagcgtgtgtgccaacgagatgagaaaggtgtccaagtcctccacccatccccagcacaaccctaacgaaaatgagatcctggtggctgatacctacgaccagtctcagagccctatggccaaggcccacggcaccagctcttatacccctgataagagctccttcaacctggccaccgtggtggccgagacactgggcctgggcgtgcaggaggaaagcgagacacagggcccaatgagccctctgggagatgagctgtaccactgcctggaaggcaaccacaagaaacagccttttgagtccggctccgagactcctggaacaagcgagagcgctacacctgagggcagccctaagagaaaggtgtccagcgccgagggcgctgccaaggaagagcctaaacggagaagcgccagactgagcgccaagccccccgccaaggtggaagccaagcctaagaaggccgccgctaaggacaagagcagcgataagaaagtccagaccaagggcaagcggggcgccaaaggcaaacaggccgaggtggccaaccaggagacaaaggaagatctgcctgctgagaacggcgaaaccaagaccgaggaatctccagcttctgacgaggccggagagaaggaggccaaaagcgacagcggctctgagacacctggaacaagcgagagcgccaccccggaatcctatgaacaacttgcaccacaaccgtgtgtgggagaaactttacattctagcctcccacgagacagtgaactgtttgtgcctgaagaggggagcagcgagaaggagagcgaggacgcgccaaaaacatctcctccgacgcctgggaaacatggtttggaacagactggggaggaaaaagtgatggtgactgttcctgacaaaaatccaccttgtccttgctgtggtacccgggtaaactctgtgttgaatctgattgaacatctgaaagtgtcacacgggaaaaggggggtttgttttcggtgtgcaaaatgtggaaaggaaaatagtaactatcacagtgttgtttgtcattttaagaaatgcaggggtccagagacggagaaagccccagctggggagtggatttgtgaggtatgcaacagagattttacaaccaaaattggcctgggacaacacaagagattggcacacccagcagtgagaaatcaggaaaggatcgttgcttcccaaccgaaagaaacatcaaatagaggtgctcacaaaaggtgctggacaaaggaggaggaagaattactaataagactggaggctcagttcgagggaaacaaaaatattaataagcttattgcagaacacataaccaccaaaacagctaagcagatcagtgacaaaaggcgattgctgtccagaaagccagcagaggagccacgtgaggagcctggaacgtgtcatcacaccaggagagcagctgcgagcctgagaacggagcctgagatgagtcatcacgcccaggcagaggacagagataatggacctgggagacgccctctgccaggcagggcagctgccggagggagaacaatggacgagataagacgccaccctgataagggcaacggacagcagagacccaccaagcaaaaatcagaagaacagctgcaggcttactataaaaagacactagaggaacgactttcagctggggcacttaacaccttcccccgagcattcaagcaggtaatggaaggccgggatataaagctagtaatcaatcagacagcgcaggactgcttcggatgcctggaatccataagccaaataagaacggcaacccgagataaaaaggacacggtgacccgggagaaacacccaaagaaaccttttcagaagtggatgaagaagagagcaatcaaaaaaggtaattatcttcggttccagcgtttatttcaccttgatagagggaaactggctaaaatcattttagatgatattgaatgcttgtcttgtgacataccactcagtgaaatttattcggtttttaaaacaagatgggaaacaactggtagctttaaaagccttggggactttaaaacttacgggaaggctgacaacactgccttcagagaattaattacggctaaagaaattgagaaaaatgtgcaggaaatgaagaaaggctcggctcccggtccagacgggattactcttggggacgtcgtaaagatggatcccgagttttcccggaccatggagattttcaatttatggttaacaactggtaaaatcccggacatggtgagggggtgcagaaccgttttgattccaaaatcatcaaagccggatcgtttgaaagacattaataactggagacctatcacgatcggttccatcttgctgagactgttctccaggattgtaacagctaggctgagcaaagcgtgccccctgaacccaaggcaaagaggctttatcagagcggcgggatgctctgaaaacttaaaactcctgcaaactataatttggtcggccaaaagagaacacagaccactggcagttgtattcgtggacatcgccaaggcttttgacaccgtaagccaccagcacatcattcatgctttgcagcaaagagaggtggatccccacatcgtcggtctggtgagcaatatgtacgagaacatcagtacgtatatcaccacaaagaggaacacacacacagacaaaatccagatccgggttggagtaaagcagggtgacccgctctcgccccttttatttaacctggcactcgaccctctattatgcaagctggaagagagtggcaaaggataccaccgaggacagagcagcatcacagcgatggcatttgcagacgatctggttttgctgagcgactcctgggaaaatatgaatacaaatattagcatactggagaccttctgcaatctgaccggactcaaaacacaggggcaaaagtgccacggcttttacatcaagccgacaaaggactcttacaccatcaatgactgcgctgcctggactatcaacggcacacccctgaacatgatcgaccccggcgaatctgagaaatacctcggcctgcagtttgacccgtggattggaatagcaaggtccggtctctccacaaaactagatttttggcttcagcggatcgatcaagcaccacttaaacctctgcagaaaactgatattctcaaaacatacaccatccctcggctgatctacatagctgaccactcagaagtgaaaagcgcactactcgaaacccttgaccagaagatccggacagcggtcaaggaatggcttcacctacctccgtgcacctgcgatgccatcctgtactcgagcacgagagacggcggtttgggcatcaccaaattggcaggactgatccccagcgtgcaggcccgtagactgcatcggatcgcacagtcatctgacgatacgatgaaatgcttcatggaaaaagagaaaatggaacagctgcataagaaattgtggattcaagctggaggggacagagagaacataccctcgatttgggaagcaccaccgtcgagtgaaccaccaaacaacgtgagcacaaattcggaatgggaagcaccgacccagaaagataaatttccaaagccttgcaattggaggaaaaacgaattcaaaaaatggaccaaattggcatcccaaggccgcggaattgtaaattttgaaagagacaaaattagtaaccattggatccaatactacagacgcatacctcacaggaaactcctcactgcactacaactcagggccaacgtttaccccacgagagaatttctagccaggggtagacaagaccaatacatcaaggcgtgtaggcactgcgatgcggacaacgaatcctgcgcccacatcatcggcaactgcccagtgacacaggacgcccgaatcaagaggcacaattacatctgcgaactgcttctcgaggaggcgaagaagaaggactgggtagtgttcaaggaaccgcacataagggattccaacaaggaactgtacaaacctgacctgatatttgtgaaggatgggcgtgcacttgtcgtggatgtgacagtacggtatgaagcagccaaatcatcgctggaggaagccgctgcagagaaagtgagaaagtacaaacacctggaaacggaagtaagacatctcacgaatgcaaaggacgttacttttgtgggctttcccctaggagcgcgggggaaatggcaccaagataactttaaacttttgactgagcttggcctctccaaatcgaggcaagtgaaaatggcagagactttttccacagtagcgctcttttcatctgtggacattgtacatatgtttgccagtagggccagaaaatctatggttatgtgataataggctgccttctgcggggcttgccttctggccatgcccttcttctctcccttgcacctgtacctcttggtctttgaataaagcctgagtaggaaggaccggtaaaaaaaaaaaaaaaaaaaaaaaaaaaaaaacgttgactaaaaaaaaaaaaaaaaaaaaaaaaaaaaaaaaaaaaaaaaaaaaaaaaaaaaaaaaaaaaaaaaaaaaaa

SEQ ID NO: 10728 - DNA, 5264 bp, synthetic construct
  source 1..5264: mol_type = other DNA
gaaataagagagaaaagaagagtaagaagaaatataagagaattcgccaccatggcccctaagaaaaagcggaaggtgaatatcagcggctctagctgcggcagccccaacagcgccgacaccagcagcgacttcaaggacctgtggaccaagctgaaggaatgccacgaccgggaagtgcagggactccaggtgaaggtcaccaaactcaagcaagaaagaatcctggacgcccagagactggaagaattcttcaccaagaaccagcagctgagagagcagcagaaagtgctgcacgagacaatcaaggttctggaagatagactgcgggccggcctgtgcgacagatgcgccgtgaccgaggaacacatgcgcaaaaagcagcaggagttcgagaacattagacagcaaaatctgaaattgatcacagagctgatgaacgagagaaacacactgcaggaggagaacaagaagctgagcgagcagctgcaacagaagatcgagaatgatcagcaacaccaggccgctgagctggaatgtgaagaggacgtgatccccgacagcccaatcacagctttcagcttttctggcgtgaacagactgaggcggaaggaaaacccccacgtgcggtacatcgagcagacccataccaagctggaacacagcgtgtgtgccaacgagatgagaaaggtgtccaagtcctccacccatccccagcacaaccctaacgaaaatgagatcctggtggctgatacctacgaccagtctcagagccctatggccaaggcccacggcaccagctcttatacccctgataagagctccttcaacctggccaccgtggtggccgagacactgggcctgggcgtgcaggaggaaagcgagacacagggcccaatgagccctctgggagatgagctgtaccactgcctggaaggcaaccacaagaaacagccttttgagtccggctccgagactcctggaacaagcgagagcgctacacctgagggcagccctaagagaaaggtgtccagcgccgagggcgctgccaaggaagagcctaaacggagaagcgccagactgagcgccaagccccccgccaaggtggaagccaagcctaagaaggccgccgctaaggacaagagcagcgataagaaagtccagaccaagggcaagcggggcgccaaaggcaaacaggccgaggtggccaaccaggagacaaaggaagatctgcctgctgagaacggcgaaaccaagaccgaggaatctccagcttctgacgaggccggagagaaggaggccaaaagcgacagcggctctgagacacctggaacaagcgagagcgccaccccggaatcctatgaacaacttgcaccacaaccgtgtgtgggagaaactttacattctagcctcccacgagacagtgaactgtttgtgcctgaagaggggagcagcgagaaggagagcgaggacgcgccaaaaacatctcctccgacgcctgggaaacatggtttggaacagactggggaggaaaaagtgatggtgactgttcctgacaaaaatccaccttgtccttgctgtggtacccgggtaaactctgtgttgaatctgattgaacatctgaaagtgtcacacgggaaaaggggggtttgttttcggtgtgcaaaatgtggaaaggaaaatagtaactatcacagtgttgtttgtcattttaagaaatgcaggggtccagagacggagaaagccccagctggggagtggatttgtgaggtatgcaacagagattttacaaccaaaattggcctgggacaacacaagagattggcacacccagcagtgagaaatcaggaaaggatcgttgcttcccaaccgaaagaaacatcaaatagaggtgctcacaaaaggtgctggacaaaggaggaggaagaattactaataagactggaggctcagttcgagggaaacaaaaatattaataagcttattgcagaacacataaccaccaaaacagctaagcagatcagtgacaaaaggcgattgctgtccagaaagccagcagaggagccacgtatggagcctggaacgtgtcatcacaccaggagagcagctgcgagcctgagaacggagcctgagatgagtcatcacgcccaggcagaggacagagataatggacctgggagacgccctctgccaggcagggcagctgccggagggagaacaatggacgagataagacgccaccctgataagggcaacggacagcagagacccaccaagcaaaaatcagaagaacagctgcaggcttactataaaaagacactagaggaacgactttcagctggggcacttaacaccttcccccgagcattcaagcaggtaatggaaggccgggatataaagctagtaatcaatcagacagcgcaggactgcttcggatgcctggaatccataagccaaataagaacggcaacccgagataaaaaggacacggtgacccgggagaaacacccaaagaaaccttttcagaagtggatgaagaagagagcaatcaaaaaaggtaattatcttcggttccagcgtttatttcaccttgatagagggaaactggctaaaatcattttagatgatattgaatgcttgtcttgtgacataccactcagtgaaatttattcggtttttaaaacaagatgggaaacaactggtagctttaaaagccttggggactttaaaacttacgggaaggctgacaacactgccttcagagaattaattacggctaaagaaattgagaaaaatgtgcaggaaatgagcaaaggctcgagccccggtccagacgggattactcttggggacgtcgtaaagatggatcccgagttttcccggaccatggagattttcaatttatggttaacaactggtaaaatcccggacatggtgagggggtgcagaaccgttttgattccaaaatcatcaaagccggatcgtttgaaagacattaataactggagacctatcacgatcggttccatcttgctgagactgttctccaggattgtaacagctaggctgagcaaagcgtgccccctgaacccaaggcaaagaggctttatcagagcggcgggatgctctgaaaacttaaaactcctgcaaactataatttggtcggccaaaagagaacacagaccactgggtgttgtattcgtggacatcgccaaggcttttgacaccgtaagccaccagcacatcattcatgctttgcagcaaagagaggtggatccccacatcgtcggtctggtgagcaatatgtacgagaacatcagtacgtatatcaccacaaagaggaacacacacacagacaaaatccagatccgggttggagtaaagcagggtgacccgatgtcgccccttttatttaacctggcactcgaccctctattatgcaagctggaagagagtggcaaaggataccaccgaggacagagcagcatcacagcgatggcatttgcagacgatctggttttgctgagcgactcctgggaaaatatgaatacaaatattagcatactggagaccttctgcaatctgaccggactcaaaacacaggggcaaaagtgccacggcttttacatcaagccgacaaagaagtcttacaccatcaatgactgcgctgcctggactatcaacggcacacccctgaacatgatcgaccccggcgaatctgagaaatacctcggcctgcagtttgacccgtggattggaatagcaaggtccggtctctccacaaaactagatttttggcttcagcggatcgatcaagcaccacttaaacctctgcagaaaactgatattctcaaaacatacaccatccctcggctgatctacatagctgaccactcagaagtgaaaagcgcactactcgaaacccttgaccagaagatccggacagcggtcaaggaatggcttcacctacctccgtgcacctgcgatgccatcctgtactcgagcacgagagacggcggtttgggcatcaccaaattggcaggactgatccccagcgtgcaggcccgtagactgcatcggatcgcacagtcatctgacgatacgatgaaatgcttcatggaaaaagagaaaatggaacagctgcataagaaattgtggattcaagctggaggggacagagagaacataccctcgatttgggaagcaccaccgtcgagtgaaccaccaaacaacgtgagcacaaattcggaatgggaagcaccgacccagaaagataaatttccaaagccttgcaattggaggaaaaacgaattcaaaaaatggaccaaattggcatcccaaggccgcggaattgtaaattttgaaagagacaaaattagtaaccattggatccaatactacagacgcatacctcacaggaaactcctcactgcactacaactcagggccaacgtttaccccacgagagaatttctagccaggggtagacaagaccaatacatcaaggcgtgtaggcactgcgatgcggacaacgaatcctgcgcccacatcatcggcaactgcccagtgacacaggacgcccgaatcaagaggcacaattacatctgcgaactgcttctcgaggaggcgaagaagaaggactgggtagtgttcaaggaaccgcacataagggattccaacaaggaactgtacaaacctgacctgatatttgtgaaggatgggcgtgcacttgtcgtggatgtgacagtacggtatgaagcagccaaatcatcgctggaggaagccgctgcagagaaagtgagaaagtacaaacacctggaaacggaagtaagacatctcacgaatgcaaaggacgttacttttgtgggctttcccctaggagcgcgggggaaatggcaccaagataactttaaacttttgactgagcttggcctctccaaatcgaggcaagtgaaaatggcagagactttttccacagtagcgctcttttcatctgtggacattgtacatatgtttgccagtagggccagaaaatctatggttatgtgataataggctgccttctgcggggcttgccttctggccatgcccttcttctctcccttgcacctgtacctcttggtctttgaataaagcctgagtaggaaggaccggtaaaaaaaaaaaaaaaaaaaaaaaaaaaaaaacgttgactaaaaaaaaaaaaaaaaaaaaaaaaaaaaaaaaaaaaaaaaaaaaaaaaaaaaaaaaaaaaaaaaaaaaaa

SEQ ID NO: 10729 - DNA, 5264 bp, synthetic construct
  source 1..5264: mol_type = other DNA
gaaataagagagaaaagaagagtaagaagaaatataagagaattcgccaccatggcccctaagaaaaagcggaaggtgaatatcagcggctctagctgcggcagccccaacagcgccgacaccagcagcgacttcaaggacctgtggaccaagctgaaggaatgccacgaccgggaagtgcagggactccaggtgaaggtcaccaaactcaagcaagaaagaatcctggacgcccagagactggaagaattcttcaccaagaaccagcagctgagagagcagcagaaagtgctgcacgagacaatcaaggttctggaagatagactgcgggccggcctgtgcgacagatgcgccgtgaccgaggaacacatgcgcaaaaagcagcaggagttcgagaacattagacagcaaaatctgaaattgatcacagagctgatgaacgagagaaacacactgcaggaggagaacaagaagctgagcgagcagctgcaacagaagatcgagaatgatcagcaacaccaggccgctgagctggaatgtgaagaggacgtgatccccgacagcccaatcacagctttcagcttttctggcgtgaacagactgaggcggaaggaaaacccccacgtgcggtacatcgagcagacccataccaagctggaacacagcgtgtgtgccaacgagatgagaaaggtgtccaagtcctccacccatccccagcacaaccctaacgaaaatgagatcctggtggctgatacctacgaccagtctcagagccctatggccaaggcccacggcaccagctcttatacccctgataagagctccttcaacctggccaccgtggtggccgagacactgggcctgggcgtgcaggaggaaagcgagacacagggcccaatgagccctctgggagatgagctgtaccactgcctggaaggcaaccacaagaaacagccttttgagtccggctccgagactcctggaacaagcgagagcgctacacctgagggcagccctaagagaaaggtgtccagcgccgagggcgctgccaaggaagagcctaaacggagaagcgccagactgagcgccaagccccccgccaaggtggaagccaagcctaagaaggccgccgctaaggacaagagcagcgataagaaagtccagaccaagggcaagcggggcgccaaaggcaaacaggccgaggtggccaaccaggagacaaaggaagatctgcctgctgagaacggcgaaaccaagaccgaggaatctccagcttctgacgaggccggagagaaggaggccaaaagcgacagcggctctgagacacctggaacaagcgagagcgccaccccggaatcctatgaacaacttgcaccacaaccgtgtgtgggagaaactttacattctagcctcccacgagacagtgaactgtttgtgcctgaagaggggagcagcgagaaggagagcgaggacgcgccaaaaacatctcctccgacgcctgggaaacatggtttggaacagactggggaggaaaaagtgatggtgactgttcctttcaaaaatccaccttgtccttgctgtggtacccgggtaaactctgtgttgaatctgattgaacatctgaaagtgtcacacgggaaaaggggggtttgttttcggtgtgcaaaatgtggaaaggaaaatagtaactatcacagtgttgtttgtcattttaagaaatgcaggggtccagagacggagaaagccccagctggggagtggatttgtgaggtatgcaacagagattttacaaccaaaattggcctgggacaacacaagagattggcacacccagcagtgagaaatcaggaaaggatcgttgcttcccaaccgaaagaaacatcaaatagaggtgctcacaaaaggtgctggacaaaggaggaggaagaattactaataagactggaggctcagttcgagggaaacaaaaatattaataagcttattgcagaacacataaccaccaaaacagctaagcagatcagtgacaaaaggcgattgctgtccagaaagccagcagaggagccacgtgaggagcctggaacgtgtcatcacaccaggagagcagctgcgagcctgagaacggagcctgagatgagtcatcacgcccaggcagaggacagagataatggacctgggagacgccctctgccaggcagggcagctgccggagggagaacaatggacgagataagacgccaccctgataagggcaacggacagcagagacccaccaagcaaaaatcagaagaacagctgcaggcttactataaaaagacactagaggaacgactttcagctggggcacttaacaccttcccccgagcattcaagcaggtaatggaaggccgggatataaagctagtaatcaatcagacagcgcaggactgcttcggatgcctggaatccataagccaaataagaacggcaacccgagataaaaaggacacggtgacccgggagaaacacccaaagaaaccttttcagaagtggatgaagaagagagcaatcaaaaaaggtaattatcttcggttccagcgtttattttatcttgatagagggaaactggctaaaatcattttagatgatattgaatgcttgtcttgtgacataccactcagtgaaatttattcggtttttaaaacaagatgggaaacaactggtagctttaaaagccttggggactttaaaacttacgggaaggctgacaacactgccttcagagaattaattacggctaaagaaattgagaaaaatgtgcaggaaatgagcaaaggctcggctcccggtccagacgggattactcttggggacgtcgtaaagatggatcccgagttttcccggaccatggagattttcaatttatggttaacaactggtaaaatcccggacatggtgagggggtgcagaaccgttttgattccaaaatcatcaaagccggatcgtttgaaagacattaataactggagacctatcacgatcggttccatcttgctgagactgttctccaggattgtaacagctaggctgagcaaagcgtgccccctgaacccaaggcaaagaggctttatcagagcggcgggatgctctgaaaacttaaaactcctgcaaactataatttggtcggccaaaagagaacacagaccactgggtgttgtattcgtggacatcgccaaggcttttgacaccgtaagccaccagcacatcattcatgctttgcagcaaagagaggtggatccccacatcgtcggtctggtgagcaatatgtacgagaacatcagtacgtatatcaccacaaagaggaacacacacacagacaaaatccagatccgggttggagtaaagcagggtgacccgatgtcgccccttttatttaacctggcaatggaccctctattatgcaagctggaagagagtggcaaaggataccaccgaggacagagcagcatcacagcgatggcatttgcagacgatctggttttgctgagcgactcctgggaaaatatgaatacaaatattagcatactggagaccttctgcaatctgaccggactcaaaacacaggggcaaaagtgccacggcttttacatcaagccgacaaaggactcttacaccatcaatgactgcgctgcctggactatcaacggcacacccctgaacatgatcgaccccggcgaatctgagaaatacctcggcctgcagtttgacccgtggattggaatagcaaggtccggtctctccacaaaactagatttttggcttcagcggatcgatcaagcaccacttaaacctctgcagaaaactgatattctcaaaacatacaccatccctcggctgatctacatagctgaccactcagaagtgaaaagcgcactactcgaaacccttgaccagaagatccggacagcggtcaaggaatggcttcacctacctccgtgcacctgcgatgccatcctgtactcgagcacgagagacggcggtttgggcatcaccaaattggcaggactgatccccagcgtgcaggcccgtagactgcatcggatcgcacagtcatctgacgatacgatgaaatgcttcatggaaaaagagaaaatggaacagctgcataagaaattgtggattcaagctggaggggacagagagaacataccctcgatttgggaagcaccaccgtcgagtgaaccaccaaacaacgtgagcacaaattcggaatgggaagcaccgacccagaaagataaatttccaaagccttgcaattggaggaaaaacgaattcaaaaaatggaccaaattggcatcccaaggccgcggaattgtaaattttgaaagagacaaaattagtaaccattggatccaatactacagacgcatacctcacaggaaactcctcactgcactacaactcagggccaacgtttaccccacgagagaatttctagccaggggtagacaagaccaatacatcaaggcgtgtaggcactgcgatgcggacaacgaatcctgcgcccacatcatcggcaactgcccagtgacacaggacgcccgaatcaagaggcacaattacatctgcgaactgcttctcgaggaggcgaagaagaaggactgggtagtgttcaaggaaccgcacataagggattccaacaaggaactgtacaaacctgacctgatatttgtgaaggatgggcgtgcacttgtcgtggatgtgacagtacggtatgaagcagccaaatcatcgctggaggaagccgctgcagagaaagtgagaaagtacaaacacctggaaacggaagtaagacatctcacgaatgcaaaggacgttacttttgtgggctttcccctaggagcgcgggggaaatggcaccaagataactttaaacttttgactgagcttggcctctccaaatcgaggcaagtgaaaatggcagagactttttccacagtagcgctcttttcatctgtggacattgtacatatgtttgccagtagggccagaaaatctatggttatgtgataataggctgccttctgcggggcttgccttctggccatgcccttcttctctcccttgcacctgtacctcttggtctttgaataaagcctgagtaggaaggaccggtaaaaaaaaaaaaaaaaaaaaaaaaaaaaaaacgttgactaaaaaaaaaaaaaaaaaaaaaaaaaaaaaaaaaaaaaaaaaaaaaaaaaaaaaaaaaaaaaaaaaaaaaa

SEQ ID NO: 10730 - DNA, 5264 bp, synthetic construct
  source 1..5264: mol_type = other DNA
gaaataagagagaaaagaagagtaagaagaaatataagagaattcgccaccatggcccctaagaaaaagcggaaggtgaatatcagcggctctagctgcggcagccccaacagcgccgacaccagcagcgacttcaaggacctgtggaccaagctgaaggaatgccacgaccgggaagtgcagggactccaggtgaaggtcaccaaactcaagcaagaaagaatcctggacgcccagagactggaagaattcttcaccaagaaccagcagctgagagagcagcagaaagtgctgcacgagacaatcaaggttctggaagatagactgcgggccggcctgtgcgacagatgcgccgtgaccgaggaacacatgcgcaaaaagcagcaggagttcgagaacattagacagcaaaatctgaaattgatcacagagctgatgaacgagagaaacacactgcaggaggagaacaagaagctgagcgagcagctgcaacagaagatcgagaatgatcagcaacaccaggccgctgagctggaatgtgaagaggacgtgatccccgacagcccaatcacagctttcagcttttctggcgtgaacagactgaggcggaaggaaaacccccacgtgcggtacatcgagcagacccataccaagctggaacacagcgtgtgtgccaacgagatgagaaaggtgtccaagtcctccacccatccccagcacaaccctaacgaaaatgagatcctggtggctgatacctacgaccagtctcagagccctatggccaaggcccacggcaccagctcttatacccctgataagagctccttcaacctggccaccgtggtggccgagacactgggcctgggcgtgcaggaggaaagcgagacacagggcccaatgagccctctgggagatgagctgtaccactgcctggaaggcaaccacaagaaacagccttttgagtccggctccgagactcctggaacaagcgagagcgctacacctgagggcagccctaagagaaaggtgtccagcgccgagggcgctgccaaggaagagcctaaacggagaagcgccagactgagcgccaagccccccgccaaggtggaagccaagcctaagaaggccgccgctaaggacaagagcagcgataagaaagtccagaccaagggcaagcggggcgccaaaggcaaacaggccgaggtggccaaccaggagacaaaggaagatctgcctgctgagaacggcgaaaccaagaccgaggaatctccagcttctgacgaggccggagagaaggaggccaaaagcgacagcggctctgagacacctggaacaagcgagagcgccaccccggaatcctatgaacaacttgcaccacaaccgtgtgtgggagaaactttacattctagcctcccacgagacagtgaactgtttgtgcctgaagaggggagcagcgagaaggagagcgaggacgcgccaaaaacatctcctccgacgcctgggaaacatggtttggaacagactggggaggaaaaagtgatggtgactgttcctgacaaaaatccaccttgtccttgctgtggtacccgggtaaactctgtgttgaatctgattgaacatctgaaagtgtcacacgggaaaaggggggtttgttttcggtgtgcaaaatgtggaaaggaaaatagtaactatcacagtgttgtttgtcattttaagaaatgcaggggtccagagacggagaaagccccagctggggagtggatttgtgaggtatgcaacagagattttacaaccaaaattggcctgggacaacacaagagattggcacacccagcagtgagaaatcaggaaaggatcgttgcttcccaaccgaaagaaacatcaaatagaggtgctcacaaaaggtgctggacaaaggaggaggaagaattactaataagactggaggctcagttcgagggaaacaaaaatattaataagcttattgcagaacacataaccaccaaaacagctaagcagatcagtgacaaaaggcgattgctgtccagaaagccagcagaggagccacgtgaggagcctggaacgtgtcatcacaccaggagagcagctgcgagcctgagaacggagcctgagatgagtcatcacgcccaggcagaggacagagataatggacctgggagacgccctctgccaggcagggcagctgccggagggagaacaatggacgagataagacgccaccctgataagggcaacggacagcagagacccaccaagcaaaaatcagaagaacagctgcaggcttactataaaaagacactagaggaacgactttcagctggggcacttaacaccttcccccgagcattcaagcaggtaatggaaggccgggatataaagctagtaatcaatcagacagcgcaggactgcttcggatgcctggaatccataagccaaataagaacggcaacccgagataaaaaggacacggtgacccgggagaaacacccaaagaaaccttttcagaagtggatgaagaagagagcaatcaaaaaaggtaattatcttcggttccagcgtttattttatcttgatagagggaaactggctaaaatcattttagatgatattgaatgcttgtcttgtgacataccactcagtgaaatttattcgacttttaaaacaagatgggaaacaactggtagctttaaaagccttggggactttaaaacttacgggaaggctgacaacactgccttcagagaattaattacggctaaagaaattgagaaaaatgtgcaggaaatgagcaaaggctcggctcccggtccagacgggattactcttggggacgtcgtaaagatggatcccgagttttcccggaccatggagattttcaatttatggttaacaactggtaaaatcccggacatggtgagggggtgcagaaccgttttgattccaaaatcatcaaagccggatcgtttgaaagacattaataactggagacctatcacgatcggttccatcttgctgagactgttctccaggattgtaacagctaggctgagcaaagcgtgccccctgaacccaaggcaaagaggctttatcagagcggcgggatgctctgaaaacttaaaactcctgcaaactataatttggtcggccaaaagagaacacagaccactgggtgttgtattcgtggacatcgccaaggcttttgacaccgtaagccaccagcacatcattcatgctttgcagcaaagagaggtggatccccacatcgtcggtctggtgagcaatatgtacgagaacatcagtacgtatatcaccacaaagaggaacacacacacagacaaaatccagatccgggttggagtaaagcagggtgacccgatgtcgccccttttatttaacctggcaatggaccctctattatgcaagctggaagagagtggcaaaggataccaccgaggacagagcagcatcacagcgatggcatttgcagacgatctggttttgctgagcgactcctgggaaaatatgaatacaaatattagcatactggagaccttctgcaatctgaccggactcaaaacacaggggcaaaagtgccacggcttttacatcaagccgacaaaggactcttacaccatcaatgactgcgctgcctggactatcaacggcacacccctgaacatgatcgaccccggcgaatctgagaaatacctcggcctgcagtttgacccgtggattggaatagcaaggtccggtctctccacaaaactagatttttggcttcagcggatcgatcaagcaccacttaaacctctgcagaaaactgatattctcaaaacatacaccatccctcggctgatctacatagctgaccactcagaagtgaaaagcgcactactcgaaacccttgaccagaagatccggacagcggtcaaggaatggcttcacctacctccgtgcacctgcgatgccatcctgtactcgagcacgagagacggcggtttgggcatcaccaaattggcaggactgatccccagcgtgcaggcccgtagactgcatcggatcgcacagtcatctgacgatacgatgaaatgcttcatggaaaaagagaaaatggaacagctgcataagaaattgtggattcaagctggaggggacagagagaacataccctcgatttgggaagcaccaccgtcgagtgaaccaccaaacaacgtgagcacaaattcggaatgggaagcaccgacccagaaagataaatttccaaagccttgcaattggaggaaaaacgaattcaaaaaatggaccaaattggcatcccaaggccgcggaattgtaaattttgaaagagacaaaattagtaaccattggatccaatactacagacgcatacctcacaggaaactcctcactgcactacaactcagggccaacgtttaccccacgagagaatttctagccaggggtagacaagaccaatacatcaaggcgtgtaggcactgcgatgcggacaacgaatcctgcgcccacatcatcggcaactgcccagtgacacaggacgcccgaatcaagaggcacaattacatctgcgaactgcttctcgaggaggcgaagaagaaggactgggtagtgttcaaggaaccgcacataagggattccaacaaggaactgtacaaacctgacctgatatttgtgaaggatgggcgtgcacttgtcgtggatgtgacagtacggtatgaagcagccaaatcatcgctggaggaagccgctgcagagaaagtgagaaagtacaaacacctggaaacggaagtaagacatctcacgaatgcaaaggacgttacttttgtgggctttcccctaggagcgcgggggaaatggcaccaagataactttaaacttttgactgagcttggcctctccaaatcgaggcaagtgaaaatggcagagactttttccacagtagcgctcttttcatctgtggacattgtacatatgtttgccagtagggccagaaaatctatggttatgtgataataggctgccttctgcggggcttgccttctggccatgcccttcttctctcccttgcacctgtacctcttggtctttgaataaagcctgagtaggaaggaccggtaaaaaaaaaaaaaaaaaaaaaaaaaaaaaaacgttgactaaaaaaaaaaaaaaaaaaaaaaaaaaaaaaaaaaaaaaaaaaaaaaaaaaaaaaaaaaaaaaaaaaaaaa

SEQ ID NO: 10731 - DNA, 5264 bp, synthetic construct
  source 1..5264: mol_type = other DNA
gaaataagagagaaaagaagagtaagaagaaatataagagaattcgccaccatggcccctaagaaaaagcggaaggtgaatatcagcggctctagctgcggcagccccaacagcgccgacaccagcagcgacttcaaggacctgtggaccaagctgaaggaatgccacgaccgggaagtgcagggactccaggtgaaggtcaccaaactcaagcaagaaagaatcctggacgcccagagactggaagaattcttcaccaagaaccagcagctgagagagcagcagaaagtgctgcacgagacaatcaaggttctggaagatagactgcgggccggcctgtgcgacagatgcgccgtgaccgaggaacacatgcgcaaaaagcagcaggagttcgagaacattagacagcaaaatctgaaattgatcacagagctgatgaacgagagaaacacactgcaggaggagaacaagaagctgagcgagcagctgcaacagaagatcgagaatgatcagcaacaccaggccgctgagctggaatgtgaagaggacgtgatccccgacagcccaatcacagctttcagcttttctggcgtgaacagactgaggcggaaggaaaacccccacgtgcggtacatcgagcagacccataccaagctggaacacagcgtgtgtgccaacgagatgagaaaggtgtccaagtcctccacccatccccagcacaaccctaacgaaaatgagatcctggtggctgatacctacgaccagtctcagagccctatggccaaggcccacggcaccagctcttatacccctgataagagctccttcaacctggccaccgtggtggccgagacactgggcctgggcgtgcaggaggaaagcgagacacagggcccaatgagccctctgggagatgagctgtaccactgcctggaaggcaaccacaagaaacagccttttgagtccggctccgagactcctggaacaagcgagagcgctacacctgagggcagccctaagagaaaggtgtccagcgccgagggcgctgccaaggaagagcctaaacggagaagcgccagactgagcgccaagccccccgccaaggtggaagccaagcctaagaaggccgccgctaaggacaagagcagcgataagaaagtccagaccaagggcaagcggggcgccaaaggcaaacaggccgaggtggccaaccaggagacaaaggaagatctgcctgctgagaacggcgaaaccaagaccgaggaatctccagcttctgacgaggccggagagaaggaggccaaaagcgacagcggctctgagacacctggaacaagcgagagcgccaccccggaatcctatgaacaacttgcaccacaaccgtgtgtgggagaaactttacattctagcctcccacgagacagtgaactgtttgtgcctgaagaggggagcagcgagaaggagagcgaggacgcgccaaaaacatctcctccgacgcctgggaaacatggtttggaacagactggggaggaaaaagtgatggtgactgttcctgacaaaaatccaccttgtccttgctgtggtacccgggtaaactctgtgttgaatctgattgaacatctgaaagtgtcacacgggaaaaggggggtttgttttcggtgtgcaaaatgtggaaaggaaaatagtaactatcacagtgttgtttgtcattttaagaaatgcaggggtccagagacggagaaagccccagctggggagtggatttgtgaggtatgcaacagagattttacaaccaaaattggcctgggacaacacaagagattggcacacccagcagtgagaaatcaggaaaggatcgttgcttcccaaccgaaagaaacatcaaatagaggtgctcacaaaaggtgctggacaaaggaggaggaagaattactaataagactggaggctcagttcgagggaaacaaaaatattaataagcttattgcagaacacataaccaccaaaacagctaagcagatcagtgacaaaaggcgattgctgtccagaaagccagcagaggagccacgtgaggagcctggaacgtgtcatcacaccaggagagcagctgcgagcctgagaacggagcctgagatgagtcatcacgcccaggcagaggacagagataatggacctgggagacgccctctgccaggcagggcagctgccggagggagaacagaggacgagataagacgccaccctgataagggcaacggacagcagagacccaccaagcaaaaatcagaagaacagctgcaggcttactataaaaagacactagaggaacgactttcagctggggcacttaacaccttcccccgagcattcaagcaggtaatggaaggccgggatataaagctagtaatcaatcagacagcgcaggactgcttcggatgcctggaatccataagccaaataagaacggcaacccgagataaaaaggacacggtgacccgggagaaacacccaaagaaaccttttcagaagtggatgaagaagagagcaatcaaaaaaggtaattatcttcggttccagcgtttattttatcttgatagagggaaactggctaaaatcattttagatgatattgaatgcttgtcttgtgacataccactcagtgaaatttattcggtttttaaaacaagatgggaaacaactggtagctttaaaagccttggggactttaaaacttacgggaaggctgacaacactgccttcagagaattaattacggctaaagaaattgagaaaaatgtgcaggaaatgagcaaaggctcggctcccggtccagacgggattactcttggggacgtcgtaaagatggatcccgagttttcccggaccatggagattttcaatttatggttaacaactggtaaaatcccggacatggtgagggggtgcagaaccgttttgattccaaaatcatcaaagccggatcgtttgaaagacattaataactggagacctatcacgatcggttccatcttgctgagactgttctccaggattgtaacagctaggctgagcaaagcgtgccccctgaacccaaggcaaagaggctttatcagagcggcgggatgctctgaaaacttaaaactcctgcaaactataatttggtcggccaaaagagaacacagaccactgggtgttgtattcgtggacatcgccaaggcttttgacaccgtaagccaccagcacatcattcatgctttgcagcaaagagaggtggatccccacatcgtcggtctggtgagcaatatgtacgagaacatcagtacgtatatcaccacaaagaggaacacacacacagacaaaatccagatccgggttggagtaaagcagggtgacccgatgtcgccccttttatttaacctggcaatggaccctctattatgcaagctggaagagagtggcaaaggataccaccgaggacagagcagcatcacagcgatggcatttgcagacgatctggttttgctgagcgactcctgggaaaatatgaatacaaatattagcatactggagaccttctgcaatctgaccggactcaaaacacaggggcaaaagtgccacggcttttacatcaagccgacaaaggactcttacaccatcaatgactgcgctgcctggactatcaacggcacacccctgaacatgatcgaccccggcgaatctgagaaatacctcggcctgcagtttgacccgtggattggaatagcaaggtccggtctctccacaaaactagatttttggcttcagcggatcgatcaagcaccacttaaacctctgcagaaaactgatattctcaaaacatacaccatccctcggctgatctacatagctgaccactcagaagtgaaaagcgcactactcgaaacccttgaccagaagatccggacagcggtcaaggaatggcttcacctacctccgtgcacctgcgatgccatcctgtactcgagcacgagagacggcggtttgggcatcaccaaattggcaggactgatccccagcgtgcaggcccgtagactgcatcggatcgcacagtcatctgacgatacgatgaaatgcttcatggaaaaagagaaaatggaacagctgcataagaaattgtggattcaagctggaggggacagagagaacataccctcgatttgggaagcaccaccgtcgagtgaaccaccaaacaacgtgagcacaaattcggaatgggaagcaccgacccagaaagataaatttccaaagccttgcaattggaggaaaaacgaattcaaaaaatggaccaaattggcatcccaaggccgcggaattgtaaattttgaaagagacaaaattagtaaccattggatccaatactacagacgcatacctcacaggaaactcctcactgcactacaactcagggccaacgtttaccccacgagagaatttctagccaggggtagacaagaccaatacatcaaggcgtgtaggcactgcgatgcggacaacgaatcctgcgcccacatcatcggcaactgcccagtgacacaggacgcccgaatcaagaggcacaattacatctgcgaactgcttctcgaggaggcgaagaagaaggactgggtagtgttcaaggaaccgcacataagggattccaacaaggaactgtacaaacctgacctgatatttgtgaaggatgggcgtgcacttgtcgtggatgtgacagtacggtatgaagcagccaaatcatcgctggaggaagccgctgcagagaaagtgagaaagtacaaacacctggaaacggaagtaagacatctcacgaatgcaaaggacgttacttttgtgggctttcccctaggagcgcgggggaaatggcaccaagataactttaaacttttgactgagcttggcctctccaaatcgaggcaagtgaaaatggcagagactttttccacagtagcgctcttttcatctgtggacattgtacatatgtttgccagtagggccagaaaatctatggttatgtgataataggctgccttctgcggggcttgccttctggccatgcccttcttctctcccttgcacctgtacctcttggtctttgaataaagcctgagtaggaaggaccggtaaaaaaaaaaaaaaaaaaaaaaaaaaaaaaacgttgactaaaaaaaaaaaaaaaaaaaaaaaaaaaaaaaaaaaaaaaaaaaaaaaaaaaaaaaaaaaaaaaaaaaaaa

SEQ ID NO: 10732 - DNA, 5264 bp, synthetic construct
  source 1..5264: mol_type = other DNA
gaaataagagagaaaagaagagtaagaagaaatataagagaattcgccaccatggcccctaagaaaaagcggaaggtgaatatcagcggctctagctgcggcagccccaacagcgccgacaccagcagcgacttcaaggacctgtggaccaagctgaaggaatgccacgaccgggaagtgcagggactccaggtgaaggtcaccaaactcaagcaagaaagaatcctggacgcccagagactggaagaattcttcaccaagaaccagcagctgagagagcagcagaaagtgctgcacgagacaatcaaggttctggaagatagactgcgggccggcctgtgcgacagatgcgccgtgaccgaggaacacatgcgcaaaaagcagcaggagttcgagaacattagacagcaaaatctgaaattgatcacagagctgatgaacgagagaaacacactgcaggaggagaacaagaagctgagcgagcagctgcaacagaagatcgagaatgatcagcaacaccaggccgctgagctggaatgtgaagaggacgtgatccccgacagcccaatcacagctttcagcttttctggcgtgaacagactgaggcggaaggaaaacccccacgtgcggtacatcgagcagacccataccaagctggaacacagcgtgtgtgccaacgagatgagaaaggtgtccaagtcctccacccatccccagcacaaccctaacgaaaatgagatcctggtggctgatacctacgaccagtctcagagccctatggccaaggcccacggcaccagctcttatacccctgataagagctccttcaacctggccaccgtggtggccgagacactgggcctgggcgtgcaggaggaaagcgagacacagggcccaatgagccctctgggagatgagctgtaccactgcctggaaggcaaccacaagaaacagccttttgagtccggctccgagactcctggaacaagcgagagcgctacacctgagggcagccctaagagaaaggtgtccagcgccgagggcgctgccaaggaagagcctaaacggagaagcgccagactgagcgccaagccccccgccaaggtggaagccaagcctaagaaggccgccgctaaggacaagagcagcgataagaaagtccagaccaagggcaagcggggcgccaaaggcaaacaggccgaggtggccaaccaggagacaaaggaagatctgcctgctgagaacggcgaaaccaagaccgaggaatctccagcttctgacgaggccggagagaaggaggccaaaagcgacagcggctctgagacacctggaacaagcgagagcgccaccccggaatcctatgaacaacttgcaccacaaccgtgtgtgggagaaactttacattctagcctcccacgagacagtgaactgtttgtgcctgaagaggggagcagcgagaaggagagcgaggacgcgccaaaaacatctcctccgacgcctgggaaacatggtttggaacagactggggaggaaaaagtgatggtgactgttcctgacaaaaatccaccttgtccttgctgtggtacccgggtaaactctgtgttgaatctgattgaacatctgaaagtgtcacacgggaaaaggggggtttgttttcggtgtgcaaaatgtggaaaggaaaatagtaactatcacagtgttgtttgtcattttaagaaatgcaggggtccagagacggagaaagccccagctggggagtggatttgtgaggtatgcaacagagattttacaaccaaaattggcctgggacaacacaagagattggcacacccagcagtgagaaatcaggaaaggatcgttgcttcccaaccgaaagaaacatcaaatagaggtgctcacaaaaggtgctggacaaaggaggaggaagaattactaataagactggaggctcagttcgagggaaacaaaaatattaataagcttattgcagaacacataaccaccaaaacagctaagcagatcagtgacaaaaggcgattgctgtccagaaagccagcagaggagccacgtgaggagcctggaacgtgtcatcacaccaggagagcagctgcgagcctgagaacggagcctgagatgagtcatcacgcccaggcagaggacagagataatggacctgggagacgccctctgccaggcagggcagctgccggagggagaacaatggacgagataagacgccaccctgataagggcaacggacagcagagacccaccaagcaaaaatcagaagaacagctgcaggcttaccttaaaaagacactagaggaacgactttcagctggggcacttaacaccttcccccgagcattcaagcaggtaatggaaggccgggatataaagctagtaatcaatcagacagcgcaggactgcttcggatgcctggaatccataagccaaataagaacggcaacccgagataaaaaggacacggtgacccgggagaaacacccaaagaaaccttttcagaagtggatgaagaagagagcaatcaaaaaaggtaattatcttcggttccagcgtttattttatcttgatagagggaaactggctaaaatcattttagatgatattgaatgcttgtcttgtgacataccactcagtgaaatttattcggtttttaaaacaagatgggaaacaactggtagctttaaaagccttggggactttaaaacttacgggaaggctgacaacactgccttcagagaattaattacggctaaagaaattgagaaaaatgtgcaggaaatgagcaaaggctcggctcccggtccagacgggattactcttggggacgtcgtaaagatggatcccgagttttcccggaccatggagattttcaatttatggttaacaactggtaaaatcccggacatggtgagggggtgcagaaccgttttgattccaaaatcatcaaagccggatcgtttgaaagacattaataactggagacctatcacgatcggttccatcttgctgagactgttctccaggattgtaacagctaggctgagcaaagcgtgccccctgaacccaaggcaaagaggctttatcagagcggcgggatgctctgaaaacttaaaactcctgcaaactataatttggtcggccaaaagagaacacagaccactgggtgttgtattcgtggacatcgccaaggcttttgacaccgtaagccaccagcacatcattcatgctttgcagcaaagagaggtggatccccacatcgtcggtctggtgagcaatatgtacgagaacatcagtacgtatatcaccacaaagaggaacacacacacagacaaaatccagatccgggttggagtaaagcagggtgacccgatgtcgccccttttatttaacctggcaatggaccctctattatgcaagctggaagagagtggcaaaggataccaccgaggacagagcagcatcacagcgatggcatttgcagacgatctggttttgctgagcgactcctgggaaaatatgaatacaaatattagcatactggagaccttctgcaatctgaccggactcaaaacacaggggcaaaagtgccacggcttttacatcaagccgacaaaggactcttacaccatcaatgactgcgctgcctggactatcaacggcacacccctgaacatgatcgaccccggcgaatctgagaaatacctcggcctgcagtttgacccgtggattggaatagcaaggtccggtctctccacaaaactagatttttggcttcagcggatcgatcaagcaccacttaaacctctgcagaaaactgatattctcaaaacatacaccatccctcggctgatctacatagctgaccactcagaagtgaaaagcgcactactcgaaacccttgaccagaagatccggacagcggtcaaggaatggcttcacctacctccgtgcacctgcgatgccatcctgtactcgagcacgagagacggcggtttgggcatcaccaaattggcaggactgatccccagcgtgcaggcccgtagactgcatcggatcgcacagtcatctgacgatacgatgaaatgcttcatggaaaaagagaaaatggaacagctgcataagaaattgtggattcaagctggaggggacagagagaacataccctcgatttgggaagcaccaccgtcgagtgaaccaccaaacaacgtgagcacaaattcggaatgggaagcaccgacccagaaagataaatttccaaagccttgcaattggaggaaaaacgaattcaaaaaatggaccaaattggcatcccaaggccgcggaattgtaaattttgaaagagacaaaattagtaaccattggatccaatactacagacgcatacctcacaggaaactcctcactgcactacaactcagggccaacgtttaccccacgagagaatttctagccaggggtagacaagaccaatacatcaaggcgtgtaggcactgcgatgcggacaacgaatcctgcgcccacatcatcggcaactgcccagtgacacaggacgcccgaatcaagaggcacaattacatctgcgaactgcttctcgaggaggcgaagaagaaggactgggtagtgttcaaggaaccgcacataagggattccaacaaggaactgtacaaacctgacctgatatttgtgaaggatgggcgtgcacttgtcgtggatgtgacagtacggtatgaagcagccaaatcatcgctggaggaagccgctgcagagaaagtgagaaagtacaaacacctggaaacggaagtaagacatctcacgaatgcaaaggacgttacttttgtgggctttcccctaggagcgcgggggaaatggcaccaagataactttaaacttttgactgagcttggcctctccaaatcgaggcaagtgaaaatggcagagactttttccacagtagcgctcttttcatctgtggacattgtacatatgtttgccagtagggccagaaaatctatggttatgtgataataggctgccttctgcggggcttgccttctggccatgcccttcttctctcccttgcacctgtacctcttggtctttgaataaagcctgagtaggaaggaccggtaaaaaaaaaaaaaaaaaaaaaaaaaaaaaaacgttgactaaaaaaaaaaaaaaaaaaaaaaaaaaaaaaaaaaaaaaaaaaaaaaaaaaaaaaaaaaaaaaaaaaaaaa

SEQ ID NO: 10733 - DNA, 5264 bp, synthetic construct
  source 1..5264: mol_type = other DNA
gaaataagagagaaaagaagagtaagaagaaatataagagaattcgccaccatggcccctaagaaaaagcggaaggtgaatatcagcggctctagctgcggcagccccaacagcgccgacaccagcagcgacttcaaggacctgtggaccaagctgaaggaatgccacgaccgggaagtgcagggactccaggtgaaggtcaccaaactcaagcaagaaagaatcctggacgcccagagactggaagaattcttcaccaagaaccagcagctgagagagcagcagaaagtgctgcacgagacaatcaaggttctggaagatagactgcgggccggcctgtgcgacagatgcgccgtgaccgaggaacacatgcgcaaaaagcagcaggagttcgagaacattagacagcaaaatctgaaattgatcacagagctgatgaacgagagaaacacactgcaggaggagaacaagaagctgagcgagcagctgcaacagaagatcgagaatgatcagcaacaccaggccgctgagctggaatgtgaagaggacgtgatccccgacagcccaatcacagctttcagcttttctggcgtgaacagactgaggcggaaggaaaacccccacgtgcggtacatcgagcagacccataccaagctggaacacagcgtgtgtgccaacgagatgagaaaggtgtccaagtcctccacccatccccagcacaaccctaacgaaaatgagatcctggtggctgatacctacgaccagtctcagagccctatggccaaggcccacggcaccagctcttatacccctgataagagctccttcaacctggccaccgtggtggccgagacactgggcctgggcgtgcaggaggaaagcgagacacagggcccaatgagccctctgggagatgagctgtaccactgcctggaaggcaaccacaagaaacagccttttgagtccggctccgagactcctggaacaagcgagagcgctacacctgagggcagccctaagagaaaggtgtccagcgccgagggcgctgccaaggaagagcctaaacggagaagcgccagactgagcgccaagccccccgccaaggtggaagccaagcctaagaaggccgccgctaaggacaagagcagcgataagaaagtccagaccaagggcaagcggggcgccaaaggcaaacaggccgaggtggccaaccaggagacaaaggaagatctgcctgctgagaacggcgaaaccaagaccgaggaatctccagcttctgacgaggccggagagaaggaggccaaaagcgacagcggctctgagacacctggaacaagcgagagcgccaccccggaatcctatgaacaacttgcaccacaaccgtgtgtgggagaaactttacattctagcctcccacgagacagtgaactgtttgtgcctgaagaggggagcagcgagaaggagagcgaggacgcgccaaaaacatctcctccgacgcctgggaaacatggtttggaacagactggggaggaaaaagtgatggtgactgttcctgacaaaaatccaccttgtccttgctgtggtacccgggtaaactctgtgttgaatctgattgaacatctgaaagtgtcacacgggaaaaggggggtttgttttcggtgtgcaaaatgtggaaaggaaaatagtaactatcacagtgttgtttgtcattttaagaaatgcaggggtccagagacggagaaagccccagctggggagtggatttgtgaggtatgcaacagagattttacaaccaaaattggcctgggacaacacaagagattggcacacccagcagtgagaaatcaggaaaggatcgttgcttcccaaccgaaagaaacatcaaatagaggtgctcacaaaaggtgctggacaaaggaggaggaagaattactaataagactggaggctcagttcgagggaaacaaaaatattaataagcttattgcagaacacataaccaccaaaacagctaagcagatcagtgacaaaaggcgattgctgtccagaaagccagcagaggagccacgtgaggagcctggaacgtgtcatcacaccaggagagcagctgcgagcctgagaacggagcctgagatgagtcatcacgcccaggcagaggacagagataatggacctgggagacgccctctgccaggcagggcagctgccggagggagaacaatggacgagataagacgccaccctgataagggcaacggacagcagagacccaccaagcaaaaatcagaagaacagctgcaggcttactataaaaagacactagaggaacgactttcagctggggcacttaacaccttcccccgagcattcaagcaggtaatggaaggccgggatataaagctagtaatcaatcagacagcgcaggactgcttcggatgcctggaatccataagccaaataagaacggcaacccgagataaaaaggacacggtgacccgggagaaacacccaaagaaaccttttcagaagtggatgaagaagagagcaatcaaaaaaggtaattatcttcggttccagcgtttattttatcttgatagagggaaactggctaaaatcattttagatgatattgaatgcttgtcttgtgacataccactcagtgaaatttattcggtttttaaaacaagatgggaaacaactggtagctttaaaagccttggggactttaaaacttacgggaaggctgacaacactgccttcagagaattaattacggctaaagaaattgagaaaaatgtgcaggaaatgagcaaaggctcggctcccggtccagacgggattactcttggggacgtcgtaaagatggatcccgagttttcccggaccagtgagattttcaatttatggttaacaactggtaaaatcccggacatggtgagggggtgcagaaccgttttgattccaaaatcatcaaagccggatcgtttgaaagacattaataactggagacctatcacgatcggttccatcttgctgagactgttctccaggattgtaacagctaggctgagcaaagcgtgccccctgaacccaaggcaaagaggctttatcagagcggcgggatgctctgaaaacttaaaactcctgcaaactataatttggtcggccaaaagagaacacagaccactgggtgttgtattcgtggacatcgccaaggcttttgacaccgtaagccaccagcacatcattcatgctttgcagcaaagagaggtggatccccacatcgtcggtctggtgagcaatatgtacgagaacatcagtacgtatatcaccacaaagaggaacacacacacagacaaaatccagatccgggttggagtaaagcagggtgacccgatgtcgccccttttatttaacctggcaatggaccctctattatgcaagctggaagagagtggcaaaggataccaccgaggacagagcagcatcacagcgatggcatttgcagacgatctggttttgctgagcgactcctgggaaaatatgaatacaaatattagcatactggagaccttctgcaatctgaccggactcaaaacacaggggcaaaagtgccacggcttttacatcaagccgacaaaggactcttacaccatcaatgactgcgctgcctggactatcaacggcacacccctgaacatgatcgaccccggcgaatctgagaaatacctcggcctgcagtttgacccgtggattggaatagcaaggtccggtctctccacaaaactagatttttggcttcagcggatcgatcaagcaccacttaaacctctgcagaaaactgatattctcaaaacatacaccatccctcggctgatctacatagctgaccactcagaagtgaaaagcgcactactcgaaacccttgaccagaagatccggacagcggtcaaggaatggcttcacctacctccgtgcacctgcgatgccatcctgtactcgagcacgagagacggcggtttgggcatcaccaaattggcaggactgatccccagcgtgcaggcccgtagactgcatcggatcgcacagtcatctgacgatacgatgaaatgcttcatggaaaaagagaaaatggaacagctgcataagaaattgtggattcaagctggaggggacagagagaacataccctcgatttgggaagcaccaccgtcgagtgaaccaccaaacaacgtgagcacaaattcggaatgggaagcaccgacccagaaagataaatttccaaagccttgcaattggaggaaaaacgaattcaaaaaatggaccaaattggcatcccaaggccgcggaattgtaaattttgaaagagacaaaattagtaaccattggatccaatactacagacgcatacctcacaggaaactcctcactgcactacaactcagggccaacgtttaccccacgagagaatttctagccaggggtagacaagaccaatacatcaaggcgtgtaggcactgcgatgcggacaacgaatcctgcgcccacatcatcggcaactgcccagtgacacaggacgcccgaatcaagaggcacaattacatctgcgaactgcttctcgaggaggcgaagaagaaggactgggtagtgttcaaggaaccgcacataagggattccaacaaggaactgtacaaacctgacctgatatttgtgaaggatgggcgtgcacttgtcgtggatgtgacagtacggtatgaagcagccaaatcatcgctggaggaagccgctgcagagaaagtgagaaagtacaaacacctggaaacggaagtaagacatctcacgaatgcaaaggacgttacttttgtgggctttcccctaggagcgcgggggaaatggcaccaagataactttaaacttttgactgagcttggcctctccaaatcgaggcaagtgaaaatggcagagactttttccacagtagcgctcttttcatctgtggacattgtacatatgtttgccagtagggccagaaaatctatggttatgtgataataggctgccttctgcggggcttgccttctggccatgcccttcttctctcccttgcacctgtacctcttggtctttgaataaagcctgagtaggaaggaccggtaaaaaaaaaaaaaaaaaaaaaaaaaaaaaaacgttgactaaaaaaaaaaaaaaaaaaaaaaaaaaaaaaaaaaaaaaaaaaaaaaaaaaaaaaaaaaaaaaaaaaaaaa

SEQ ID NO: 10734 - DNA, 5264 bp, synthetic construct
  source 1..5264: mol_type = other DNA
gaaataagagagaaaagaagagtaagaagaaatataagagaattcgccaccatggcccctaagaaaaagcggaaggtgaatatcagcggctctagctgcggcagccccaacagcgccgacaccagcagcgacttcaaggacctgtggaccaagctgaaggaatgccacgaccgggaagtgcagggactccaggtgaaggtcaccaaactcaagcaagaaagaatcctggacgcccagagactggaagaattcttcaccaagaaccagcagctgagagagcagcagaaagtgctgcacgagacaatcaaggttctggaagatagactgcgggccggcctgtgcgacagatgcgccgtgaccgaggaacacatgcgcaaaaagcagcaggagttcgagaacattagacagcaaaatctgaaattgatcacagagctgatgaacgagagaaacacactgcaggaggagaacaagaagctgagcgagcagctgcaacagaagatcgagaatgatcagcaacaccaggccgctgagctggaatgtgaagaggacgtgatccccgacagcccaatcacagctttcagcttttctggcgtgaacagactgaggcggaaggaaaacccccacgtgcggtacatcgagcagacccataccaagctggaacacagcgtgtgtgccaacgagatgagaaaggtgtccaagtcctccacccatccccagcacaaccctaacgaaaatgagatcctggtggctgatacctacgaccagtctcagagccctatggccaaggcccacggcaccagctcttatacccctgataagagctccttcaacctggccaccgtggtggccgagacactgggcctgggcgtgcaggaggaaagcgagacacagggcccaatgagccctctgggagatgagctgtaccactgcctggaaggcaaccacaagaaacagccttttgagtccggctccgagactcctggaacaagcgagagcgctacacctgagggcagccctaagagaaaggtgtccagcgccgagggcgctgccaaggaagagcctaaacggagaagcgccagactgagcgccaagccccccgccaaggtggaagccaagcctaagaaggccgccgctaaggacaagagcagcgataagaaagtccagaccaagggcaagcggggcgccaaaggcaaacaggccgaggtggccaaccaggagacaaaggaagatctgcctgctgagaacggcgaaaccaagaccgaggaatctccagcttctgacgaggccggagagaaggaggccaaaagcgacagcggctctgagacacctggaacaagcgagagcgccaccccggaatcctatgaacaacttgcaccacaaccgtgtgtgggagaaactttacattctagcctcccacgagacagtgaactgtttgtgcctgaagaggggagcagcgagaaggagagcgaggacgcgccaaaaacatctcctccgacgcctgggaaacatggtttggaacagactggggaggaaaaagtgatggtgactgttcctgacaaaaatccaccttgtccttgctgtggtacccgggtaaactctgtgttgaatctgattgaacatctgaaagtgtcacacgggaaaaggggggtttgttttcggtgtgcaaaatgtggaaaggaaaatagtaactatcacagtgttgtttgtcattttaagaaatgcaggggtccagagacggagaaagccccagctggggagtggatttgtgaggtatgcaacagagattttacaaccaaaattggcctgggacaacacaagagattggcacacccagcagtgagaaatcaggaaaggatcgttgcttcccaaccgaaagaaacatcaaatagaggtgctcacaaaaggtgctggacaaaggaggaggaagaattactaataagactggaggctcagttcgagggaaacaaaaatattaataagcttattgcagaacacataaccaccaaaacagctaagcagatcagtgacaaaaggcgattgctgtccagaaagccagcagaggagccacgtgaggagcctggaacgtgtcatcacaccaggagagcagctgcgagcctgagaacggagcctgagatgagtcatcacgcccaggcagaggacagagataatggacctgggagacgccctctgccaggcagggcagctgccggagggagaacaatggacgagataagacgccaccctgataagggcaacggacagcagagacccaccaagcaaaaatcagaagaacagctgcaggcttactataaaaagacactagaggaacgactttcagctggggcacttaacaccttcccccgagcattcaagcaggtaatggaaggccgggatataaagctagtaatcaatcagacagcgcaggactgcttcggatgcctggaatccataagccaaataagaacggcaacccgagataaaaaggacacggtgacccgggagaaacacccaaagaaaccttttcagaagtggatgaagaagagagcaatcaaaaaaggtaattatcttcggttccagcgtttattttatcttgatagagggaaactggctaaaatcattttagatgatattgaatgcttgtcttgtgacataccactcagtgaaatttattcggtttttaaaacaagatgggaaacaactggtagctttaaaagccttggggactttaaaacttacgggaaggctgacaacactgccttcagagaattaattacggctaaagaaattgagaaaaatgtgcaggaaatgagcaaaggctcggctcccggtccagacgggattactcttggggacgtcgtaaagatggatcccgagttttccttcaccatggagattttcaatttatggttaacaactggtaaaatcccggacatggtgagggggtgcagaaccgttttgattccaaaatcatcaaagccggatcgtttgaaagacattaataactggagacctatcacgatcggttccatcttgctgagactgttctccaggattgtaacagctaggctgagcaaagcgtgccccctgaacccaaggcaaagaggctttatcagagcggcgggatgctctgaaaacttaaaactcctgcaaactataatttggtcggccaaaagagaacacagaccactgggtgttgtattcgtggacatcgccaaggcttttgacaccgtaagccaccagcacatcattcatgctttgcagcaaagagaggtggatccccacatcgtcggtctggtgagcaatatgtacgagaacatcagtacgtatatcaccacaaagaggaacacacacacagacaaaatccagatccgggttggagtaaagcagggtgacccgatgtcgccccttttatttaacctggcaatggaccctctattatgcaagctggaagagagtggcaaaggataccaccgaggacagagcagcatcacagcgatggcatttgcagacgatctggttttgctgagcgactcctgggaaaatatgaatacaaatattagcatactggagaccttctgcaatctgaccggactcaaaacacaggggcaaaagtgccacggcttttacatcaagccgacaaaggactcttacaccatcaatgactgcgctgcctggactatcaacggcacacccctgaacatgatcgaccccggcgaatctgagaaatacctcggcctgcagtttgacccgtggattggaatagcaaggtccggtctctccacaaaactagatttttggcttcagcggatcgatcaagcaccacttaaacctctgcagaaaactgatattctcaaaacatacaccatccctcggctgatctacatagctgaccactcagaagtgaaaagcgcactactcgaaacccttgaccagaagatccggacagcggtcaaggaatggcttcacctacctccgtgcacctgcgatgccatcctgtactcgagcacgagagacggcggtttgggcatcaccaaattggcaggactgatccccagcgtgcaggcccgtagactgcatcggatcgcacagtcatctgacgatacgatgaaatgcttcatggaaaaagagaaaatggaacagctgcataagaaattgtggattcaagctggaggggacagagagaacataccctcgatttgggaagcaccaccgtcgagtgaaccaccaaacaacgtgagcacaaattcggaatgggaagcaccgacccagaaagataaatttccaaagccttgcaattggaggaaaaacgaattcaaaaaatggaccaaattggcatcccaaggccgcggaattgtaaattttgaaagagacaaaattagtaaccattggatccaatactacagacgcatacctcacaggaaactcctcactgcactacaactcagggccaacgtttaccccacgagagaatttctagccaggggtagacaagaccaatacatcaaggcgtgtaggcactgcgatgcggacaacgaatcctgcgcccacatcatcggcaactgcccagtgacacaggacgcccgaatcaagaggcacaattacatctgcgaactgcttctcgaggaggcgaagaagaaggactgggtagtgttcaaggaaccgcacataagggattccaacaaggaactgtacaaacctgacctgatatttgtgaaggatgggcgtgcacttgtcgtggatgtgacagtacggtatgaagcagccaaatcatcgctggaggaagccgctgcagagaaagtgagaaagtacaaacacctggaaacggaagtaagacatctcacgaatgcaaaggacgttacttttgtgggctttcccctaggagcgcgggggaaatggcaccaagataactttaaacttttgactgagcttggcctctccaaatcgaggcaagtgaaaatggcagagactttttccacagtagcgctcttttcatctgtggacattgtacatatgtttgccagtagggccagaaaatctatggttatgtgataataggctgccttctgcggggcttgccttctggccatgcccttcttctctcccttgcacctgtacctcttggtctttgaataaagcctgagtaggaaggaccggtaaaaaaaaaaaaaaaaaaaaaaaaaaaaaaacgttgactaaaaaaaaaaaaaaaaaaaaaaaaaaaaaaaaaaaaaaaaaaaaaaaaaaaaaaaaaaaaaaaaaaaaaa

SEQ ID NO: 10735 - DNA, 5264 bp, synthetic construct
  source 1..5264: mol_type = other DNA
gaaataagagagaaaagaagagtaagaagaaatataagagaattcgccaccatggcccctaagaaaaagcggaaggtgaatatcagcggctctagctgcggcagccccaacagcgccgacaccagcagcgacttcaaggacctgtggaccaagctgaaggaatgccacgaccgggaagtgcagggactccaggtgaaggtcaccaaactcaagcaagaaagaatcctggacgcccagagactggaagaattcttcaccaagaaccagcagctgagagagcagcagaaagtgctgcacgagacaatcaaggttctggaagatagactgcgggccggcctgtgcgacagatgcgccgtgaccgaggaacacatgcgcaaaaagcagcaggagttcgagaacattagacagcaaaatctgaaattgatcacagagctgatgaacgagagaaacacactgcaggaggagaacaagaagctgagcgagcagctgcaacagaagatcgagaatgatcagcaacaccaggccgctgagctggaatgtgaagaggacgtgatccccgacagcccaatcacagctttcagcttttctggcgtgaacagactgaggcggaaggaaaacccccacgtgcggtacatcgagcagacccataccaagctggaacacagcgtgtgtgccaacgagatgagaaaggtgtccaagtcctccacccatccccagcacaaccctaacgaaaatgagatcctggtggctgatacctacgaccagtctcagagccctatggccaaggcccacggcaccagctcttatacccctgataagagctccttcaacctggccaccgtggtggccgagacactgggcctgggcgtgcaggaggaaagcgagacacagggcccaatgagccctctgggagatgagctgtaccactgcctggaaggcaaccacaagaaacagccttttgagtccggctccgagactcctggaacaagcgagagcgctacacctgagggcagccctaagagaaaggtgtccagcgccgagggcgctgccaaggaagagcctaaacggagaagcgccagactgagcgccaagccccccgccaaggtggaagccaagcctaagaaggccgccgctaaggacaagagcagcgataagaaagtccagaccaagggcaagcggggcgccaaaggcaaacaggccgaggtggccaaccaggagacaaaggaagatctgcctgctgagaacggcgaaaccaagaccgaggaatctccagcttctgacgaggccggagagaaggaggccaaaagcgacagcggctctgagacacctggaacaagcgagagcgccaccccggaatcctatgaacaacttgcaccacaaccgtgtgtgggagaaactttacattctagcctcccacgagacagtgaactgtttgtgcctgaagaggggagcagcgagaaggagagcgaggacgcgccaaaaacatctcctccgacgcctgggaaacatggtttggaacagactggggaggaaaaagtgatggtgactgttcctgacaaaaatccaccttgtccttgctgtggtacccgggtaaactctgtgttgaatctgattgaacatctgaaagtgtcacacgggaaaaggggggtttgttttcggtgtgcaaaatgtggaaaggaaaatagtaactatcacagtgttgtttgtcattttaagaaatgcaggggtccagagacggagaaagccccagctggggagtggatttgtgaggtatgcaacagagattttacaaccaaaattggcctgggacaacacaagagattggcacacccagcagtgagaaatcaggaaaggatcgttgcttcccaaccgaaagaaacatcaaatagaggtgctcacaaaaggtgctggacaaaggaggaggaagaattactaataagactggaggctcagttcgagggaaacaaaaatattaataagcttattgcagaacacataaccaccaaaacagctaagcagatcagtgacaaaaggcgattgctgtccagaaagccagcagaggagccacgtgaggagcctggaacgtgtcatcacaccaggagagcagctgcgagcctgagaacggagcctgagaccagtcatcacgcccaggcagaggacagagataatggacctgggagacgccctctgccaggcagggcagctgccggagggagaacaatggacgagataagacgccaccctgataagggcaacggacagcagagacccaccaagcaaaaatcagaagaacagctgcaggcttactataaaaagacactagaggaacgactttcagctggggcacttaacaccttcccccgagcattcaagcaggtaatggaaggccgggatataaagctagtaatcaatcagacagcgcaggactgcttcggatgcctggaatccataagccaaataagaacggcaacccgagataaaaaggacacggtgacccgggagaaacacccaaagaaaccttttcagaagtggatgaagaagagagcaatcaaaaaaggtaattatcttcggttccagcgtttattttatcttgatagagggaaactggctaaaatcattttagatgatattgaatgcttgtcttgtgacataccactcagtgaaatttattcggtttttaaaacaagatgggaaacaactggtagctttaaaagccttggggactttaaaacttacgggaaggctgacaacactgccttcagagaattaattacggctaaagaaattgagaaaaatgtgcaggaaatgagcaaaggctcggctcccggtccagacgggattactcttggggacgtcgtaaagatggatcccgagttttcccggaccatggagattttcaatttatggttaacaactggtaaaatcccggacatggtgagggggtgcagaaccgttttgattccaaaatcatcaaagccggatcgtttgaaagacattaataactggagacctatcacgatcggttccatcttgctgagactgttctccaggattgtaacagctaggctgagcaaagcgtgccccctgaacccaaggcaaagaggctttatcagagcggcgggatgctctgaaaacttaaaactcctgcaaactataatttggtcggccaaaagagaacacagaccactgggtgttgtattcgtggacatcgccaaggcttttgacaccgtaagccaccagcacatcattcatgctttgcagcaaagagaggtggatccccacatcgtcggtctggtgagcaatatgtacgagaacatcagtacgtatatcaccacaaagaggaacacacacacagacaaaatccagatccgggttggagtaaagcagggtgacccgatgtcgccccttttatttaacctggcaatggaccctctattatgcaagctggaagagagtggcaaaggataccaccgaggacagagcagcatcacagcgatggcatttgcagacgatctggttttgctgagcgactcctgggaaaatatgaatacaaatattagcatactggagaccttctgcaatctgaccggactcaaaacacaggggcaaaagtgccacggcttttacatcaagccgacaaaggactcttacaccatcaatgactgcgctgcctggactatcaacggcacacccctgaacatgatcgaccccggcgaatctgagaaatacctcggcctgcagtttgacccgtggattggaatagcaaggtccggtctctccacaaaactagatttttggcttcagcggatcgatcaagcaccacttaaacctctgcagaaaactgatattctcaaaacatacaccatccctcggctgatctacatagctgaccactcagaagtgaaaagcgcactactcgaaacccttgaccagaagatccggacagcggtcaaggaatggcttcacctacctccgtgcacctgcgatgccatcctgtactcgagcacgagagacggcggtttgggcatcaccaaattggcaggactgatccccagcgtgcaggcccgtagactgcatcggatcgcacagtcatctgacgatacgatgaaatgcttcatggaaaaagagaaaatggaacagctgcataagaaattgtggattcaagctggaggggacagagagaacataccctcgatttgggaagcaccaccgtcgagtgaaccaccaaacaacgtgagcacaaattcggaatgggaagcaccgacccagaaagataaatttccaaagccttgcaattggaggaaaaacgaattcaaaaaatggaccaaattggcatcccaaggccgcggaattgtaaattttgaaagagacaaaattagtaaccattggatccaatactacagacgcatacctcacaggaaactcctcactgcactacaactcagggccaacgtttaccccacgagagaatttctagccaggggtagacaagaccaatacatcaaggcgtgtaggcactgcgatgcggacaacgaatcctgcgcccacatcatcggcaactgcccagtgacacaggacgcccgaatcaagaggcacaattacatctgcgaactgcttctcgaggaggcgaagaagaaggactgggtagtgttcaaggaaccgcacataagggattccaacaaggaactgtacaaacctgacctgatatttgtgaaggatgggcgtgcacttgtcgtggatgtgacagtacggtatgaagcagccaaatcatcgctggaggaagccgctgcagagaaagtgagaaagtacaaacacctggaaacggaagtaagacatctcacgaatgcaaaggacgttacttttgtgggctttcccctaggagcgcgggggaaatggcaccaagataactttaaacttttgactgagcttggcctctccaaatcgaggcaagtgaaaatggcagagactttttccacagtagcgctcttttcatctgtggacattgtacatatgtttgccagtagggccagaaaatctatggttatgtgataataggctgccttctgcggggcttgccttctggccatgcccttcttctctcccttgcacctgtacctcttggtctttgaataaagcctgagtaggaaggaccggtaaaaaaaaaaaaaaaaaaaaaaaaaaaaaaacgttgactaaaaaaaaaaaaaaaaaaaaaaaaaaaaaaaaaaaaaaaaaaaaaaaaaaaaaaaaaaaaaaaaaaaaaa

SEQ ID NO: 10736 - DNA, 5264 bp, synthetic construct
  source 1..5264: mol_type = other DNA
gaaataagagagaaaagaagagtaagaagaaatataagagaattcgccaccatggcccctaagaaaaagcggaaggtgaatatcagcggctctagctgcggcagccccaacagcgccgacaccagcagcgacttcaaggacctgtggaccaagctgaaggaatgccacgaccgggaagtgcagggactccaggtgaaggtcaccaaactcaagcaagaaagaatcctggacgcccagagactggaagaattcttcaccaagaaccagcagctgagagagcagcagaaagtgctgcacgagacaatcaaggttctggaagatagactgcgggccggcctgtgcgacagatgcgccgtgaccgaggaacacatgcgcaaaaagcagcaggagttcgagaacattagacagcaaaatctgaaattgatcacagagctgatgaacgagagaaacacactgcaggaggagaacaagaagctgagcgagcagctgcaacagaagatcgagaatgatcagcaacaccaggccgctgagctggaatgtgaagaggacgtgatccccgacagcccaatcacagctttcagcttttctggcgtgaacagactgaggcggaaggaaaacccccacgtgcggtacatcgagcagacccataccaagctggaacacagcgtgtgtgccaacgagatgagaaaggtgtccaagtcctccacccatccccagcacaaccctaacgaaaatgagatcctggtggctgatacctacgaccagtctcagagccctatggccaaggcccacggcaccagctcttatacccctgataagagctccttcaacctggccaccgtggtggccgagacactgggcctgggcgtgcaggaggaaagcgagacacagggcccaatgagccctctgggagatgagctgtaccactgcctggaaggcaaccacaagaaacagccttttgagtccggctccgagactcctggaacaagcgagagcgctacacctgagggcagccctaagagaaaggtgtccagcgccgagggcgctgccaaggaagagcctaaacggagaagcgccagactgagcgccaagccccccgccaaggtggaagccaagcctaagaaggccgccgctaaggacaagagcagcgataagaaagtccagaccaagggcaagcggggcgccaaaggcaaacaggccgaggtggccaaccaggagacaaaggaagatctgcctgctgagaacggcgaaaccaagaccgaggaatctccagcttctgacgaggccggagagaaggaggccaaaagcgacagcggctctgagacacctggaacaagcgagagcgccaccccggaatcctatgaacaacttgcaccacaaccgtgtgtgggagaaactttacattctagcctcccacgagacagtgaactgtttgtgcctgaagaggggagcagcgagaaggagagcgaggacgcgccaaaaacatctcctccgacgcctgggaaacatggtttggaacagactggggaggaaaaagtgatggtgactgttcctgacaaaaatccaccttgtccttgctgtggtacccgggtaaactctgtgttgaatctgattgaacatctgaaagtgtcacacgggaaaaggggggtttgttttcggtgtgcaaaatgtggaaaggaaaatagtaactatcacagtgttgtttgtcattttaagaaatgcaggggtccagagacggagaaagccccagctggggagtggatttgtgaggtatgcaacagagattttacaaccaaaattggcctgggacaacacaagagattggcacacccagcagtgagaaatcaggaaaggatcgttgcttcccaaccgaaagaaacatcaaatagaggtgctcacaaaaggtgctggacaaaggaggaggaagaattactaataagactggaggctcagttcgagggaaacaaaaatattaataagcttattgcagaacacataaccaccaaaacagctaagcagatcagtgacaaaaggcgattgctgtccagaaagccagcagaggagccacgtgaggagcctggaacgtgtcatcacaccaggagagcagctgcgagcctgagaacggagcctgagatgagtcatcacgcccaggcagaggacagagataatggacctgggagacgccctctgccaggcagggcagctgccggagggagaacaatggacgagataagacgccaccctgataagggcaacggacagcagagacccaccaagcaaaaatcagaagaacagctgcaggcttactataaaaagacactagaggaacgactttcagctggggcacttaacaccttcccccgagcattcaagcaggtaatggaaggccgggatataaagctagtaatcaatcagacagcgcaggactgcttcggatgcctggaatccataagccaaataagaacggcaacccgagataaaaaggacacggtgacccgggagaaacacccaaagaaaccttttcagaagtggatgaagaagagagcaatcaaaaaaggtaattatcttcggttccagcgtttattttatcttgatagagggaaactggctaaaatcattttagatgatattgaatgcttgtcttgtgacataccactcagtgaaatttattcggtttttaaaacaagatgggaaacaactggtagctttaaaagccttggggactttaaaacttacgggaaggctgacaacactgccttcagagaattaattacggctaaagaaattgagaaaaatgtgcaggaaatgagcaaaggctcggctcccggtccagacgggattactcttggggacgtcgtaaagatggatcccgagttttcccggaccatggagattttcaatttatggttaacaactggtaaaatcccggacatggtgagggggtgcagaaccgttttgattccaaaatcatcaaagccggatcgtttgaaagacattaataactggagacctatcacgatcggttccatcttgctgagactgttctccaggattgtaacagctaggctgagcaaagcgtgccccctgaacccaaggcaaagaggctttatcagagcggcgggatgctctgaaaacttaaaactcctgcaaactataatttggtcggccaaaagagaacacagaccactgggtgttgtattcgtggacatcgccaaggcttttgacaccgtaagccaccagcacatcattcatgctttgcagcaaagagaggtggatccccacatcgtcggtctggtgagcaatatgtacgagaacatcagtacgtatatcaccacaaagaggaacacacacacagacaaaatccagatccgggttggagtaaagcagggtgacccgatgtcgccccttttatttaacctggcaatggaccctctattatgcaagctggaagagagtggcaaaggataccaccgaggacagagcagcatcacagcgatggcatttgcagacgatctggttttgctgagcgactcctgggaaaatatgaatacaaatattagcatactggagaccttctgcaatctgaccggactcaaaacacaggggcaaaagtgccacggcttttacatcaagccgacaaaggactcttacaccatcaatgactgcgctgcctggactatcaacggcacacccctgaacatgatcgaccccggcgaatctgagaaatacctcggcctgcagtttgacccgtggattggaatagcaaggtccggtctctccacaaaactagatttttggcttcagcggatcgatcaagcaccacttaaacctctgcagaaaactgatattctcaaaacatacaccatccctcggctgatctacatagctgaccactcagaagtgaaaagcgcactactcgaaacccttgaccagaagatccggacagcggtcaaggaatggcttcacctacctccgtgcacctgcgatgccatcctgtactcgagcacgagagacggcggtttgggcatcaccaaattggcaggactgatccccagcgtgcaggcccgtagactgcatcggatcgcacagtcatctgacgatacgatgaaatgcttcatggaaaaagagaaaatggaacagctgcataagaaattgtggattcaagctggaggggacagagagaacataccctcgatttgggaagcaccaccgtcgagtgaaccaccaaacaacgtgagcacaaattcggaatgggaagcaccgacccagaaagataaatttccaaagccttgcaattggaggaaaaacgaattcaaaaaatggaccaaattggcatcccaaggccgcggaattgtaaattttgaaagagacaaaattagtaaccattggatccaatactacagacgcatacctcacaggaaactcctcactgcactacaactcagggccaacgtttaccccacgagagaatttctagccaggggtagacaagaccaatacatcaaggcgtgtaggcactgcgatgcggacaacgaatcctgcgcccacatcatcggcaactgcccagtgacacaggacgcccgaatcaagaggcacaattacatctgcgaactgcttctcgaggaggcgaagaagaaggactgggtagtgttcaaggaaccgcacataagggattccaacaaggaactgtacaaacctgacctgatatttgtgaaggatgggcgtgcacttgtcgtggatgtgacagtacggtatgaagcagccaaatcatcgctggaggaagccgctgcagagaaagtgagaaagtacaaacacctggaaacggaagtaagacatctcacgaatgcaaaggacgttacttttgtgggctttcccctaggagcgcgggggaaatggcaccaagataactttaaacttttgactgagcttggcctctccaaatcgaggcaagtgaaaatggcagagactttttccagagtagcgctcttttcatctgtggacattgtacatatgtttgccagtagggccagaaaatctatggttatgtgataataggctgccttctgcggggcttgccttctggccatgcccttcttctctcccttgcacctgtacctcttggtctttgaataaagcctgagtaggaaggaccggtaaaaaaaaaaaaaaaaaaaaaaaaaaaaaaacgttgactaaaaaaaaaaaaaaaaaaaaaaaaaaaaaaaaaaaaaaaaaaaaaaaaaaaaaaaaaaaaaaaaaaaaaa

SEQ ID NO: 10737 - DNA, 5264 bp, synthetic construct
  source 1..5264: mol_type = other DNA
gaaataagagagaaaagaagagtaagaagaaatataagagaattcgccaccatggcccctaagaaaaagcggaaggtgaatatcagcggctctagctgcggcagccccaacagcgccgacaccagcgacgacttcaaggacctgtggaccaagctgaaggaatgccacgaccgggaagtgcagggactccaggtgaaggtcaccaaactcaagcaagaaagaatcctggacgcccagagactggaagaattcttcaccaagaaccagcagctgagagagcagcagaaagtgctgcacgagacaatcaaggttctggaagatagactgcgggccggcctgtgcgacagatgcgccgtgaccgaggaacacatgcgcaaaaagcagcaggagttcgagaacattagacagcaaaatctgaaattgatcacagagctgatgaacgagagaaacacactgcaggaggagaacaagaagctgagcgagcagctgcaacagaagatcgagaatgatcagcaacaccaggccgctgagctggaatgtgaagaggacgtgatccccgacagcccaatcacagctttcagcttttctggcgtgaacagactgaggcggaaggaaaacccccacgtgcggtacatcgagcagacccataccaagctggaacacagcgtgtgtgccaacgagatgagaaaggtgtccaagtcctccacccatccccagcacaaccctaacgaaaatgagatcctggtggctgatacctacgaccagtctcagagccctatggccaaggcccacggcaccagctcttatacccctgataagagctccttcaacctggccaccgtggtggccgagacactgggcctgggcgtgcaggaggaaagcgagacacagggcccaatgagccctctgggagatgagctgtaccactgcctggaaggcaaccacaagaaacagccttttgagtccggctccgagactcctggaacaagcgagagcgctacacctgagggcagccctaagagaaaggtgtccagcgccgagggcgctgccaaggaagagcctaaacggagaagcgccagactgagcgccaagccccccgccaaggtggaagccaagcctaagaaggccgccgctaaggacaagagcagcgataagaaagtccagaccaagggcaagcggggcgccaaaggcaaacaggccgaggtggccaaccaggagacaaaggaagatctgcctgctgagaacggcgaaaccaagaccgaggaatctccagcttctgacgaggccggagagaaggaggccaaaagcgacagcggctctgagacacctggaacaagcgagagcgccaccccggaatcctatgaacaacttgcaccacaaccgtgtgtgggagaaactttacattctagcctcccacgagacagtgaactgtttgtgcctgaagaggggagcagcgagaaggagagcgaggacgcgccaaaaacatctcctccgacgcctgggaaacatggtttggaacagactggggaggaaaaagtgatggtgactgttcctgacaaaaatccaccttgtccttgctgtggtacccgggtaaactctgtgttgaatctgattgaacatctgaaagtgtcacacgggaaaaggggggtttgttttcggtgtgcaaaatgtggaaaggaaaatagtaactatcacagtgttgtttgtcattttaagaaatgcaggggtccagagacggagaaagccccagctggggagtggatttgtgaggtatgcaacagagattttacaaccaaaattggcctgggacaacacaagagattggcacacccagcagtgagaaatcaggaaaggatcgttgcttcccaaccgaaagaaacatcaaatagaggtgctcacaaaaggtgctggacaaaggaggaggaagaattactaataagactggaggctcagttcgagggaaacaaaaatattaataagcttattgcagaacacataaccaccaaaacagctaagcagatcagtgacaaaaggcgattgctgtccagaaagccagcagaggagccacgtgaggagcctggaacgtgtcatcacaccaggagagcagctgcgagcctgagaacggagcctgagatgagtcatcacgcccaggcagaggacagagataatggacctgggagacgccctctgccaggcagggcagctgccggagggagaacaatggacgagataagacgccaccctgataagggcaacggacagcagagacccaccaagcaaaaatcagaagaacagctgcaggcttactataaaaagacactagaggaacgactttcagctggggcacttaacaccttcccccgagcattcaagcaggtaatggaaggccgggatataaagctagtaatcaatcagacagcgcaggactgcttcggatgcctggaatccataagccaaataagaacggcaacccgagataaaaaggacacggtgacccgggagaaacacccaaagaaaccttttcagaagtggatgaagaagagagcaatcaaaaaaggtaattatcttcggttccagcgtttattttatcttgatagagggaaactggctaaaatcattttagatgatattgaatgcttgtcttgtgacataccactcagtgaaatttattcggtttttaaaacaagatgggaaacaactggtagctttaaaagccttggggactttaaaacttacgggaaggctgacaacactgccttcagagaattaattacggctaaagaaattgagaaaaatgtgcaggaaatgagcaaaggctcggctcccggtccagacgggattactcttggggacgtcgtaaagatggatcccgagttttcccggaccatggagattttcaatttatggttaacaactggtaaaatcccggacatggtgagggggtgcagaaccgttttgattccaaaatcatcaaagccggatcgtttgaaagacattaataactggagacctatcacgatcggttccatcttgctgagactgttctccaggattgtaacagctaggctgagcaaagcgtgccccctgaacccaaggcaaagaggctttatcagagcggcgggatgctctgaaaacttaaaactcctgcaaactataatttggtcggccaaaagagaacacagaccactgggtgttgtattcgtggacatcgccaaggcttttgacaccgtaagccaccagcacatcattcatgctttgcagcaaagagaggtggatccccacatcgtcggtctggtgagcaatatgtacgagaacatcagtacgtatatcaccacaaagaggaacacacacacagacaaaatccagatccgggttggagtaaagcagggtgacccgatgtcgccccttttatttaacctggcaatggaccctctattatgcaagctggaagagagtggcaaaggataccaccgaggacagagcagcatcacagcgatggcatttgcagacgatctggttttgctgagcgactcctgggaaaatatgaatacaaatattagcatactggagaccttctgcaatctgaccggactcaaaacacaggggcaaaagtgccacggcttttacatcaagccgacaaaggactcttacaccatcaatgactgcgctgcctggactatcaacggcacacccctgaacatgatcgaccccggcgaatctgagaaatacctcggcctgcagtttgacccgtggattggaatagcaaggtccggtctctccacaaaactagatttttggcttcagcggatcgatcaagcaccacttaaacctctgcagaaaactgatattctcaaaacatacaccatccctcggctgatctacatagctgaccactcagaagtgaaaagcgcactactcgaaacccttgaccagaagatccggacagcggtcaaggaatggcttcacctacctccgtgcacctgcgatgccatcctgtactcgagcacgagagacggcggtttgggcatcaccaaattggcaggactgatccccagcgtgcaggcccgtagactgcatcggatcgcacagtcatctgacgatacgatgaaatgcttcatggaaaaagagaaaatggaacagctgcataagaaattgtggattcaagctggaggggacagagagaacataccctcgatttgggaagcaccaccgtcgagtgaaccaccaaacaacgtgagcacaaattcggaatgggaagcaccgacccagaaagataaatttccaaagccttgcaattggaggaaaaacgaattcaaaaaatggaccaaattggcatcccaaggccgcggaattgtaaattttgaaagagacaaaattagtaaccattggatccaatactacagacgcatacctcacaggaaactcctcactgcactacaactcagggccaacgtttaccccacgagagaatttctagccaggggtagacaagaccaatacatcaaggcgtgtaggcactgcgatgcggacaacgaatcctgcgcccacatcatcggcaactgcccagtgacacaggacgcccgaatcaagaggcacaattacatctgcgaactgcttctcgaggaggcgaagaagaaggactgggtagtgttcaaggaaccgcacataagggattccaacaaggaactgtacaaacctgacctgatatttgtgaaggatgggcgtgcacttgtcgtggatgtgacagtacggtatgaagcagccaaatcatcgctggaggaagccgctgcagagaaagtgagaaagtacaaacacctggaaacggaagtaagacatctcacgaatgcaaaggacgttacttttgtgggctttcccctaggagcgcgggggaaatggcaccaagataactttaaacttttgactgagcttggcctctccaaatcgaggcaagtgaaaatggcagagactttttccacagtagcgctcttttcatctgtggacattgtacatatgtttgccagtagggccagaaaatctatggttatgtgataataggctgccttctgcggggcttgccttctggccatgcccttcttctctcccttgcacctgtacctcttggtctttgaataaagcctgagtaggaaggaccggtaaaaaaaaaaaaaaaaaaaaaaaaaaaaaaacgttgactaaaaaaaaaaaaaaaaaaaaaaaaaaaaaaaaaaaaaaaaaaaaaaaaaaaaaaaaaaaaaaaaaaaaaa

SEQ ID NO: 10738 - DNA, 5264 bp, synthetic construct
  source 1..5264: mol_type = other DNA
gaaataagagagaaaagaagagtaagaagaaatataagagaattcgccaccatggcccctaagaaaaagcggaaggtgaatatcagcggctctagctgcggcagccccaacagcgccgacaccagcagctgcttcaaggacctgtggaccaagctgaaggaatgccacgaccgggaagtgcagggactccaggtgaaggtcaccaaactcaagcaagaaagaatcctggacgcccagagactggaagaattcttcaccaagaaccagcagctgagagagcagcagaaagtgctgcacgagacaatcaaggttctggaagatagactgcgggccggcctgtgcgacagatgcgccgtgaccgaggaacacatgcgcaaaaagcagcaggagttcgagaacattagacagcaaaatctgaaattgatcacagagctgatgaacgagagaaacacactgcaggaggagaacaagaagctgagcgagcagctgcaacagaagatcgagaatgatcagcaacaccaggccgctgagctggaatgtgaagaggacgtgatccccgacagcccaatcacagctttcagcttttctggcgtgaacagactgaggcggaaggaaaacccccacgtgcggtacatcgagcagacccataccaagctggaacacagcgtgtgtgccaacgagatgagaaaggtgtccaagtcctccacccatccccagcacaaccctaacgaaaatgagatcctggtggctgatacctacgaccagtctcagagccctatggccaaggcccacggcaccagctcttatacccctgataagagctccttcaacctggccaccgtggtggccgagacactgggcctgggcgtgcaggaggaaagcgagacacagggcccaatgagccctctgggagatgagctgtaccactgcctggaaggcaaccacaagaaacagccttttgagtccggctccgagactcctggaacaagcgagagcgctacacctgagggcagccctaagagaaaggtgtccagcgccgagggcgctgccaaggaagagcctaaacggagaagcgccagactgagcgccaagccccccgccaaggtggaagccaagcctaagaaggccgccgctaaggacaagagcagcgataagaaagtccagaccaagggcaagcggggcgccaaaggcaaacaggccgaggtggccaaccaggagacaaaggaagatctgcctgctgagaacggcgaaaccaagaccgaggaatctccagcttctgacgaggccggagagaaggaggccaaaagcgacagcggctctgagacacctggaacaagcgagagcgccaccccggaatcctatgaacaacttgcaccacaaccgtgtgtgggagaaactttacattctagcctcccacgagacagtgaactgtttgtgcctgaagaggggagcagcgagaaggagagcgaggacgcgccaaaaacatctcctccgacgcctgggaaacatggtttggaacagactggggaggaaaaagtgatggtgactgttcctgacaaaaatccaccttgtccttgctgtggtacccgggtaaactctgtgttgaatctgattgaacatctgaaagtgtcacacgggaaaaggggggtttgttttcggtgtgcaaaatgtggaaaggaaaatagtaactatcacagtgttgtttgtcattttaagaaatgcaggggtccagagacggagaaagccccagctggggagtggatttgtgaggtatgcaacagagattttacaaccaaaattggcctgggacaacacaagagattggcacacccagcagtgagaaatcaggaaaggatcgttgcttcccaaccgaaagaaacatcaaatagaggtgctcacaaaaggtgctggacaaaggaggaggaagaattactaataagactggaggctcagttcgagggaaacaaaaatattaataagcttattgcagaacacataaccaccaaaacagctaagcagatcagtgacaaaaggcgattgctgtccagaaagccagcagaggagccacgtgaggagcctggaacgtgtcatcacaccaggagagcagctgcgagcctgagaacggagcctgagatgagtcatcacgcccaggcagaggacagagataatggacctgggagacgccctctgccaggcagggcagctgccggagggagaacaatggacgagataagacgccaccctgataagggcaacggacagcagagacccaccaagcaaaaatcagaagaacagctgcaggcttactataaaaagacactagaggaacgactttcagctggggcacttaacaccttcccccgagcattcaagcaggtaatggaaggccgggatataaagctagtaatcaatcagacagcgcaggactgcttcggatgcctggaatccataagccaaataagaacggcaacccgagataaaaaggacacggtgacccgggagaaacacccaaagaaaccttttcagaagtggatgaagaagagagcaatcaaaaaaggtaattatcttcggttccagcgtttattttatcttgatagagggaaactggctaaaatcattttagatgatattgaatgcttgtcttgtgacataccactcagtgaaatttattcggtttttaaaacaagatgggaaacaactggtagctttaaaagccttggggactttaaaacttacgggaaggctgacaacactgccttcagagaattaattacggctaaagaaattgagaaaaatgtgcaggaaatgagcaaaggctcggctcccggtccagacgggattactcttggggacgtcgtaaagatggatcccgagttttcccggaccatggagattttcaatttatggttaacaactggtaaaatcccggacatggtgagggggtgcagaaccgttttgattccaaaatcatcaaagccggatcgtttgaaagacattaataactggagacctatcacgatcggttccatcttgctgagactgttctccaggattgtaacagctaggctgagcaaagcgtgccccctgaacccaaggcaaagaggctttatcagagcggcgggatgctctgaaaacttaaaactcctgcaaactataatttggtcggccaaaagagaacacagaccactgggtgttgtattcgtggacatcgccaaggcttttgacaccgtaagccaccagcacatcattcatgctttgcagcaaagagaggtggatccccacatcgtcggtctggtgagcaatatgtacgagaacatcagtacgtatatcaccacaaagaggaacacacacacagacaaaatccagatccgggttggagtaaagcagggtgacccgatgtcgccccttttatttaacctggcaatggaccctctattatgcaagctggaagagagtggcaaaggataccaccgaggacagagcagcatcacagcgatggcatttgcagacgatctggttttgctgagcgactcctgggaaaatatgaatacaaatattagcatactggagaccttctgcaatctgaccggactcaaaacacaggggcaaaagtgccacggcttttacatcaagccgacaaaggactcttacaccatcaatgactgcgctgcctggactatcaacggcacacccctgaacatgatcgaccccggcgaatctgagaaatacctcggcctgcagtttgacccgtggattggaatagcaaggtccggtctctccacaaaactagatttttggcttcagcggatcgatcaagcaccacttaaacctctgcagaaaactgatattctcaaaacatacaccatccctcggctgatctacatagctgaccactcagaagtgaaaagcgcactactcgaaacccttgaccagaagatccggacagcggtcaaggaatggcttcacctacctccgtgcacctgcgatgccatcctgtactcgagcacgagagacggcggtttgggcatcaccaaattggcaggactgatccccagcgtgcaggcccgtagactgcatcggatcgcacagtcatctgacgatacgatgaaatgcttcatggaaaaagagaaaatggaacagctgcataagaaattgtggattcaagctggaggggacagagagaacataccctcgatttgggaagcaccaccgtcgagtgaaccaccaaacaacgtgagcacaaattcggaatgggaagcaccgacccagaaagataaatttccaaagccttgcaattggaggaaaaacgaattcaaaaaatggaccaaattggcatcccaaggccgcggaattgtaaattttgaaagagacaaaattagtaaccattggatccaatactacagacgcatacctcacaggaaactcctcactgcactacaactcagggccaacgtttaccccacgagagaatttctagccaggggtagacaagaccaatacatcaaggcgtgtaggcactgcgatgcggacaacgaatcctgcgcccacatcatcggcaactgcccagtgacacaggacgcccgaatcaagaggcacaattacatctgcgaactgcttctcgaggaggcgaagaagaaggactgggtagtgttcaaggaaccgcacataagggattccaacaaggaactgtacaaacctgacctgatatttgtgaaggatgggcgtgcacttgtcgtggatgtgacagtacggtatgaagcagccaaatcatcgctggaggaagccgctgcagagaaagtgagaaagtacaaacacctggaaacggaagtaagacatctcacgaatgcaaaggacgttacttttgtgggctttcccctaggagcgcgggggaaatggcaccaagataactttaaacttttgactgagcttggcctctccaaatcgaggcaagtgaaaatggcagagactttttccacagtagcgctcttttcatctgtggacattgtacatatgtttgccagtagggccagaaaatctatggttatgtgataataggctgccttctgcggggcttgccttctggccatgcccttcttctctcccttgcacctgtacctcttggtctttgaataaagcctgagtaggaaggaccggtaaaaaaaaaaaaaaaaaaaaaaaaaaaaaaacgttgactaaaaaaaaaaaaaaaaaaaaaaaaaaaaaaaaaaaaaaaaaaaaaaaaaaaaaaaaaaaaaaaaaaaaaa

SEQ ID NO: 10739 - DNA, 5264 bp, synthetic construct
  source 1..5264: mol_type = other DNA
gaaataagagagaaaagaagagtaagaagaaatataagagaattcgccaccatggcccctaagaaaaagcggaaggtgaatatcagcggctctagctgcggcagccccaacagcgccgacaccagcagcgacttcaaggacctgtggaccaagctgaaggaatgccacgaccgggaagtgcagggactccaggtgaaggtcaccaaactcaagacagaaagaatcctggacgcccagagactggaagaattcttcaccaagaaccagcagctgagagagcagcagaaagtgctgcacgagacaatcaaggttctggaagatagactgcgggccggcctgtgcgacagatgcgccgtgaccgaggaacacatgcgcaaaaagcagcaggagttcgagaacattagacagcaaaatctgaaattgatcacagagctgatgaacgagagaaacacactgcaggaggagaacaagaagctgagcgagcagctgcaacagaagatcgagaatgatcagcaacaccaggccgctgagctggaatgtgaagaggacgtgatccccgacagcccaatcacagctttcagcttttctggcgtgaacagactgaggcggaaggaaaacccccacgtgcggtacatcgagcagacccataccaagctggaacacagcgtgtgtgccaacgagatgagaaaggtgtccaagtcctccacccatccccagcacaaccctaacgaaaatgagatcctggtggctgatacctacgaccagtctcagagccctatggccaaggcccacggcaccagctcttatacccctgataagagctccttcaacctggccaccgtggtggccgagacactgggcctgggcgtgcaggaggaaagcgagacacagggcccaatgagccctctgggagatgagctgtaccactgcctggaaggcaaccacaagaaacagccttttgagtccggctccgagactcctggaacaagcgagagcgctacacctgagggcagccctaagagaaaggtgtccagcgccgagggcgctgccaaggaagagcctaaacggagaagcgccagactgagcgccaagccccccgccaaggtggaagccaagcctaagaaggccgccgctaaggacaagagcagcgataagaaagtccagaccaagggcaagcggggcgccaaaggcaaacaggccgaggtggccaaccaggagacaaaggaagatctgcctgctgagaacggcgaaaccaagaccgaggaatctccagcttctgacgaggccggagagaaggaggccaaaagcgacagcggctctgagacacctggaacaagcgagagcgccaccccggaatcctatgaacaacttgcaccacaaccgtgtgtgggagaaactttacattctagcctcccacgagacagtgaactgtttgtgcctgaagaggggagcagcgagaaggagagcgaggacgcgccaaaaacatctcctccgacgcctgggaaacatggtttggaacagactggggaggaaaaagtgatggtgactgttcctgacaaaaatccaccttgtccttgctgtggtacccgggtaaactctgtgttgaatctgattgaacatctgaaagtgtcacacgggaaaaggggggtttgttttcggtgtgcaaaatgtggaaaggaaaatagtaactatcacagtgttgtttgtcattttaagaaatgcaggggtccagagacggagaaagccccagctggggagtggatttgtgaggtatgcaacagagattttacaaccaaaattggcctgggacaacacaagagattggcacacccagcagtgagaaatcaggaaaggatcgttgcttcccaaccgaaagaaacatcaaatagaggtgctcacaaaaggtgctggacaaaggaggaggaagaattactaataagactggaggctcagttcgagggaaacaaaaatattaataagcttattgcagaacacataaccaccaaaacagctaagcagatcagtgacaaaaggcgattgctgtccagaaagccagcagaggagccacgtgaggagcctggaacgtgtcatcacaccaggagagcagctgcgagcctgagaacggagcctgagatgagtcatcacgcccaggcagaggacagagataatggacctgggagacgccctctgccaggcagggcagctgccggagggagaacaatggacgagataagacgccaccctgataagggcaacggacagcagagacccaccaagcaaaaatcagaagaacagctgcaggcttactataaaaagacactagaggaacgactttcagctggggcacttaacaccttcccccgagcattcaagcaggtaatggaaggccgggatataaagctagtaatcaatcagacagcgcaggactgcttcggatgcctggaatccataagccaaataagaacggcaacccgagataaaaaggacacggtgacccgggagaaacacccaaagaaaccttttcagaagtggatgaagaagagagcaatcaaaaaaggtaattatcttcggttccagcgtttattttatcttgatagagggaaactggctaaaatcattttagatgatattgaatgcttgtcttgtgacataccactcagtgaaatttattcggtttttaaaacaagatgggaaacaactggtagctttaaaagccttggggactttaaaacttacgggaaggctgacaacactgccttcagagaattaattacggctaaagaaattgagaaaaatgtgcaggaaatgagcaaaggctcggctcccggtccagacgggattactcttggggacgtcgtaaagatggatcccgagttttcccggaccatggagattttcaatttatggttaacaactggtaaaatcccggacatggtgagggggtgcagaaccgttttgattccaaaatcatcaaagccggatcgtttgaaagacattaataactggagacctatcacgatcggttccatcttgctgagactgttctccaggattgtaacagctaggctgagcaaagcgtgccccctgaacccaaggcaaagaggctttatcagagcggcgggatgctctgaaaacttaaaactcctgcaaactataatttggtcggccaaaagagaacacagaccactgggtgttgtattcgtggacatcgccaaggcttttgacaccgtaagccaccagcacatcattcatgctttgcagcaaagagaggtggatccccacatcgtcggtctggtgagcaatatgtacgagaacatcagtacgtatatcaccacaaagaggaacacacacacagacaaaatccagatccgggttggagtaaagcagggtgacccgatgtcgccccttttatttaacctggcaatggaccctctattatgcaagctggaagagagtggcaaaggataccaccgaggacagagcagcatcacagcgatggcatttgcagacgatctggttttgctgagcgactcctgggaaaatatgaatacaaatattagcatactggagaccttctgcaatctgaccggactcaaaacacaggggcaaaagtgccacggcttttacatcaagccgacaaaggactcttacaccatcaatgactgcgctgcctggactatcaacggcacacccctgaacatgatcgaccccggcgaatctgagaaatacctcggcctgcagtttgacccgtggattggaatagcaaggtccggtctctccacaaaactagatttttggcttcagcggatcgatcaagcaccacttaaacctctgcagaaaactgatattctcaaaacatacaccatccctcggctgatctacatagctgaccactcagaagtgaaaagcgcactactcgaaacccttgaccagaagatccggacagcggtcaaggaatggcttcacctacctccgtgcacctgcgatgccatcctgtactcgagcacgagagacggcggtttgggcatcaccaaattggcaggactgatccccagcgtgcaggcccgtagactgcatcggatcgcacagtcatctgacgatacgatgaaatgcttcatggaaaaagagaaaatggaacagctgcataagaaattgtggattcaagctggaggggacagagagaacataccctcgatttgggaagcaccaccgtcgagtgaaccaccaaacaacgtgagcacaaattcggaatgggaagcaccgacccagaaagataaatttccaaagccttgcaattggaggaaaaacgaattcaaaaaatggaccaaattggcatcccaaggccgcggaattgtaaattttgaaagagacaaaattagtaaccattggatccaatactacagacgcatacctcacaggaaactcctcactgcactacaactcagggccaacgtttaccccacgagagaatttctagccaggggtagacaagaccaatacatcaaggcgtgtaggcactgcgatgcggacaacgaatcctgcgcccacatcatcggcaactgcccagtgacacaggacgcccgaatcaagaggcacaattacatctgcgaactgcttctcgaggaggcgaagaagaaggactgggtagtgttcaaggaaccgcacataagggattccaacaaggaactgtacaaacctgacctgatatttgtgaaggatgggcgtgcacttgtcgtggatgtgacagtacggtatgaagcagccaaatcatcgctggaggaagccgctgcagagaaagtgagaaagtacaaacacctggaaacggaagtaagacatctcacgaatgcaaaggacgttacttttgtgggctttcccctaggagcgcgggggaaatggcaccaagataactttaaacttttgactgagcttggcctctccaaatcgaggcaagtgaaaatggcagagactttttccacagtagcgctcttttcatctgtggacattgtacatatgtttgccagtagggccagaaaatctatggttatgtgataataggctgccttctgcggggcttgccttctggccatgcccttcttctctcccttgcacctgtacctcttggtctttgaataaagcctgagtaggaaggaccggtaaaaaaaaaaaaaaaaaaaaaaaaaaaaaaacgttgactaaaaaaaaaaaaaaaaaaaaaaaaaaaaaaaaaaaaaaaaaaaaaaaaaaaaaaaaaaaaaaaaaaaaaa

SEQ ID NO: 10740 - DNA, 5264 bp, synthetic construct
  source 1..5264: mol_type = other DNA
gaaataagagagaaaagaagagtaagaagaaatataagagaattcgccaccatggcccctaagaaaaagcggaaggtgaatatcagcggctctagctgcggcagccccaacagcgccgacaccagcagcgacttcaaggacctgtggaccaagctgaaggaatgccacgaccgggaagtgcagggactccaggtgaaggtcaccaaactcaagcaagaaagaatcctggacgcccagagactggaagaattcttcaccaagaaccagcagctgagagagcagcagaaagtgctgcacgagacaatcaaggttctggaagatagactgcgggccggcctgtgcgacagatgcgccgtgaccgaggaacacatgcgcaaaaagcagcaggagttcgagaacattagacagcaaaatctgaaattgatcacagagctgatgaacgagagaaacacactgcaggaggagaacaagaagctgagcgagcagctgcaacagaagatcgagaatgatcagcaacaccaggccgctgagctggaatgtgaagaggacgtgatccccgacagcccaatcacagctttcagcttttctggcgtgaacagactgaggcggaaggaaaacccccacgtgcggtacatcgagcagacccataccaagctggaacacagcgtgagtgccaacgagatgagaaaggtgtccaagtcctccacccatccccagcacaaccctaacgaaaatgagatcctggtggctgatacctacgaccagtctcagagccctatggccaaggcccacggcaccagctcttatacccctgataagagctccttcaacctggccaccgtggtggccgagacactgggcctgggcgtgcaggaggaaagcgagacacagggcccaatgagccctctgggagatgagctgtaccactgcctggaaggcaaccacaagaaacagccttttgagtccggctccgagactcctggaacaagcgagagcgctacacctgagggcagccctaagagaaaggtgtccagcgccgagggcgctgccaaggaagagcctaaacggagaagcgccagactgagcgccaagccccccgccaaggtggaagccaagcctaagaaggccgccgctaaggacaagagcagcgataagaaagtccagaccaagggcaagcggggcgccaaaggcaaacaggccgaggtggccaaccaggagacaaaggaagatctgcctgctgagaacggcgaaaccaagaccgaggaatctccagcttctgacgaggccggagagaaggaggccaaaagcgacagcggctctgagacacctggaacaagcgagagcgccaccccggaatcctatgaacaacttgcaccacaaccgtgtgtgggagaaactttacattctagcctcccacgagacagtgaactgtttgtgcctgaagaggggagcagcgagaaggagagcgaggacgcgccaaaaacatctcctccgacgcctgggaaacatggtttggaacagactggggaggaaaaagtgatggtgactgttcctgacaaaaatccaccttgtccttgctgtggtacccgggtaaactctgtgttgaatctgattgaacatctgaaagtgtcacacgggaaaaggggggtttgttttcggtgtgcaaaatgtggaaaggaaaatagtaactatcacagtgttgtttgtcattttaagaaatgcaggggtccagagacggagaaagccccagctggggagtggatttgtgaggtatgcaacagagattttacaaccaaaattggcctgggacaacacaagagattggcacacccagcagtgagaaatcaggaaaggatcgttgcttcccaaccgaaagaaacatcaaatagaggtgctcacaaaaggtgctggacaaaggaggaggaagaattactaataagactggaggctcagttcgagggaaacaaaaatattaataagcttattgcagaacacataaccaccaaaacagctaagcagatcagtgacaaaaggcgattgctgtccagaaagccagcagaggagccacgtgaggagcctggaacgtgtcatcacaccaggagagcagctgcgagcctgagaacggagcctgagatgagtcatcacgcccaggcagaggacagagataatggacctgggagacgccctctgccaggcagggcagctgccggagggagaacaatggacgagataagacgccaccctgataagggcaacggacagcagagacccaccaagcaaaaatcagaagaacagctgcaggcttactataaaaagacactagaggaacgactttcagctggggcacttaacaccttcccccgagcattcaagcaggtaatggaaggccgggatataaagctagtaatcaatcagacagcgcaggactgcttcggatgcctggaatccataagccaaataagaacggcaacccgagataaaaaggacacggtgacccgggagaaacacccaaagaaaccttttcagaagtggatgaagaagagagcaatcaaaaaaggtaattatcttcggttccagcgtttattttatcttgatagagggaaactggctaaaatcattttagatgatattgaatgcttgtcttgtgacataccactcagtgaaatttattcggtttttaaaacaagatgggaaacaactggtagctttaaaagccttggggactttaaaacttacgggaaggctgacaacactgccttcagagaattaattacggctaaagaaattgagaaaaatgtgcaggaaatgagcaaaggctcggctcccggtccagacgggattactcttggggacgtcgtaaagatggatcccgagttttcccggaccatggagattttcaatttatggttaacaactggtaaaatcccggacatggtgagggggtgcagaaccgttttgattccaaaatcatcaaagccggatcgtttgaaagacattaataactggagacctatcacgatcggttccatcttgctgagactgttctccaggattgtaacagctaggctgagcaaagcgtgccccctgaacccaaggcaaagaggctttatcagagcggcgggatgctctgaaaacttaaaactcctgcaaactataatttggtcggccaaaagagaacacagaccactgggtgttgtattcgtggacatcgccaaggcttttgacaccgtaagccaccagcacatcattcatgctttgcagcaaagagaggtggatccccacatcgtcggtctggtgagcaatatgtacgagaacatcagtacgtatatcaccacaaagaggaacacacacacagacaaaatccagatccgggttggagtaaagcagggtgacccgatgtcgccccttttatttaacctggcaatggaccctctattatgcaagctggaagagagtggcaaaggataccaccgaggacagagcagcatcacagcgatggcatttgcagacgatctggttttgctgagcgactcctgggaaaatatgaatacaaatattagcatactggagaccttctgcaatctgaccggactcaaaacacaggggcaaaagtgccacggcttttacatcaagccgacaaaggactcttacaccatcaatgactgcgctgcctggactatcaacggcacacccctgaacatgatcgaccccggcgaatctgagaaatacctcggcctgcagtttgacccgtggattggaatagcaaggtccggtctctccacaaaactagatttttggcttcagcggatcgatcaagcaccacttaaacctctgcagaaaactgatattctcaaaacatacaccatccctcggctgatctacatagctgaccactcagaagtgaaaagcgcactactcgaaacccttgaccagaagatccggacagcggtcaaggaatggcttcacctacctccgtgcacctgcgatgccatcctgtactcgagcacgagagacggcggtttgggcatcaccaaattggcaggactgatccccagcgtgcaggcccgtagactgcatcggatcgcacagtcatctgacgatacgatgaaatgcttcatggaaaaagagaaaatggaacagctgcataagaaattgtggattcaagctggaggggacagagagaacataccctcgatttgggaagcaccaccgtcgagtgaaccaccaaacaacgtgagcacaaattcggaatgggaagcaccgacccagaaagataaatttccaaagccttgcaattggaggaaaaacgaattcaaaaaatggaccaaattggcatcccaaggccgcggaattgtaaattttgaaagagacaaaattagtaaccattggatccaatactacagacgcatacctcacaggaaactcctcactgcactacaactcagggccaacgtttaccccacgagagaatttctagccaggggtagacaagaccaatacatcaaggcgtgtaggcactgcgatgcggacaacgaatcctgcgcccacatcatcggcaactgcccagtgacacaggacgcccgaatcaagaggcacaattacatctgcgaactgcttctcgaggaggcgaagaagaaggactgggtagtgttcaaggaaccgcacataagggattccaacaaggaactgtacaaacctgacctgatatttgtgaaggatgggcgtgcacttgtcgtggatgtgacagtacggtatgaagcagccaaatcatcgctggaggaagccgctgcagagaaagtgagaaagtacaaacacctggaaacggaagtaagacatctcacgaatgcaaaggacgttacttttgtgggctttcccctaggagcgcgggggaaatggcaccaagataactttaaacttttgactgagcttggcctctccaaatcgaggcaagtgaaaatggcagagactttttccacagtagcgctcttttcatctgtggacattgtacatatgtttgccagtagggccagaaaatctatggttatgtgataataggctgccttctgcggggcttgccttctggccatgcccttcttctctcccttgcacctgtacctcttggtctttgaataaagcctgagtaggaaggaccggtaaaaaaaaaaaaaaaaaaaaaaaaaaaaaaacgttgactaaaaaaaaaaaaaaaaaaaaaaaaaaaaaaaaaaaaaaaaaaaaaaaaaaaaaaaaaaaaaaaaaaaaaa

SEQ ID NO: 10741 - DNA, 5264 bp, synthetic construct
  source 1..5264: mol_type = other DNA
gaaataagagagaaaagaagagtaagaagaaatataagagaattcgccaccatggcccctaagaaaaagcggaaggtgaatatcagcggctctagctgcggcagccccaacagcgccgacaccagcagcgacttcaaggacctgtggaccaagctgaaggaatgccacgaccgggaagtgcagggactccaggtgaaggtcaccaaactcaagcaagaaagaatcctggacgcccagagactggaagaattcttcaccaagaaccagcagctgagagagcagcagaaagtgctgcacgagacaatcaaggttctggaagatagactgcgggccggcctgtgcgacagatgcgccgtgaccgaggaacacatgcgcaaaaagcagcaggagttcgagaacattagacagcaaaatctgaaattgatcacagagctgatgaacgagagaaacacactgcaggaggagaacaagaagctgagcgagcagctgcaacagaagatcgagaatgatcagcaacaccaggccgctgagctggaatgttcagaggacgtgatccccgacagcccaatcacagctttcagcttttctggcgtgaacagactgaggcggaaggaaaacccccacgtgcggtacatcgagcagacccataccaagctggaacacagcgtgtgtgccaacgagatgagaaaggtgtccaagtcctccacccatccccagcacaaccctaacgaaaatgagatcctggtggctgatacctacgaccagtctcagagccctatggccaaggcccacggcaccagctcttatacccctgataagagctccttcaacctggccaccgtggtggccgagacactgggcctgggcgtgcaggaggaaagcgagacacagggcccaatgagccctctgggagatgagctgtaccactgcctggaaggcaaccacaagaaacagccttttgagtccggctccgagactcctggaacaagcgagagcgctacacctgagggcagccctaagagaaaggtgtccagcgccgagggcgctgccaaggaagagcctaaacggagaagcgccagactgagcgccaagccccccgccaaggtggaagccaagcctaagaaggccgccgctaaggacaagagcagcgataagaaagtccagaccaagggcaagcggggcgccaaaggcaaacaggccgaggtggccaaccaggagacaaaggaagatctgcctgctgagaacggcgaaaccaagaccgaggaatctccagcttctgacgaggccggagagaaggaggccaaaagcgacagcggctctgagacacctggaacaagcgagagcgccaccccggaatcctatgaacaacttgcaccacaaccgtgtgtgggagaaactttacattctagcctcccacgagacagtgaactgtttgtgcctgaagaggggagcagcgagaaggagagcgaggacgcgccaaaaacatctcctccgacgcctgggaaacatggtttggaacagactggggaggaaaaagtgatggtgactgttcctgacaaaaatccaccttgtccttgctgtggtacccgggtaaactctgtgttgaatctgattgaacatctgaaagtgtcacacgggaaaaggggggtttgttttcggtgtgcaaaatgtggaaaggaaaatagtaactatcacagtgttgtttgtcattttaagaaatgcaggggtccagagacggagaaagccccagctggggagtggatttgtgaggtatgcaacagagattttacaaccaaaattggcctgggacaacacaagagattggcacacccagcagtgagaaatcaggaaaggatcgttgcttcccaaccgaaagaaacatcaaatagaggtgctcacaaaaggtgctggacaaaggaggaggaagaattactaataagactggaggctcagttcgagggaaacaaaaatattaataagcttattgcagaacacataaccaccaaaacagctaagcagatcagtgacaaaaggcgattgctgtccagaaagccagcagaggagccacgtgaggagcctggaacgtgtcatcacaccaggagagcagctgcgagcctgagaacggagcctgagatgagtcatcacgcccaggcagaggacagagataatggacctgggagacgccctctgccaggcagggcagctgccggagggagaacaatggacgagataagacgccaccctgataagggcaacggacagcagagacccaccaagcaaaaatcagaagaacagctgcaggcttactataaaaagacactagaggaacgactttcagctggggcacttaacaccttcccccgagcattcaagcaggtaatggaaggccgggatataaagctagtaatcaatcagacagcgcaggactgcttcggatgcctggaatccataagccaaataagaacggcaacccgagataaaaaggacacggtgacccgggagaaacacccaaagaaaccttttcagaagtggatgaagaagagagcaatcaaaaaaggtaattatcttcggttccagcgtttattttatcttgatagagggaaactggctaaaatcattttagatgatattgaatgcttgtcttgtgacataccactcagtgaaatttattcggtttttaaaacaagatgggaaacaactggtagctttaaaagccttggggactttaaaacttacgggaaggctgacaacactgccttcagagaattaattacggctaaagaaattgagaaaaatgtgcaggaaatgagcaaaggctcggctcccggtccagacgggattactcttggggacgtcgtaaagatggatcccgagttttcccggaccatggagattttcaatttatggttaacaactggtaaaatcccggacatggtgagggggtgcagaaccgttttgattccaaaatcatcaaagccggatcgtttgaaagacattaataactggagacctatcacgatcggttccatcttgctgagactgttctccaggattgtaacagctaggctgagcaaagcgtgccccctgaacccaaggcaaagaggctttatcagagcggcgggatgctctgaaaacttaaaactcctgcaaactataatttggtcggccaaaagagaacacagaccactgggtgttgtattcgtggacatcgccaaggcttttgacaccgtaagccaccagcacatcattcatgctttgcagcaaagagaggtggatccccacatcgtcggtctggtgagcaatatgtacgagaacatcagtacgtatatcaccacaaagaggaacacacacacagacaaaatccagatccgggttggagtaaagcagggtgacccgatgtcgccccttttatttaacctggcaatggaccctctattatgcaagctggaagagagtggcaaaggataccaccgaggacagagcagcatcacagcgatggcatttgcagacgatctggttttgctgagcgactcctgggaaaatatgaatacaaatattagcatactggagaccttctgcaatctgaccggactcaaaacacaggggcaaaagtgccacggcttttacatcaagccgacaaaggactcttacaccatcaatgactgcgctgcctggactatcaacggcacacccctgaacatgatcgaccccggcgaatctgagaaatacctcggcctgcagtttgacccgtggattggaatagcaaggtccggtctctccacaaaactagatttttggcttcagcggatcgatcaagcaccacttaaacctctgcagaaaactgatattctcaaaacatacaccatccctcggctgatctacatagctgaccactcagaagtgaaaagcgcactactcgaaacccttgaccagaagatccggacagcggtcaaggaatggcttcacctacctccgtgcacctgcgatgccatcctgtactcgagcacgagagacggcggtttgggcatcaccaaattggcaggactgatccccagcgtgcaggcccgtagactgcatcggatcgcacagtcatctgacgatacgatgaaatgcttcatggaaaaagagaaaatggaacagctgcataagaaattgtggattcaagctggaggggacagagagaacataccctcgatttgggaagcaccaccgtcgagtgaaccaccaaacaacgtgagcacaaattcggaatgggaagcaccgacccagaaagataaatttccaaagccttgcaattggaggaaaaacgaattcaaaaaatggaccaaattggcatcccaaggccgcggaattgtaaattttgaaagagacaaaattagtaaccattggatccaatactacagacgcatacctcacaggaaactcctcactgcactacaactcagggccaacgtttaccccacgagagaatttctagccaggggtagacaagaccaatacatcaaggcgtgtaggcactgcgatgcggacaacgaatcctgcgcccacatcatcggcaactgcccagtgacacaggacgcccgaatcaagaggcacaattacatctgcgaactgcttctcgaggaggcgaagaagaaggactgggtagtgttcaaggaaccgcacataagggattccaacaaggaactgtacaaacctgacctgatatttgtgaaggatgggcgtgcacttgtcgtggatgtgacagtacggtatgaagcagccaaatcatcgctggaggaagccgctgcagagaaagtgagaaagtacaaacacctggaaacggaagtaagacatctcacgaatgcaaaggacgttacttttgtgggctttcccctaggagcgcgggggaaatggcaccaagataactttaaacttttgactgagcttggcctctccaaatcgaggcaagtgaaaatggcagagactttttccacagtagcgctcttttcatctgtggacattgtacatatgtttgccagtagggccagaaaatctatggttatgtgataataggctgccttctgcggggcttgccttctggccatgcccttcttctctcccttgcacctgtacctcttggtctttgaataaagcctgagtaggaaggaccggtaaaaaaaaaaaaaaaaaaaaaaaaaaaaaaacgttgactaaaaaaaaaaaaaaaaaaaaaaaaaaaaaaaaaaaaaaaaaaaaaaaaaaaaaaaaaaaaaaaaaaaaaa

SEQ ID NO: 10742 - DNA, 5264 bp, synthetic construct
  source 1..5264: mol_type = other DNA
gaaataagagagaaaagaagagtaagaagaaatataagagaattcgccaccatggcccctaagaaaaagcggaaggtgaatatcagcggctctagctgcggcagccccaacagcgccgacaccagcagcgacttcaaggacctgtggaccaagctgaaggaatgccacgaccgggaagtgcagggactccaggtgaaggtcaccaaactcaagcaagaaagaatcctggacgcccagagactggaagaattcttcaccaagaaccagcagctgagagagcagcagaaagtgctgcacgagacaatcaaggttctggaagatagactgcgggccggcctgtgcgacagatgcgccgtgaccgaggaacacatgcgcaaaaagcagcaggagttcgagaacattagacagcaaaatctgaaattgatcacagagctgatgaacgagagaaacacactgcaggaggagaacaagaagctgagcgagcagctgcaacagaagatcgagaatgatcagcaacaccaggccgctgagctggaatgtgaagaggacgtgatccccgacagcccaatcacagctttcagcttttctggcgtgaacagactgaggcggaaggaaaacccccacgtgcggtacatcgagcagacccataccaagctggaacacagcgtgtgtgccaacgagatgagaaaggtgtccaagtcctccacccatccccagcacaaccctaacgaaaatgagatcctggtggctgatacctacgaccagtctcagagccctatggccaaggcccacggcaccagctcttatacccctgataagagctccttcaacctggccaccgtggtggccgagacactgggcctgggcgtgcaggaggaaagcgagacacagggcccaatgagccctctgggagatgaggggtaccactgcctggaaggcaaccacaagaaacagccttttgagtccggctccgagactcctggaacaagcgagagcgctacacctgagggcagccctaagagaaaggtgtccagcgccgagggcgctgccaaggaagagcctaaacggagaagcgccagactgagcgccaagccccccgccaaggtggaagccaagcctaagaaggccgccgctaaggacaagagcagcgataagaaagtccagaccaagggcaagcggggcgccaaaggcaaacaggccgaggtggccaaccaggagacaaaggaagatctgcctgctgagaacggcgaaaccaagaccgaggaatctccagcttctgacgaggccggagagaaggaggccaaaagcgacagcggctctgagacacctggaacaagcgagagcgccaccccggaatcctatgaacaacttgcaccacaaccgtgtgtgggagaaactttacattctagcctcccacgagacagtgaactgtttgtgcctgaagaggggagcagcgagaaggagagcgaggacgcgccaaaaacatctcctccgacgcctgggaaacatggtttggaacagactggggaggaaaaagtgatggtgactgttcctgacaaaaatccaccttgtccttgctgtggtacccgggtaaactctgtgttgaatctgattgaacatctgaaagtgtcacacgggaaaaggggggtttgttttcggtgtgcaaaatgtggaaaggaaaatagtaactatcacagtgttgtttgtcattttaagaaatgcaggggtccagagacggagaaagccccagctggggagtggatttgtgaggtatgcaacagagattttacaaccaaaattggcctgggacaacacaagagattggcacacccagcagtgagaaatcaggaaaggatcgttgcttcccaaccgaaagaaacatcaaatagaggtgctcacaaaaggtgctggacaaaggaggaggaagaattactaataagactggaggctcagttcgagggaaacaaaaatattaataagcttattgcagaacacataaccaccaaaacagctaagcagatcagtgacaaaaggcgattgctgtccagaaagccagcagaggagccacgtgaggagcctggaacgtgtcatcacaccaggagagcagctgcgagcctgagaacggagcctgagatgagtcatcacgcccaggcagaggacagagataatggacctgggagacgccctctgccaggcagggcagctgccggagggagaacaatggacgagataagacgccaccctgataagggcaacggacagcagagacccaccaagcaaaaatcagaagaacagctgcaggcttactataaaaagacactagaggaacgactttcagctggggcacttaacaccttcccccgagcattcaagcaggtaatggaaggccgggatataaagctagtaatcaatcagacagcgcaggactgcttcggatgcctggaatccataagccaaataagaacggcaacccgagataaaaaggacacggtgacccgggagaaacacccaaagaaaccttttcagaagtggatgaagaagagagcaatcaaaaaaggtaattatcttcggttccagcgtttattttatcttgatagagggaaactggctaaaatcattttagatgatattgaatgcttgtcttgtgacataccactcagtgaaatttattcggtttttaaaacaagatgggaaacaactggtagctttaaaagccttggggactttaaaacttacgggaaggctgacaacactgccttcagagaattaattacggctaaagaaattgagaaaaatgtgcaggaaatgagcaaaggctcggctcccggtccagacgggattactcttggggacgtcgtaaagatggatcccgagttttcccggaccatggagattttcaatttatggttaacaactggtaaaatcccggacatggtgagggggtgcagaaccgttttgattccaaaatcatcaaagccggatcgtttgaaagacattaataactggagacctatcacgatcggttccatcttgctgagactgttctccaggattgtaacagctaggctgagcaaagcgtgccccctgaacccaaggcaaagaggctttatcagagcggcgggatgctctgaaaacttaaaactcctgcaaactataatttggtcggccaaaagagaacacagaccactgggtgttgtattcgtggacatcgccaaggcttttgacaccgtaagccaccagcacatcattcatgctttgcagcaaagagaggtggatccccacatcgtcggtctggtgagcaatatgtacgagaacatcagtacgtatatcaccacaaagaggaacacacacacagacaaaatccagatccgggttggagtaaagcagggtgacccgatgtcgccccttttatttaacctggcaatggaccctctattatgcaagctggaagagagtggcaaaggataccaccgaggacagagcagcatcacagcgatggcatttgcagacgatctggttttgctgagcgactcctgggaaaatatgaatacaaatattagcatactggagaccttctgcaatctgaccggactcaaaacacaggggcaaaagtgccacggcttttacatcaagccgacaaaggactcttacaccatcaatgactgcgctgcctggactatcaacggcacacccctgaacatgatcgaccccggcgaatctgagaaatacctcggcctgcagtttgacccgtggattggaatagcaaggtccggtctctccacaaaactagatttttggcttcagcggatcgatcaagcaccacttaaacctctgcagaaaactgatattctcaaaacatacaccatccctcggctgatctacatagctgaccactcagaagtgaaaagcgcactactcgaaacccttgaccagaagatccggacagcggtcaaggaatggcttcacctacctccgtgcacctgcgatgccatcctgtactcgagcacgagagacggcggtttgggcatcaccaaattggcaggactgatccccagcgtgcaggcccgtagactgcatcggatcgcacagtcatctgacgatacgatgaaatgcttcatggaaaaagagaaaatggaacagctgcataagaaattgtggattcaagctggaggggacagagagaacataccctcgatttgggaagcaccaccgtcgagtgaaccaccaaacaacgtgagcacaaattcggaatgggaagcaccgacccagaaagataaatttccaaagccttgcaattggaggaaaaacgaattcaaaaaatggaccaaattggcatcccaaggccgcggaattgtaaattttgaaagagacaaaattagtaaccattggatccaatactacagacgcatacctcacaggaaactcctcactgcactacaactcagggccaacgtttaccccacgagagaatttctagccaggggtagacaagaccaatacatcaaggcgtgtaggcactgcgatgcggacaacgaatcctgcgcccacatcatcggcaactgcccagtgacacaggacgcccgaatcaagaggcacaattacatctgcgaactgcttctcgaggaggcgaagaagaaggactgggtagtgttcaaggaaccgcacataagggattccaacaaggaactgtacaaacctgacctgatatttgtgaaggatgggcgtgcacttgtcgtggatgtgacagtacggtatgaagcagccaaatcatcgctggaggaagccgctgcagagaaagtgagaaagtacaaacacctggaaacggaagtaagacatctcacgaatgcaaaggacgttacttttgtgggctttcccctaggagcgcgggggaaatggcaccaagataactttaaacttttgactgagcttggcctctccaaatcgaggcaagtgaaaatggcagagactttttccacagtagcgctcttttcatctgtggacattgtacatatgtttgccagtagggccagaaaatctatggttatgtgataataggctgccttctgcggggcttgccttctggccatgcccttcttctctcccttgcacctgtacctcttggtctttgaataaagcctgagtaggaaggaccggtaaaaaaaaaaaaaaaaaaaaaaaaaaaaaaacgttgactaaaaaaaaaaaaaaaaaaaaaaaaaaaaaaaaaaaaaaaaaaaaaaaaaaaaaaaaaaaaaaaaaaaaaa

SEQ ID NO: 10743 - DNA, 5264 bp, synthetic construct
  source 1..5264: mol_type = other DNA
gaaataagagagaaaagaagagtaagaagaaatataagagaattcgccaccatggcccctaagaaaaagcggaaggtgaatatcagcggctctagctgcggcagccccaacagcgccgacaccagcagcgacttcaaggacctgtggaccaagctgaaggaatgccacgaccgggaagtgcagggactccaggtgaaggtcaccaaactcaagcaagaaagaatcctggacgcccagagactggaagaattcttcaccaagaaccagcagctgagagagcagcagaaagtgctgcacgagacaatcaaggttctggaagatagactgcgggccggcctgtgcgacagatgcgccgtgaccgaggaacacatgcgcaaaaagcagcaggagttcgagaacattagacagcaaaatctgaaattgatcacagagctgatgaacgagagaaacacactgcaggaggagaacaagaagctgagcgagcagctgcaacagaagatcgagaatgatcagcaacaccaggccgctgagctggaatgtgaagaggacgtgatccccgacagcccaatcacagctttcagcttttctggcgtgaacagactgaggcggaaggaaaacccccacgtgcggtacagcgagcagacccataccaagctggaacacagcgtgtgtgccaacgagatgagaaaggtgtccaagtcctccacccatccccagcacaaccctaacgaaaatgagatcctggtggctgatacctacgaccagtctcagagccctatggccaaggcccacggcaccagctcttatacccctgataagagctccttcaacctggccaccgtggtggccgagacactgggcctgggcgtgcaggaggaaagcgagacacagggcccaatgagccctctgggagatgagctgtaccactgcctggaaggcaaccacaagaaacagccttttgagtccggctccgagactcctggaacaagcgagagcgctacacctgagggcagccctaagagaaaggtgtccagcgccgagggcgctgccaaggaagagcctaaacggagaagcgccagactgagcgccaagccccccgccaaggtggaagccaagcctaagaaggccgccgctaaggacaagagcagcgataagaaagtccagaccaagggcaagcggggcgccaaaggcaaacaggccgaggtggccaaccaggagacaaaggaagatctgcctgctgagaacggcgaaaccaagaccgaggaatctccagcttctgacgaggccggagagaaggaggccaaaagcgacagcggctctgagacacctggaacaagcgagagcgccaccccggaatcctatgaacaacttgcaccacaaccgtgtgtgggagaaactttacattctagcctcccacgagacagtgaactgtttgtgcctgaagaggggagcagcgagaaggagagcgaggacgcgccaaaaacatctcctccgacgcctgggaaacatggtttggaacagactggggaggaaaaagtgatggtgactgttcctgacaaaaatccaccttgtccttgctgtggtacccgggtaaactctgtgttgaatctgattgaacatctgaaagtgtcacacgggaaaaggggggtttgttttcggtgtgcaaaatgtggaaaggaaaatagtaactatcacagtgttgtttgtcattttaagaaatgcaggggtccagagacggagaaagccccagctggggagtggatttgtgaggtatgcaacagagattttacaaccaaaattggcctgggacaacacaagagattggcacacccagcagtgagaaatcaggaaaggatcgttgcttcccaaccgaaagaaacatcaaatagaggtgctcacaaaaggtgctggacaaaggaggaggaagaattactaataagactggaggctcagttcgagggaaacaaaaatattaataagcttattgcagaacacataaccaccaaaacagctaagcagatcagtgacaaaaggcgattgctgtccagaaagccagcagaggagccacgtgaggagcctggaacgtgtcatcacaccaggagagcagctgcgagcctgagaacggagcctgagatgagtcatcacgcccaggcagaggacagagataatggacctgggagacgccctctgccaggcagggcagctgccggagggagaacaatggacgagataagacgccaccctgataagggcaacggacagcagagacccaccaagcaaaaatcagaagaacagctgcaggcttactataaaaagacactagaggaacgactttcagctggggcacttaacaccttcccccgagcattcaagcaggtaatggaaggccgggatataaagctagtaatcaatcagacagcgcaggactgcttcggatgcctggaatccataagccaaataagaacggcaacccgagataaaaaggacacggtgacccgggagaaacacccaaagaaaccttttcagaagtggatgaagaagagagcaatcaaaaaaggtaattatcttcggttccagcgtttattttatcttgatagagggaaactggctaaaatcattttagatgatattgaatgcttgtcttgtgacataccactcagtgaaatttattcggtttttaaaacaagatgggaaacaactggtagctttaaaagccttggggactttaaaacttacgggaaggctgacaacactgccttcagagaattaattacggctaaagaaattgagaaaaatgtgcaggaaatgagcaaaggctcggctcccggtccagacgggattactcttggggacgtcgtaaagatggatcccgagttttcccggaccatggagattttcaatttatggttaacaactggtaaaatcccggacatggtgagggggtgcagaaccgttttgattccaaaatcatcaaagccggatcgtttgaaagacattaataactggagacctatcacgatcggttccatcttgctgagactgttctccaggattgtaacagctaggctgagcaaagcgtgccccctgaacccaaggcaaagaggctttatcagagcggcgggatgctctgaaaacttaaaactcctgcaaactataatttggtcggccaaaagagaacacagaccactgggtgttgtattcgtggacatcgccaaggcttttgacaccgtaagccaccagcacatcattcatgctttgcagcaaagagaggtggatccccacatcgtcggtctggtgagcaatatgtacgagaacatcagtacgtatatcaccacaaagaggaacacacacacagacaaaatccagatccgggttggagtaaagcagggtgacccgatgtcgccccttttatttaacctggcaatggaccctctattatgcaagctggaagagagtggcaaaggataccaccgaggacagagcagcatcacagcgatggcatttgcagacgatctggttttgctgagcgactcctgggaaaatatgaatacaaatattagcatactggagaccttctgcaatctgaccggactcaaaacacaggggcaaaagtgccacggcttttacatcaagccgacaaaggactcttacaccatcaatgactgcgctgcctggactatcaacggcacacccctgaacatgatcgaccccggcgaatctgagaaatacctcggcctgcagtttgacccgtggattggaatagcaaggtccggtctctccacaaaactagatttttggcttcagcggatcgatcaagcaccacttaaacctctgcagaaaactgatattctcaaaacatacaccatccctcggctgatctacatagctgaccactcagaagtgaaaagcgcactactcgaaacccttgaccagaagatccggacagcggtcaaggaatggcttcacctacctccgtgcacctgcgatgccatcctgtactcgagcacgagagacggcggtttgggcatcaccaaattggcaggactgatccccagcgtgcaggcccgtagactgcatcggatcgcacagtcatctgacgatacgatgaaatgcttcatggaaaaagagaaaatggaacagctgcataagaaattgtggattcaagctggaggggacagagagaacataccctcgatttgggaagcaccaccgtcgagtgaaccaccaaacaacgtgagcacaaattcggaatgggaagcaccgacccagaaagataaatttccaaagccttgcaattggaggaaaaacgaattcaaaaaatggaccaaattggcatcccaaggccgcggaattgtaaattttgaaagagacaaaattagtaaccattggatccaatactacagacgcatacctcacaggaaactcctcactgcactacaactcagggccaacgtttaccccacgagagaatttctagccaggggtagacaagaccaatacatcaaggcgtgtaggcactgcgatgcggacaacgaatcctgcgcccacatcatcggcaactgcccagtgacacaggacgcccgaatcaagaggcacaattacatctgcgaactgcttctcgaggaggcgaagaagaaggactgggtagtgttcaaggaaccgcacataagggattccaacaaggaactgtacaaacctgacctgatatttgtgaaggatgggcgtgcacttgtcgtggatgtgacagtacggtatgaagcagccaaatcatcgctggaggaagccgctgcagagaaagtgagaaagtacaaacacctggaaacggaagtaagacatctcacgaatgcaaaggacgttacttttgtgggctttcccctaggagcgcgggggaaatggcaccaagataactttaaacttttgactgagcttggcctctccaaatcgaggcaagtgaaaatggcagagactttttccacagtagcgctcttttcatctgtggacattgtacatatgtttgccagtagggccagaaaatctatggttatgtgataataggctgccttctgcggggcttgccttctggccatgcccttcttctctcccttgcacctgtacctcttggtctttgaataaagcctgagtaggaaggaccggtaaaaaaaaaaaaaaaaaaaaaaaaaaaaaaacgttgactaaaaaaaaaaaaaaaaaaaaaaaaaaaaaaaaaaaaaaaaaaaaaaaaaaaaaaaaaaaaaaaaaaaaaa

SEQ ID NO: 10744 - DNA, 5264 bp, synthetic construct
  source 1..5264: mol_type = other DNA
gaaataagagagaaaagaagagtaagaagaaatataagagaattcgccaccatggcccctaagaaaaagcggaaggtgaatatcagcggctctagctgcggcagccccaacagcgccgacaccagcagcgacttcaaggacctgtggaccaagctgaaggaatgccacgaccgggaagtgcagggactccaggtgaaggtcaccaaactcaagaaagaaagaatcctggacgcccagagactggaagaattcttcaccaagaaccagcagctgagagagcagcagaaagtgctgcacgagacaatcaaggttctggaagatagactgcgggccggcctgtgcgacagatgcgccgtgaccgaggaacacatgcgcaaaaagcagcaggagttcgagaacattagacagcaaaatctgaaattgatcacagagctgatgaacgagagaaacacactgcaggaggagaacaagaagctgagcgagcagctgcaacagaagatcgagaatgatcagcaacaccaggccgctgagctggaatgtgaagaggacgtgatccccgacagcccaatcacagctttcagcttttctggcgtgaacagactgaggcggaaggaaaacccccacgtgcggtacatcgagcagacccataccaagctggaacacagcgtgtgtgccaacgagatgagaaaggtgtccaagtcctccacccatccccagcacaaccctaacgaaaatgagatcctggtggctgatacctacgaccagtctcagagccctatggccaaggcccacggcaccagctcttatacccctgataagagctccttcaacctggccaccgtggtggccgagacactgggcctgggcgtgcaggaggaaagcgagacacagggcccaatgagccctctgggagatgagctgtaccactgcctggaaggcaaccacaagaaacagccttttgagtccggctccgagactcctggaacaagcgagagcgctacacctgagggcagccctaagagaaaggtgtccagcgccgagggcgctgccaaggaagagcctaaacggagaagcgccagactgagcgccaagccccccgccaaggtggaagccaagcctaagaaggccgccgctaaggacaagagcagcgataagaaagtccagaccaagggcaagcggggcgccaaaggcaaacaggccgaggtggccaaccaggagacaaaggaagatctgcctgctgagaacggcgaaaccaagaccgaggaatctccagcttctgacgaggccggagagaaggaggccaaaagcgacagcggctctgagacacctggaacaagcgagagcgccaccccggaatcctatgaacaacttgcaccacaaccgtgtgtgggagaaactttacattctagcctcccacgagacagtgaactgtttgtgcctgaagaggggagcagcgagaaggagagcgaggacgcgccaaaaacatctcctccgacgcctgggaaacatggtttggaacagactggggaggaaaaagtgatggtgactgttcctgacaaaaatccaccttgtccttgctgtggtacccgggtaaactctgtgttgaatctgattgaacatctgaaagtgtcacacgggaaaaggggggtttgttttcggtgtgcaaaatgtggaaaggaaaatagtaactatcacagtgttgtttgtcattttaagaaatgcaggggtccagagacggagaaagccccagctggggagtggatttgtgaggtatgcaacagagattttacaaccaaaattggcctgggacaacacaagagattggcacacccagcagtgagaaatcaggaaaggatcgttgcttcccaaccgaaagaaacatcaaatagaggtgctcacaaaaggtgctggacaaaggaggaggaagaattactaataagactggaggctcagttcgagggaaacaaaaatattaataagcttattgcagaacacataaccaccaaaacagctaagcagatcagtgacaaaaggcgattgctgtccagaaagccagcagaggagccacgtgaggagcctggaacgtgtcatcacaccaggagagcagctgcgagcctgagaacggagcctgagatgagtcatcacgcccaggcagaggacagagataatggacctgggagacgccctctgccaggcagggcagctgccggagggagaacaatggacgagataagacgccaccctgataagggcaacggacagcagagacccaccaagcaaaaatcagaagaacagctgcaggcttactataaaaagacactagaggaacgactttcagctggggcacttaacaccttcccccgagcattcaagcaggtaatggaaggccgggatataaagctagtaatcaatcagacagcgcaggactgcttcggatgcctggaatccataagccaaataagaacggcaacccgagataaaaaggacacggtgacccgggagaaacacccaaagaaaccttttcagaagtggatgaagaagagagcaatcaaaaaaggtaattatcttcggttccagcgtttattttatcttgatagagggaaactggctaaaatcattttagatgatattgaatgcttgtcttgtgacataccactcagtgaaatttattcggtttttaaaacaagatgggaaacaactggtagctttaaaagccttggggactttaaaacttacgggaaggctgacaacactgccttcagagaattaattacggctaaagaaattgagaaaaatgtgcaggaaatgagcaaaggctcggctcccggtccagacgggattactcttggggacgtcgtaaagatggatcccgagttttcccggaccatggagattttcaatttatggttaacaactggtaaaatcccggacatggtgagggggtgcagaaccgttttgattccaaaatcatcaaagccggatcgtttgaaagacattaataactggagacctatcacgatcggttccatcttgctgagactgttctccaggattgtaacagctaggctgagcaaagcgtgccccctgaacccaaggcaaagaggctttatcagagcggcgggatgctctgaaaacttaaaactcctgcaaactataatttggtcggccaaaagagaacacagaccactgggtgttgtattcgtggacatcgccaaggcttttgacaccgtaagccaccagcacatcattcatgctttgcagcaaagagaggtggatccccacatcgtcggtctggtgagcaatatgtacgagaacatcagtacgtatatcaccacaaagaggaacacacacacagacaaaatccagatccgggttggagtaaagcagggtgacccgatgtcgccccttttatttaacctggcaatggaccctctattatgcaagctggaagagagtggcaaaggataccaccgaggacagagcagcatcacagcgatggcatttgcagacgatctggttttgctgagcgactcctgggaaaatatgaatacaaatattagcatactggagaccttctgcaatctgaccggactcaaaacacaggggcaaaagtgccacggcttttacatcaagccgacaaaggactcttacaccatcaatgactgcgctgcctggactatcaacggcacacccctgaacatgatcgaccccggcgaatctgagaaatacctcggcctgcagtttgacccgtggattggaatagcaaggtccggtctctccacaaaactagatttttggcttcagcggatcgatcaagcaccacttaaacctctgcagaaaactgatattctcaaaacatacaccatccctcggctgatctacatagctgaccactcagaagtgaaaagcgcactactcgaaacccttgaccagaagatccggacagcggtcaaggaatggcttcacctacctccgtgcacctgcgatgccatcctgtactcgagcacgagagacggcggtttgggcatcaccaaattggcaggactgatccccagcgtgcaggcccgtagactgcatcggatcgcacagtcatctgacgatacgatgaaatgcttcatggaaaaagagaaaatggaacagctgcataagaaattgtggattcaagctggaggggacagagagaacataccctcgatttgggaagcaccaccgtcgagtgaaccaccaaacaacgtgagcacaaattcggaatgggaagcaccgacccagaaagataaatttccaaagccttgcaattggaggaaaaacgaattcaaaaaatggaccaaattggcatcccaaggccgcggaattgtaaattttgaaagagacaaaattagtaaccattggatccaatactacagacgcatacctcacaggaaactcctcactgcactacaactcagggccaacgtttaccccacgagagaatttctagccaggggtagacaagaccaatacatcaaggcgtgtaggcactgcgatgcggacaacgaatcctgcgcccacatcatcggcaactgcccagtgacacaggacgcccgaatcaagaggcacaattacatctgcgaactgcttctcgaggaggcgaagaagaaggactgggtagtgttcaaggaaccgcacataagggattccaacaaggaactgtacaaacctgacctgatatttgtgaaggatgggcgtgcacttgtcgtggatgtgacagtacggtatgaagcagccaaatcatcgctggaggaagccgctgcagagaaagtgagaaagtacaaacacctggaaacggaagtaagacatctcacgaatgcaaaggacgttacttttgtgggctttcccctaggagcgcgggggaaatggcaccaagataactttaaacttttgactgagcttggcctctccaaatcgaggcaagtgaaaatggcagagactttttccacagtagcgctcttttcatctgtggacattgtacatatgtttgccagtagggccagaaaatctatggttatgtgataataggctgccttctgcggggcttgccttctggccatgcccttcttctctcccttgcacctgtacctcttggtctttgaataaagcctgagtaggaaggaccggtaaaaaaaaaaaaaaaaaaaaaaaaaaaaaaacgttgactaaaaaaaaaaaaaaaaaaaaaaaaaaaaaaaaaaaaaaaaaaaaaaaaaaaaaaaaaaaaaaaaaaaaaa

SEQ ID NO: 10745 - DNA, 5264 bp, synthetic construct
  source 1..5264: mol_type = other DNA
gaaataagagagaaaagaagagtaagaagaaatataagagaattcgccaccatggcccctaagaaaaagcggaaggtgaatatcagcggctctagctgcggcagccccaacagcgccgacaccagcagcttcttcaaggacctgtggaccaagctgaaggaatgccacgaccgggaagtgcagggactccaggtgaaggtcaccaaactcaagcaagaaagaatcctggacgcccagagactggaagaattcttcaccaagaaccagcagctgagagagcagcagaaagtgctgcacgagacaatcaaggttctggaagatagactgcgggccggcctgtgcgacagatgcgccgtgaccgaggaacacatgcgcaaaaagcagcaggagttcgagaacattagacagcaaaatctgaaattgatcacagagctgatgaacgagagaaacacactgcaggaggagaacaagaagctgagcgagcagctgcaacagaagatcgagaatgatcagcaacaccaggccgctgagctggaatgtgaagaggacgtgatccccgacagcccaatcacagctttcagcttttctggcgtgaacagactgaggcggaaggaaaacccccacgtgcggtacatcgagcagacccataccaagctggaacacagcgtgtgtgccaacgagatgagaaaggtgtccaagtcctccacccatccccagcacaaccctaacgaaaatgagatcctggtggctgatacctacgaccagtctcagagccctatggccaaggcccacggcaccagctcttatacccctgataagagctccttcaacctggccaccgtggtggccgagacactgggcctgggcgtgcaggaggaaagcgagacacagggcccaatgagccctctgggagatgagctgtaccactgcctggaaggcaaccacaagaaacagccttttgagtccggctccgagactcctggaacaagcgagagcgctacacctgagggcagccctaagagaaaggtgtccagcgccgagggcgctgccaaggaagagcctaaacggagaagcgccagactgagcgccaagccccccgccaaggtggaagccaagcctaagaaggccgccgctaaggacaagagcagcgataagaaagtccagaccaagggcaagcggggcgccaaaggcaaacaggccgaggtggccaaccaggagacaaaggaagatctgcctgctgagaacggcgaaaccaagaccgaggaatctccagcttctgacgaggccggagagaaggaggccaaaagcgacagcggctctgagacacctggaacaagcgagagcgccaccccggaatcctatgaacaacttgcaccacaaccgtgtgtgggagaaactttacattctagcctcccacgagacagtgaactgtttgtgcctgaagaggggagcagcgagaaggagagcgaggacgcgccaaaaacatctcctccgacgcctgggaaacatggtttggaacagactggggaggaaaaagtgatggtgactgttcctgacaaaaatccaccttgtccttgctgtggtacccgggtaaactctgtgttgaatctgattgaacatctgaaagtgtcacacgggaaaaggggggtttgttttcggtgtgcaaaatgtggaaaggaaaatagtaactatcacagtgttgtttgtcattttaagaaatgcaggggtccagagacggagaaagccccagctggggagtggatttgtgaggtatgcaacagagattttacaaccaaaattggcctgggacaacacaagagattggcacacccagcagtgagaaatcaggaaaggatcgttgcttcccaaccgaaagaaacatcaaatagaggtgctcacaaaaggtgctggacaaaggaggaggaagaattactaataagactggaggctcagttcgagggaaacaaaaatattaataagcttattgcagaacacataaccaccaaaacagctaagcagatcagtgacaaaaggcgattgctgtccagaaagccagcagaggagccacgtgaggagcctggaacgtgtcatcacaccaggagagcagctgcgagcctgagaacggagcctgagatgagtcatcacgcccaggcagaggacagagataatggacctgggagacgccctctgccaggcagggcagctgccggagggagaacaatggacgagataagacgccaccctgataagggcaacggacagcagagacccaccaagcaaaaatcagaagaacagctgcaggcttactataaaaagacactagaggaacgactttcagctggggcacttaacaccttcccccgagcattcaagcaggtaatggaaggccgggatataaagctagtaatcaatcagacagcgcaggactgcttcggatgcctggaatccataagccaaataagaacggcaacccgagataaaaaggacacggtgacccgggagaaacacccaaagaaaccttttcagaagtggatgaagaagagagcaatcaaaaaaggtaattatcttcggttccagcgtttattttatcttgatagagggaaactggctaaaatcattttagatgatattgaatgcttgtcttgtgacataccactcagtgaaatttattcggtttttaaaacaagatgggaaacaactggtagctttaaaagccttggggactttaaaacttacgggaaggctgacaacactgccttcagagaattaattacggctaaagaaattgagaaaaatgtgcaggaaatgagcaaaggctcggctcccggtccagacgggattactcttggggacgtcgtaaagatggatcccgagttttcccggaccatggagattttcaatttatggttaacaactggtaaaatcccggacatggtgagggggtgcagaaccgttttgattccaaaatcatcaaagccggatcgtttgaaagacattaataactggagacctatcacgatcggttccatcttgctgagactgttctccaggattgtaacagctaggctgagcaaagcgtgccccctgaacccaaggcaaagaggctttatcagagcggcgggatgctctgaaaacttaaaactcctgcaaactataatttggtcggccaaaagagaacacagaccactgggtgttgtattcgtggacatcgccaaggcttttgacaccgtaagccaccagcacatcattcatgctttgcagcaaagagaggtggatccccacatcgtcggtctggtgagcaatatgtacgagaacatcagtacgtatatcaccacaaagaggaacacacacacagacaaaatccagatccgggttggagtaaagcagggtgacccgatgtcgccccttttatttaacctggcaatggaccctctattatgcaagctggaagagagtggcaaaggataccaccgaggacagagcagcatcacagcgatggcatttgcagacgatctggttttgctgagcgactcctgggaaaatatgaatacaaatattagcatactggagaccttctgcaatctgaccggactcaaaacacaggggcaaaagtgccacggcttttacatcaagccgacaaaggactcttacaccatcaatgactgcgctgcctggactatcaacggcacacccctgaacatgatcgaccccggcgaatctgagaaatacctcggcctgcagtttgacccgtggattggaatagcaaggtccggtctctccacaaaactagatttttggcttcagcggatcgatcaagcaccacttaaacctctgcagaaaactgatattctcaaaacatacaccatccctcggctgatctacatagctgaccactcagaagtgaaaagcgcactactcgaaacccttgaccagaagatccggacagcggtcaaggaatggcttcacctacctccgtgcacctgcgatgccatcctgtactcgagcacgagagacggcggtttgggcatcaccaaattggcaggactgatccccagcgtgcaggcccgtagactgcatcggatcgcacagtcatctgacgatacgatgaaatgcttcatggaaaaagagaaaatggaacagctgcataagaaattgtggattcaagctggaggggacagagagaacataccctcgatttgggaagcaccaccgtcgagtgaaccaccaaacaacgtgagcacaaattcggaatgggaagcaccgacccagaaagataaatttccaaagccttgcaattggaggaaaaacgaattcaaaaaatggaccaaattggcatcccaaggccgcggaattgtaaattttgaaagagacaaaattagtaaccattggatccaatactacagacgcatacctcacaggaaactcctcactgcactacaactcagggccaacgtttaccccacgagagaatttctagccaggggtagacaagaccaatacatcaaggcgtgtaggcactgcgatgcggacaacgaatcctgcgcccacatcatcggcaactgcccagtgacacaggacgcccgaatcaagaggcacaattacatctgcgaactgcttctcgaggaggcgaagaagaaggactgggtagtgttcaaggaaccgcacataagggattccaacaaggaactgtacaaacctgacctgatatttgtgaaggatgggcgtgcacttgtcgtggatgtgacagtacggtatgaagcagccaaatcatcgctggaggaagccgctgcagagaaagtgagaaagtacaaacacctggaaacggaagtaagacatctcacgaatgcaaaggacgttacttttgtgggctttcccctaggagcgcgggggaaatggcaccaagataactttaaacttttgactgagcttggcctctccaaatcgaggcaagtgaaaatggcagagactttttccacagtagcgctcttttcatctgtggacattgtacatatgtttgccagtagggccagaaaatctatggttatgtgataataggctgccttctgcggggcttgccttctggccatgcccttcttctctcccttgcacctgtacctcttggtctttgaataaagcctgagtaggaaggaccggtaaaaaaaaaaaaaaaaaaaaaaaaaaaaaaacgttgactaaaaaaaaaaaaaaaaaaaaaaaaaaaaaaaaaaaaaaaaaaaaaaaaaaaaaaaaaaaaaaaaaaaaaa

SEQ ID NO: 10746 - DNA, 5264 bp, synthetic construct
  source 1..5264: mol_type = other DNA
gaaataagagagaaaagaagagtaagaagaaatataagagaattcgccaccatggcccctaagaaaaagcggaaggtgaatatcagcggctctagctgcggcagccccaacagcgccgacaccagcagcgacttcaaggacctgtggaccaagctgaaggaatgccacgaccgggaagtgcagggactccaggtgaaggtcaccaaactcaagcaagaaagaatcctggacgcccagagactggaagaattcttcaccaagaaccagcagctgagagagcagcagaaagtgctgcacgagacaatcaaggttctggaagatagactgcgggccggcctgtgcgacagatgcgccgtgaccgaggaacacatgcgcaaaaagcagcaggagttcgagaacattagacagcaaaatctgaaattgatcacagagctgatgaacgagagaaacacactgcaggaggagaacaagaagctgagcgagcagctgcaacagaagatcgagaatgatcagcaacaccaggccgctgagctggaatgtgaagaggacgtgatccccgacagcccaatcacagctttcagcttttctggcgtgaacagactgaggcggaaggaaaacccccacgtgcggtacatcgagcagacccataccaagctggaacacagcgtgtgtgccaacgagatgagaaaggtgtccaagtcctccacccatccccagcacaaccctaacgaaaatgagatcctggtggctgatacctacgaccagtctcagagccctatggccaaggcccacggcaccagctcttatacccctgataagagctccttcaacctggccaccgtggtggccgagacactgggcctgggcgtgcaggaggaaagcgagacacagggcccaatgagccctctgggagatgagctgtaccactgcctggaaggcaaccacaagaaacagccttttgagtccggctccgagactcctggaacaagcgagagcgctacacctgagggcagccctaagagaaaggtgtccagcgccgagggcgctgccaaggaagagcctaaacggagaagcgccagactgagcgccaagccccccgccaaggtggaagccaagcctaagaaggccgccgctaaggacaagagcagcgataagaaagtccagaccaagggcaagcggggcgccaaaggcaaacaggccgaggtggccaaccaggagacaaaggaagatctgcctgctgagaacggcgaaaccaagaccgaggaatctccagcttctgacgaggccggagagaaggaggccaaaagcgacagcggctctgagacacctggaacaagcgagagcgccaccccggaatcctatgaacaacttgcaccacaaccgtgtgtgggagaaactttacattctagcctcccacgagacagtgaactgtttgtgcctgaagaggggagcagcgagaaggagagcgaggacgcgccaaaaacatctcctccgacgcctgggaaacatggtttggaacagactggggaggaaaaagtgatggtgactgttcctgacaaaaatccaccttgtccttgctgtggtacccgggtaaactctgtgttgaatctgattgaacatctgaaagtgtcacacgggaaaaggggggtttgttttcggtgtgcaaaatgtggaaaggaaaatagtaactatcacagtgttgtttgtcattttaagaaatgcaggggtccagagacggagaaagccccagctggggagtggatttgtgaggtatgcaacagagattttacaaccaaaattggcctgggacaacacaagagattggcacacccagcagtgagaaatcaggaaaggatcgttgcttcccaaccgaaagaaacatcaaatagaggtgctcacaaaaggtgctggacaaaggaggaggaagaattactaataagactggaggctcagttcgagggaaacaaaaatattaataagcttattgcagaacacataaccaccaaaacagctaagcagatcagtgacaaaaggcgattgctgtccagaaagccagcagaggagccacgtgaggagcctggaacgtgtcatcacaccaggagagcagctgcgagcctgagaacggagcctgagatgagtcatcacgcccaggcagaggacagagataatggacctgggagacgccctctgccaggcagggcagctgccggagggagaacaatggacgagataagacgccaccctgataagggcaacggacagcagagacccaccaagcaaaaatcagaagaacagctgcaggcttactataaaaagacactagaggaacgactttcagctggggcacttaacaccttcccccgagcattcaagcaggtaatggaaggccgggatataaagctagtaatcaatcagacagcgcaggactgcttcggatgcctggaatccataagccaaataagaacggcaacccgagataaaaaggacacggtgacccgggagaaacacccaaagaaaccttttcagaagtggatgaagaagagagcaatcaaaaaaggtaattatcttcggttccagcgtttattttatcttgatagagggaaactggctaaaatcattttagatgatattgaatgcttgtcttgtgacataccactcagtgaaatttattcggtttttaaaacaagatgggaaacaactggtagctttaaaagccttggggactttaaaacttacgggaaggctgacaacactgccttcagagaattaattacggctaaagaaattgagaaaaatgtgcaggaaatgagcaaaggctcggctcccggtccagacgggattactcttggggacgtcgtaaagatggatcccgagttttcccggaccatggagattttcaatttatggttaacaactggtaaaatcccggacatggtgagggggtgcagaaccgttttgattccaaaatcatcaaagccggatcgtttgaaagacattaataactggagacctatcacgatcggttccatcttgctgagactgttctccaggattgtaacagctaggctgagcaaagcgtgccccctgaacccaaggcaaagaggctttatcagagcggcgggatgctctgaaaacttaaaactcctgcaaactataatttggtcggccaaaagagaacacagaccactgggtgttgtattcgtggacatcgccaaggcttttgacaccgtaagccaccagcacatcattcatgctttgcagcaaagagaggtggatccccacatcgtcggtctggtgagcaatatgtacgagaacatcagtacgtatatcaccacaaagaggaacacacacacagacaaaatccagatccgggttggagtaaagcagggtgacccgatgtcgccccttttatttaacctggcaatggaccctctattatgcaagctggaagagagtggcaaaggataccaccgaggacagagcagcatcacagcgatggcatttgcagacgatctggttttgctgagcgactcctgggaaaatatgaatacaaatattagcatactggagaccttctgcaatctgaccggactcaaaacacaggggcaaaagtgccacggcttttacatcaagccgacaaagaagtcttacaccatcaatgactgcgctgcctggactatcaacggcacacccctgaacatgatcgaccccggcgaatctgagaaatacctcggcctgcagtttgacccgtggattggaatagcaaggtccggtctctccacaaaactagatttttggcttcagcggatcgatcaagcaccacttaaacctctgcagaaaactgatattctcaaaacatacaccatccctcggctgatctacatagctgaccactcagaagtgaaaagcgcactactcgaaacccttgaccagaagatccggacagcggtcaaggaatggcttcacctacctccgtgcacctgcgatgccatcctgtactcgagcacgagagacggcggtttgggcatcaccaaattggcaggactgatccccagcgtgcaggcccgtagactgcatcggatcgcacagtcatctgacgatacgatgaaatgcttcatggaaaaagagaaaatggaacagctgcataagaaattgtggattcaagctggaggggacagagagaacataccctcgatttgggaagcaccaccgtcgagtgaaccaccaaacaacgtgagcacaaattcggaatgggaagcaccgacccagaaagataaatttccaaagccttgcaattggaggaaaaacgaattcaaaaaatggaccaaattggcatcccaaggccgcggaattgtaaattttgaaagagacaaaattagtaaccattggatccaatactacagacgcatacctcacaggaaactcctcactgcactacaactcagggccaacgtttaccccacgagagaatttctagccaggggtagacaagaccaatacatcaaggcgtgtaggcactgcgatgcggacaacgaatcctgcgcccacatcatcggcaactgcccagtgacacaggacgcccgaatcaagaggcacaattacatctgcgaactgcttctcgaggaggcgaagaagaaggactgggtagtgttcaaggaaccgcacataagggattccaacaaggaactgtacaaacctgacctgatatttgtgaaggatgggcgtgcacttgtcgtggatgtgacagtacggtatgaagcagccaaatcatcgctggaggaagccgctgcagagaaagtgagaaagtacaaacacctggaaacggaagtaagacatctcacgaatgcaaaggacgttacttttgtgggctttcccctaggagcgcgggggaaatggcaccaagataactttaaacttttgactgagcttggcctctccaaatcgaggcaagtgaaaatggcaaagactttttccacagtagcgctcttttcatctgtggacattgtacatatgtttgccagtagggccagaaaatctatggttatgtgataataggctgccttctgcggggcttgccttctggccatgcccttcttctctcccttgcacctgtacctcttggtctttgaataaagcctgagtaggaaggaccggtaaaaaaaaaaaaaaaaaaaaaaaaaaaaaaacgttgactaaaaaaaaaaaaaaaaaaaaaaaaaaaaaaaaaaaaaaaaaaaaaaaaaaaaaaaaaaaaaaaaaaaaaa

SEQ ID NO: 10747 - DNA, 5264 bp, synthetic construct
  source 1..5264: mol_type = other DNA
gaaataagagagaaaagaagagtaagaagaaatataagagaattcgccaccatggcccctaagaaaaagcggaaggtgaatatcagcggctctagctgcggcagccccaacagcgccgacaccagcagcgacttcaaggacctgtggaccaagctgaaggaatgccacgaccgggaagtgcagggactccaggtgaaggtcaccaaactcaagcaagaaagaatcctggacgcccagagactggaagaattcttcaccaagaaccagcagctgagagagcagcagaaagtgctgcacgagacaatcaaggttctggaagatagactgcgggccggcctgtgcgacagatgcgccgtgaccgaggaacacatgcgcaaaaagcagcaggagttcgagaacattagacagcaaaatctgaaattgatcacagagctgatgaacgagagaaacacactgcaggaggagaacaagaagctgagcgagcagctgcaacagaagatcgagaatgatcagcaacaccaggccgctgagctggaatgtgaagaggacgtgatccccgacagcccaatcacagctttcagcttttctggcgtgaacagactgaggcggaaggaaaacccccacgtgcggtacatcgagcagacccataccaagctggaacacagcgtgtgtgccaacgagatgagaaaggtgtccaagtcctccacccatccccagcacaaccctaacgaaaatgagatcctggtggctgatacctacgaccagtctcagagccctatggccaaggcccacggcaccagctcttatacccctgataagagctccttcaacctggccaccgtggtggccgagacactgggcctgggcgtgcaggaggaaagcgagacacagggcccaatgagccctctgggagatgagctgtaccactgcctggaaggcaaccacaagaaacagccttttgagtccggctccgagactcctggaacaagcgagagcgctacacctgagggcagccctaagagaaaggtgtccagcgccgagggcgctgccaaggaagagcctaaacggagaagcgccagactgagcgccaagccccccgccaaggtggaagccaagcctaagaaggccgccgctaaggacaagagcagcgataagaaagtccagaccaagggcaagcggggcgccaaaggcaaacaggccgaggtggccaaccaggagacaaaggaagatctgcctgctgagaacggcgaaaccaagaccgaggaatctccagcttctgacgaggccggagagaaggaggccaaaagcgacagcggctctgagacacctggaacaagcgagagcgccaccccggaatcctatgaacaacttgcaccacaaccgtgtgtgggagaaactttacattctagcctcccacgagacagtgaactgtttgtgcctgaagaggggagcagcgagaaggagagcgaggacgcgccaaaaacatctcctccgacgcctgggaaacatggtttggaacagactggggaggaaaaagtgatggtgactgttcctgacaaaaatccaccttgtccttgctgtggtacccgggtaaactctgtgttgaatctgattgaacatctgaaagtgtcacacgggaaaaggggggtttgttttcggtgtgcaaaatgtggaaaggaaaatagtaactatcacagtgttgtttgtcattttaagaaatgcaggggtccagagacggagaaagccccagctggggagtggatttgtgaggtatgcaacagagattttacaaccaaaattggcctgggacaacacaagagattggcacacccagcagtgagaaatcaggaaaggatcgttgcttcccaaccgaaagaaacatcaaatagaggtgctcacaaaaggtgctggacaaaggaggaggaagaattactaataagactggaggctcagttcgagggaaacaaaaatattaataagcttattgcagaacacataaccaccaaaacagctaagcagatcagtgacaaaaggcgattgctgtccagaaagccagcagaggagccacgtgaggagcctggaacgtgtcatcacaccaggagagcagctgcgagcctgagaacggagcctgagatgagtcatcacgcccaggcagaggacagagataatggacctgggagacgccctctgccaggcagggcagctgccggagggagaacaatggacgagataagacgccaccctgataagggcaacggacagcagagacccaccaagcaaaaatcagaagaacagctgcaggcttactataaaaagacactagaggaacgactttcagctggggcacttaacaccttcccccgagcattcaagcaggtaatggaaggccgggatataaagctagtaatcaatcagacagcgcaggactgcttcggatgcctggaatccataagccaaataagaacggcaacccgagataaaaaggacacggtgacccgggagaaacacccaaagaaaccttttcagaagtggatgaagaagagagcaatcaaaaaaggtaattatcttcggttccagcgtttattttatcttgatagagggaaactggctaaaatcattttagatgatattgaatgcttgtcttgtgacataccactcagtgaaatttattcggtttttaaaacaagatgggaaacaactggtagctttaaaagccttggggactttaaaacttacgggaaggctgacaacactgccttcagagaattaattacggctaaagaaattgagaaaaatgtgagagaaatgagcaaaggctcggctcccggtccagacgggattactcttggggacgtcgtaaagatggatcccgagttttcccggaccatggagattttcaatttatggttaacaactggtaaaatcccggacatggtgagggggtgcagaaccgttttgattccaaaatcatcaaagccggatcgtttgaaagacattaataactggagacctatcacgatcggttccatcttgctgagactgttctccaggattgtaacagctaggctgagcaaagcgtgccccctgaacccaaggcaaagaggctttatcagagcggcgggatgctctgaaaacttaaaactcctgcaaactataatttggtcggccaaaagagaacacagaccactgggtgttgtattcgtggacatcgccaaggcttttgacaccgtaagccaccagcacatcattcatgctttgcagcaaagagaggtggatccccacatcgtcggtctggtgagcaatatgtacgagaacatcagtacgtatatcaccacaaagaggaacacacacacagacaaaatccagatccgggttggagtaaagcagggtgacccgatgtcgccccttttatttaacctggcaatggaccctctattatgcaagctggaagagagtggcaaaggataccaccgaggacagagcagcatcacagcgatggcatttgcagacgatctggttttgctgagcgactcctgggaaaatatgaatacaaatattagcatactggagaccttctgcaatctgaccggactcaaaacacaggggcaaaagtgccacggcttttacatcaagccgacaaagaagtcttacaccatcaatgactgcgctgcctggactatcaacggcacacccctgaacatgatcgaccccggcgaatctgagaaatacctcggcctgcagtttgacccgtggattggaatagcaaggtccggtctctccacaaaactagatttttggcttcagcggatcgatcaagcaccacttaaacctctgcagaaaactgatattctcaaaacatacaccatccctcggctgatctacatagctgaccactcagaagtgaaaagcgcactactcgaaacccttgaccagaagatccggacagcggtcaaggaatggcttcacctacctccgtgcacctgcgatgccatcctgtactcgagcacgagagacggcggtttgggcatcaccaaattggcaggactgatccccagcgtgcaggcccgtagactgcatcggatcgcacagtcatctgacgatacgatgaaatgcttcatggaaaaagagaaaatggaacagctgcataagaaattgtggattcaagctggaggggacagagagaacataccctcgatttgggaagcaccaccgtcgagtgaaccaccaaacaacgtgagcacaaattcggaatgggaagcaccgacccagaaagataaatttccaaagccttgcaattggaggaaaaacgaattcaaaaaatggaccaaattggcatcccaaggccgcggaattgtaaattttgaaagagacaaaattagtaaccattggatccaatactacagacgcatacctcacaggaaactcctcactgcactacaactcagggccaacgtttaccccacgagagaatttctagccaggggtagacaagaccaatacatcaaggcgtgtaggcactgcgatgcggacaacgaatcctgcgcccacatcatcggcaactgcccagtgacacaggacgcccgaatcaagaggcacaattacatctgcgaactgcttctcgaggaggcgaagaagaaggactgggtagtgttcaaggaaccgcacataagggattccaacaaggaactgtacaaacctgacctgatatttgtgaaggatgggcgtgcacttgtcgtggatgtgacagtacggtatgaagcagccaaatcatcgctggaggaagccgctgcagagaaagtgagaaagtacaaacacctggaaacggaagtaagacatctcacgaatgcaaaggacgttacttttgtgggctttcccctaggagcgcgggggaaatggcaccaagataactttaaacttttgactgagcttggcctctccaaatcgaggcaagtgaaaatggcagagactttttccacagtagcgctcttttcatctgtggacattgtacatatgtttgccagtagggccagaaaatctatggttatgtgataataggctgccttctgcggggcttgccttctggccatgcccttcttctctcccttgcacctgtacctcttggtctttgaataaagcctgagtaggaaggaccggtaaaaaaaaaaaaaaaaaaaaaaaaaaaaaaacgttgactaaaaaaaaaaaaaaaaaaaaaaaaaaaaaaaaaaaaaaaaaaaaaaaaaaaaaaaaaaaaaaaaaaaaaa

SEQ ID NO: 10748 - DNA, 5264 bp, synthetic construct
  source 1..5264: mol_type = other DNA
gaaataagagagaaaagaagagtaagaagaaatataagagaattcgccaccatggcccctaagaaaaagcggaaggtgaatatcagcggctctagctgcggcagccccaacagcgccgacaccagcagcgacttcaaggacctgtggaccaagctgaaggaatgccacgaccgggaagtgcagggactccaggtgaaggtcaccaaactcaagcaagaaagaatcctggacgcccagagactggaagaattcttcaccaagaaccagcagctgagagagcagcagaaagtgctgcacgagacaatcaaggttctggaagatagactgcgggccggcctgtgcgacagatgcgccgtgaccgaggaacacatgcgcaaaaagcagcaggagttcgagaacattagacagcaaaatctgaaattgatcacagagctgatgaacgagagaaacacactgcaggaggagaacaagaagctgagcgagcagctgcaacagaagatcgagaatgatcagcaacaccaggccgctgagctggaatgtgaagaggacgtgatccccgacagcccaatcacagctttcagcttttctggcgtgaacagactgaggcggaaggaaaacccccacgtgcggtacatcgagcagacccataccaagctggaacacagcgtgtgtgccaacgagatgagaaaggtgtccaagtcctccacccatccccagcacaaccctaacgaaaatgagatcctggtggctgatacctacgaccagtctcagagccctatggccaaggcccacggcaccagctcttatacccctgataagagctccttcaacctggccaccgtggtggccgagacactgggcctgggcgtgcaggaggaaagcgagacacagggcccaatgagccctctgggagatgagctgtaccactgcctggaaggcaaccacaagaaacagccttttgagtccggctccgagactcctggaacaagcgagagcgctacacctgagggcagccctaagagaaaggtgtccagcgccgagggcgctgccaaggaagagcctaaacggagaagcgccagactgagcgccaagccccccgccaaggtggaagccaagcctaagaaggccgccgctaaggacaagagcagcgataagaaagtccagaccaagggcaagcggggcgccaaaggcaaacaggccgaggtggccaaccaggagacaaaggaagatctgcctgctgagaacggcgaaaccaagaccgaggaatctccagcttctgacgaggccggagagaaggaggccaaaagcgacagcggctctgagacacctggaacaagcgagagcgccaccccggaatcctatgaacaacttgcaccacaaccgtgtgtgggagaaactttacattctagcctcccacgagacagtgaactgtttgtgcctgaagaggggagcagcgagaaggagagcgaggacgcgccaaaaacatctcctccgacgcctgggaaacatggtttggaacagactggggaggaaaaagtgatggtgactgttcctgacaaaaatccaccttgtccttgctgtggtacccgggtaaactctgtgttgaatctgattgaacatctgaaagtgtcacacgggaaaaggggggtttgttttcggtgtgcaaaatgtggaaaggaaaatagtaactatcacagtgttgtttgtcattttaagaaatgcaggggtccagagacggagaaagccccagctggggagtggatttgtgaggtatgcaacagagattttacaaccaaaattggcctgggacaacacaagagattggcacacccagcagtgagaaatcaggaaaggatcgttgcttcccaaccgaaagaaacatcaaatagaggtgctcacaaaaggtgctggacaaaggaggaggaagaattactaataagactggaggctcagttcgagggaaacaaaaatattaataagcttattgcagaacacataaccaccaaaacagctaagcagatcagtgacaaaaggcgattgctgtccagaaagccagcagaggagccacgtgaggagcctggaacgtgtcatcacaccaggagagcagctgcgagcctgagaacggagcctgagatgagtcatcacgcccaggcagaggacagagataatggacctgggagacgccctctgccaggcagggcagctgccggagggagaacaatggacgagataagacgccaccctgataagggcaacggacagcagagacccaccaagcaaaaatcagaagaacagctgcaggcttactataaaaagacactagaggaacgactttcagctggggcacttaacaccttcccccgagcattcaagcaggtaatggaaggccgggatataaagctagtaatcaatcagacagcgcaggactgcttcggatgcctggaatccataagccaaataagaacggcaacccgagataaaaaggacacggtgacccgggagaaacacccaaagaaaccttttcagaagtggatgaagaagagagcaatcaaaaaaggtaattatcttcggttccagcgtttattttatcttgatagagggaaactggctaaaatcattttagatgatattgaatgcttgtcttgtgacataccactcagtgaaatttattcggtttttaaaacaagatgggaaacaactggtagctttaaaagccttggggactttaaaacttacgggaaggctgacaacactgccttcagagaattaattacggctaaagaaattgagaaaaatgtgcaggaaatgagcaaaggctcggctcccggtccagacgggattactcttggggacgtcgtaaagatggatcccgagttttcccggaccatggagattttcaatttatggttaacaactggtaaaatcccggacatggtgagggggtgcagaaccgttttgattccaaaatcatcaaagccggatcgtttgaaagacattaataactggagacctatcacgatcggttccatcttgctgagactgttctccaggattgtaacagctaggctgagcaaagcgtgccccctgaacccaaggcaaagaggctttatcagagcggcgggatgctctgaaaacttaaaactcctgcaaactataatttggtcggccaaaagagaacacagaccactgggtgttgtattcgtggacatcgccaaggcttttgacaccgtaagccaccagcacatcattcatgctttgcagcaaagagaggtggatccccacatcgtcggtctggtgagcaatatgtacgagaacatcagtacgtatatcaccacaaagaggaacacacacacagacaaaatccagatccgggttggagtaaagcagggtgacccgatgtcgccccttttatttaacctggcaatggaccctctattatgcaagctggaagagagtggcaaaggataccaccgaggacagagcagcatcacagcgatggcatttgcagacgatctggttttgctgagcgactcctgggaaaatatgaatacaaatattagcatactggagaccttctgcaatctgaccggactcaaaacacaggggcaaaagtgccacggcttttacatcaagccgacaaagaagtcttacaccatcaatgactgcgctgcctggactatcaacggcacacccctgaacatgatcgaccccggcgaatctgagaaatacctcggcctgcagtttgacccgtggattggaatagcaaggtccggtctctccacaaaactagatttttggcttcagcggatcgatcaagcaccacttaaacctctgcagaaaactgatattctcaaaacatacaccatccctcggctgatctacatagctgaccactcagaagtgaaaagcgcactactcgaaacccttgaccagaagatccggacagcggtcaaggaatggcttcacctacctccgtgcacctgcgatgccatcctgtactcgagcacgagagacggcggtttgggcatcaccaaattggcaggactgatccccagcgtgcaggcccgtagactgcatcggatcgcacagtcatctgacgatacgatgaaatgcttcatggaaaaagagaaaatggaacagctgcataagaaattgtggattcaagctggaggggacagagagaacataccctcgatttgggaagcaccaccgtcgagtgaaccaccaaacaacgtgagcacaaattcggaatgggaagcaccgacccagaaagataaatttccaaagccttgcaattggaggaaaaacgaattcaaaaaatggaccaaattggcatcccaaggccgcggaattgtaaattttgaaagagacaaaattagtaaccattggatccaatactacagacgcatacctcacaggaaactcctcactgcactacaactcagggccaacgtttaccccacgagagaatttctagccaggggtagacaagaccaatacatcaaggcgtgtaggcactgcgatgcggacaacgaatcctgcgcccacatcatcggcaactgcccagtgacacaggacgcccgaatcaagaggcacaattacatctgcgaactgcttctcgaggaggcgaagaagaaggactgggtagtgttcaaggaaccgcacataagggattccaacaaggaactgtacaaacctgacctgatatttgtgaaggatgggcgtgcacttgtcgtggatgtgacagtacggtatgaagcagccaaatcatcgctggaggaagccgctgcagagaaagtgagaaagtacaaacacctggaaacggaagtaagacatctcacgaatgcaaaggacgttacttttgtgggctttcccctaggagcgcgggggaaatggcaccaagataactttaaacttttgactgagcttggcctctccaaatcgaggcaagtgaaaatggcagagactttttccacaagagcgctcttttcatctgtggacattgtacatatgtttgccagtagggccagaaaatctatggttatgtgataataggctgccttctgcggggcttgccttctggccatgcccttcttctctcccttgcacctgtacctcttggtctttgaataaagcctgagtaggaaggaccggtaaaaaaaaaaaaaaaaaaaaaaaaaaaaaaacgttgactaaaaaaaaaaaaaaaaaaaaaaaaaaaaaaaaaaaaaaaaaaaaaaaaaaaaaaaaaaaaaaaaaaaaaa

SEQ ID NO: 10749 - DNA, 5264 bp, synthetic construct
  source 1..5264: mol_type = other DNA
gaaataagagagaaaagaagagtaagaagaaatataagagaattcgccaccatggcccctaagaaaaagcggaaggtgaatatcagcggctctagctgcggcagccccaacagcgccgacaccagcagcgacttcaaggacctgtggaccaagctgaaggaatgccacgaccgggaagtgcagggactccaggtgaaggtcaccaaactcaagcaagaaagaatcctggacgcccagagactggaagaattcttcaccaagaaccagcagctgagagagcagcagaaagtgctgcacgagacaatcaaggttctggaagatagactgcgggccggcctgtgcgacagatgcgccgtgaccgaggaacacatgcgcaaaaagcagcaggagttcgagaacattagacagcaaaatctgaaattgatcacagagctgatgaacgagagaaacacactgcaggaggagaacaagaagctgagcgagcagctgcaacagaagatcgagaatgatcagcaacaccaggccgctgagctggaatgtgaagaggacgtgatccccgacagcccaatcacagctttcagcttttctggcgtgaacagactgaggcggaaggaaaacccccacgtgcggtacatcgagcagacccataccaagctggaacacagcgtgtgtgccaacgagatgagaaaggtgtccaagtcctccacccatccccagcacaaccctaacgaaaatgagatcctggtggctgatacctacgaccagtctcagagccctatggccaaggcccacggcaccagctcttatacccctgataagagctccttcaacctggccaccgtggtggccgagacactgggcctgggcgtgcaggaggaaagcgagacacagggcccaatgagccctctgggagatgagctgtaccactgcctggaaggcaaccacaagaaacagccttttgagtccggctccgagactcctggaacaagcgagagcgctacacctgagggcagccctaagagaaaggtgtccagcgccgagggcgctgccaaggaagagcctaaacggagaagcgccagactgagcgccaagccccccgccaaggtggaagccaagcctaagaaggccgccgctaaggacaagagcagcgataagaaagtccagaccaagggcaagcggggcgccaaaggcaaacaggccgaggtggccaaccaggagacaaaggaagatctgcctgctgagaacggcgaaaccaagaccgaggaatctccagcttctgacgaggccggagagaaggaggccaaaagcgacagcggctctgagacacctggaacaagcgagagcgccaccccggaatcctatgaacaacttgcaccacaaccgtgtgtgggagaaactttacattctagcctcccacgagacagtgaactgtttgtgcctgaagaggggagcagcgagaaggagagcgaggacgcgccaaaaacatctcctccgacgcctgggaaacatggtttggaacagactggggaggaaaaagtgatggtgactgttcctgacaaaaatccaccttgtccttgctgtggtacccgggtaaactctgtgttgaatctgattgaacatctgaaagtgtcacacgggaaaaggggggtttgttttcggtgtgcaaaatgtggaaaggaaaatagtaactatcacagtgttgtttgtcattttaagaaatgcaggggtccagagacggagaaagccccagctggggagtggatttgtgaggtatgcaacagagattttacaaccaaaattggcctgggacaacacaagagattggcacacccagcagtgagaaatcaggaaaggatcgttgcttcccaaccgaaagaaacatcaaatagaggtgctcacaaaaggtgctggacaaaggaggaggaagaattactaataagactggaggctcagttcgagggaaacaaaaatattaataagcttattgcagaacacataaccaccaaaacagctaagcagatcagtgacaaaaggcgattgctgtccagaaagccagcagaggagccacgtgaggagcctggaacgtgtcatcacaccaggagagcagctgcgagcctgagaacggagcctgagatgagtcatcacgcccaggcagaggacagagataatggacctgggagacgccctctgccaggcagggcagctgccggagggagaacaatggacgagataagacgccaccctgataagggcaacggacagcagagacccaccaagcaaaaatcagaagaacagctgcaggcttactataaaaagacactagaggaacgactttcagctggggcacttaacaccttcccccgagcattcaagcaggtaatggaaggccgggatataaagctagtaatcaatcagacagcgcaggactgcttcggatgcctggaatccataagccaaataagaacggcaacccgagataaaaaggacacggtgacccgggagaaacacccaaagaaaccttttcagaagtggatgaagaagagagcaatcaaaaaaggtaattatcttcggttccagcgtttattttatcttgatagagggaaactggctaaaatcattttagatgatattgaatgcttgtcttgtgacataccactcagtgaaatttattcggtttttaaaacaagatgggaaacaactggtagctttaaaagccttggggactttaaaacttacgggaaggctgacaacactgccttcagagaattaattacggctaaagaaattgagaaaaatgtgcaggaaatgagcaaaggctcggctcccggtccagacgggattactcttggggacgtcgtaaagatggatcccgagttttcccggaccatggagattttcaatttatggttaacaactggtaaaatcccggacatggtgagggggtgcagaaccgttttgattccaaaatcatcaaagccggatcgtttgaaagacattaataactggagacctatcacgatcggttccatcttgctgagactgttctccaggattgtaacagctaggctgagcaaagcgtgccccctgaacccaaggcaaagaggctttatcagagcggcgggatgctctgaaaacttaaaactcctgcaaactataatttggtcggccaaaagagaacacagaccactgggtgttgtattcgtggacatcgccaaggcttttgacaccgtaagccaccagcacatcattcatgctttgcagcaaagagaggtggatccccacatcgtcggtctggtgagcaatatgtacgagaacatcagtacgtatatcaccacaaagaggaacacacacacagacaaaatccagatccgggttggagtaaagcagggtgacccgatgtcgccccttttatttaacctggcaatggaccctctattatgcaagctggaagagagtggcaaaggataccaccgaggacagagcagcatcacagcgatggcatttgcagacgatctggttttgctgagcgactcctgggaaaatatgaatacaaatattagcatactggagaccttctgcaatctgaccggactcaaaacacaggggcaaaagtgccacggcttttacatcaagccgacaaagaagtcttacaccatcaatgactgcgctgcctggactatcaacggcacacccctgaacatgatcgaccccggcgaatctgagaaatacctcggcctgcagtttgacccgtggattggaatagcaaggtccggtctctccacaaaactagatttttggcttcagcggatcgatcaagcaccacttaaacctctgcagaaaactgatattctcaaaacatacaccatccctcggctgatctacatagctgaccactcagaagtgaaaagcgcactactcgaaacccttgaccagaagatccggacagcggtcaaggaatggcttcacctacctccgtgcacctgcgatgccatcctgtactcgagcacgagagacggcggtttgggcatcaccaaattggcaggactgatccccagcgtgcaggcccgtagactgcatcggatcgcacagtcatctgacgatacgatgaaatgcttcatggaaaaagagaaaatggaacagctgcataagaaattgtggattcaagctggaggggacagagagaacataccctcgatttgggaagcaccaccgtcgagtgaaccaccaaacaacgtgagcacaaattcggaatgggaagcaccgacccagaaagataaatttccaaagccttgcaattggaggaaaaacgaattcaaaaaatggaccaaattggcatcccaaggcatgggaattgtaaattttgaaagagacaaaattagtaaccattggatccaatactacagacgcatacctcacaggaaactcctcactgcactacaactcagggccaacgtttaccccacgagagaatttctagccaggggtagacaagaccaatacatcaaggcgtgtaggcactgcgatgcggacaacgaatcctgcgcccacatcatcggcaactgcccagtgacacaggacgcccgaatcaagaggcacaattacatctgcgaactgcttctcgaggaggcgaagaagaaggactgggtagtgttcaaggaaccgcacataagggattccaacaaggaactgtacaaacctgacctgatatttgtgaaggatgggcgtgcacttgtcgtggatgtgacagtacggtatgaagcagccaaatcatcgctggaggaagccgctgcagagaaagtgagaaagtacaaacacctggaaacggaagtaagacatctcacgaatgcaaaggacgttacttttgtgggctttcccctaggagcgcgggggaaatggcaccaagataactttaaacttttgactgagcttggcctctccaaatcgaggcaagtgaaaatggcagagactttttccacagtagcgctcttttcatctgtggacattgtacatatgtttgccagtagggccagaaaatctatggttatgtgataataggctgccttctgcggggcttgccttctggccatgcccttcttctctcccttgcacctgtacctcttggtctttgaataaagcctgagtaggaaggaccggtaaaaaaaaaaaaaaaaaaaaaaaaaaaaaaacgttgactaaaaaaaaaaaaaaaaaaaaaaaaaaaaaaaaaaaaaaaaaaaaaaaaaaaaaaaaaaaaaaaaaaaaaa

SEQ ID NO: 10750 - DNA, 5264 bp, synthetic construct
  source 1..5264: mol_type = other DNA
gaaataagagagaaaagaagagtaagaagaaatataagagaattcgccaccatggcccctaagaaaaagcggaaggtgaatatcagcggctctagctgcggcagccccaacagcgccgacaccagcagcgacttcaaggacctgtggaccaagctgaaggaatgccacgaccgggaagtgcagggactccaggtgaaggtcaccaaactcaagcaagaaagaatcctggacgcccagagactggaagaattcttcaccaagaaccagcagctgagagagcagcagaaagtgctgcacgagacaatcaaggttctggaagatagactgcgggccggcctgtgcgacagatgcgccgtgaccgaggaacacatgcgcaaaaagcagcaggagttcgagaacattagacagcaaaatctgaaattgatcacagagctgatgaacgagagaaacacactgcaggaggagaacaagaagctgagcgagcagctgcaacagaagatcgagaatgatcagcaacaccaggccgctgagctggaatgtgaagaggacgtgatccccgacagcccaatcacagctttcagcttttctggcgtgaacagactgaggcggaaggaaaacccccacgtgcggtacatcgagcagacccataccaagctggaacacagcgtgtgtgccaacgagatgagaaaggtgtccaagtcctccacccatccccagcacaaccctaacgaaaatgagatcctggtggctgatacctacgaccagtctcagagccctatggccaaggcccacggcaccagctcttatacccctgataagagctccttcaacctggccaccgtggtggccgagacactgggcctgggcgtgcaggaggaaagcgagacacagggcccaatgagccctctgggagatgagctgtaccactgcctggaaggcaaccacaagaaacagccttttgagtccggctccgagactcctggaacaagcgagagcgctacacctgagggcagccctaagagaaaggtgtccagcgccgagggcgctgccaaggaagagcctaaacggagaagcgccagactgagcgccaagccccccgccaaggtggaagccaagcctaagaaggccgccgctaaggacaagagcagcgataagaaagtccagaccaagggcaagcggggcgccaaaggcaaacaggccgaggtggccaaccaggagacaaaggaagatctgcctgctgagaacggcgaaaccaagaccgaggaatctccagcttctgacgaggccggagagaaggaggccaaaagcgacagcggctctgagacacctggaacaagcgagagcgccaccccggaatcctatgaacaacttgcaccacaaccgtgtgtgggagaaactttacattctagcctcccacgagacagtgaactgtttgtgcctgaagaggggagcagcgagaaggagagcgaggacgcgccaaaaacatctcctccgacgcctgggaaacatggtttggaacagactggggaggaaaaagtgatggtgactgttcctgacaaaaatccaccttgtccttgctgtggtacccgggtaaactctgtgttgaatctgattgaacatctgaaagtgtcacacgggaaaaggggggtttgttttcggtgtgcaaaatgtggaaaggaaaatagtaactatcacagtgttgtttgtcattttaagaaatgcaggggtccagagacggagaaagccccagctggggagtggatttgtgaggtatgcaacagagattttacaaccaaaattggcctgggacaacacaagagattggcacacccagcagtgagaaatcaggaaaggatcgttgcttcccaaccgaaagaaacatcaaatagaggtgctcacaaaaggtgctggacaaaggaggaggaagaattactaataagactggaggctcagttcgagggaaacaaaaatattaataagcttattgcagaacacataaccaccaaaacagctaagcagatcagtgacaaaaggcgattgctgtccagaaagccagcagaggagccacgtgaggagcctggaacgtgtcatcacaccaggagagcagctgcgagcctgagaacggagcctgagatgagtcatcacgcccaggcagaggacagagataatggacctgggagacgccctctgccaggcagggcagctgccggagggagaacaatggacgagataagacgccaccctgataagggcaacggacagcagagacccaccaagcaaaaatcagaagaacagctgcaggcttactataaaaagacactagaggaacgactttcagctggggcacttaacaccttcccccgagcattcaagcaggtaatggaaggccgggatataaagctagtaatcaatcagacagcgcaggactgcttcggatgcctggaatccataagccaaataagaacggcaacccgagataaaaaggacacggtgacccgggagaaacacccaaagaaaccttttcagaagtggatgaagaagagagcaatcaaaaaaggtaattatcttcggttccagcgtttattttatcttgatagagggaaactggctaaaatcattttagatgatattgaatgcttgtcttgtgacataccactcagtgaaatttattcggtttttaaaacaagatgggaaacaactggtagctttaaaagccttggggactttaaaacttacgggaaggctgacaacactgccttcagagaattaattacggctaaagaaattgagaaaaatgtgcaggaaatgagcaaaggctcggctcccggtccagacgggattactcttggggacgtcgtaaagatggatcccgagttttcccggaccatggagattttcaatttatggttaacaactggtaaaatcccggacatggtgagggggtgcagaaccgttttgattccaaaatcatcaaagccggatcgtttgaaagacattaataactggagacctatcacgatcggttccatcttgctgagactgttctccaggattgtaacagctaggctgagcaaagcgtgccccctgaacccaaggcaaagaggctttatcagagcggcgggatgctctgaaaacttaaaactcctgcaaactataatttggtcggccaaaagagaacacagaccactgggtgttgtattcgtggacatcgccaaggcttttgacaccgtaagccaccagcacatcattcatgctttgcagcaaagagaggtggatccccacatcgtcggtctggtgagcaatatgtacgagaacatcagtacgtatatcaccacaaagaggaacacacacacagacaaaatccagatccgggttggagtaaagcagggtgacccgatgtcgccccttttatttaacctggcaatggaccctctattatgcaagctggaagagagtggcaaaggataccaccgaggacagagcagcatcacagcgatggcatttgcagacgatctggttttgctgagcgactcctgggaaaatatgaatacaaatattagcatactggagaccttctgcaatctgaccggactcaaaacacaggggcaaaagtgccacggcttttacatcaagccgacaaagaagtcttacaccatcaatgactgcgctgcctggactatcaacggcacacccctgaacatgatcgaccccggcgaatctgagaaatacctcggcctgcagtttgacccgtggattggaatagcaaggtccggtctctccacaaaactagatttttggcttcagcggatcgatcaagcaccacttaaacctctgcagaaaactgatattctcaaaacatacaccatccctcggctgatctacatagctgaccactcagaagtgaaaagcgcactactcgaaacccttgaccagaagatccggacagcggtcaaggaatggcttcacctacctccgtgcacctgcgatgccatcctgtactcgagcacgagagacggcggtttgggcatcaccaaattggcaggactgatccccagcgtgcaggcccgtagactgcatcggatcgcacagtcatctgacgatacgatgaaatgcttcatggaaaaagagaaaatggaacagctgcataagaaattgtggattcaagctggaggggacagagagaacataccctcgatttgggaagcaccaccgtcgagtgaaccaccaaacaacgtgagcacaaagtcggaatgggaagcaccgacccagaaagataaatttccaaagccttgcaattggaggaaaaacgaattcaaaaaatggaccaaattggcatcccaaggccgcggaattgtaaattttgaaagagacaaaattagtaaccattggatccaatactacagacgcatacctcacaggaaactcctcactgcactacaactcagggccaacgtttaccccacgagagaatttctagccaggggtagacaagaccaatacatcaaggcgtgtaggcactgcgatgcggacaacgaatcctgcgcccacatcatcggcaactgcccagtgacacaggacgcccgaatcaagaggcacaattacatctgcgaactgcttctcgaggaggcgaagaagaaggactgggtagtgttcaaggaaccgcacataagggattccaacaaggaactgtacaaacctgacctgatatttgtgaaggatgggcgtgcacttgtcgtggatgtgacagtacggtatgaagcagccaaatcatcgctggaggaagccgctgcagagaaagtgagaaagtacaaacacctggaaacggaagtaagacatctcacgaatgcaaaggacgttacttttgtgggctttcccctaggagcgcgggggaaatggcaccaagataactttaaacttttgactgagcttggcctctccaaatcgaggcaagtgaaaatggcagagactttttccacagtagcgctcttttcatctgtggacattgtacatatgtttgccagtagggccagaaaatctatggttatgtgataataggctgccttctgcggggcttgccttctggccatgcccttcttctctcccttgcacctgtacctcttggtctttgaataaagcctgagtaggaaggaccggtaaaaaaaaaaaaaaaaaaaaaaaaaaaaaaacgttgactaaaaaaaaaaaaaaaaaaaaaaaaaaaaaaaaaaaaaaaaaaaaaaaaaaaaaaaaaaaaaaaaaaaaaa

SEQ ID NO: 10751 - DNA, 5264 bp, synthetic construct
  source 1..5264: mol_type = other DNA
gaaataagagagaaaagaagagtaagaagaaatataagagaattcgccaccatggcccctaagaaaaagcggaaggtgaatatcagcggctctagctgcggcagccccaacagcgccgacaccagcagcgacttcaaggacctgtggaccaagctgaaggaatgccacgaccgggaagtgcagggactccaggtgaaggtcaccaaactcaagcaagaaagaatcctggacgcccagagactggaagaattcttcaccaagaaccagcagctgagagagcagcagaaagtgctgcacgagacaatcaaggttctggaagatagactgcgggccggcctgtgcgacagatgcgccgtgaccgaggaacacatgcgcaaaaagcagcaggagttcgagaacattagacagcaaaatctgaaattgatcacagagctgatgaacgagagaaacacactgcaggaggagaacaagaagctgagcgagcagctgcaacagaagatcgagaatgatcagcaacaccaggccgctgagctggaatgtgaagaggacgtgatccccgacagcccaatcacagctttcagcttttctggcgtgaacagactgaggcggaaggaaaacccccacgtgcggtacatcgagcagacccataccaagctggaacacagcgtgtgtgccaacgagatgagaaaggtgtccaagtcctccacccatccccagcacaaccctaacgaaaatgagatcctggtggctgatacctacgaccagtctcagagccctatggccaaggcccacggcaccagctcttatacccctgataagagctccttcaacctggccaccgtggtggccgagacactgggcctgggcgtgcaggaggaaagcgagacacagggcccaatgagccctctgggagatgagctgtaccactgcctggaaggcaaccacaagaaacagccttttgagtccggctccgagactcctggaacaagcgagagcgctacacctgagggcagccctaagagaaaggtgtccagcgccgagggcgctgccaaggaagagcctaaacggagaagcgccagactgagcgccaagccccccgccaaggtggaagccaagcctaagaaggccgccgctaaggacaagagcagcgataagaaagtccagaccaagggcaagcggggcgccaaaggcaaacaggccgaggtggccaaccaggagacaaaggaagatctgcctgctgagaacggcgaaaccaagaccgaggaatctccagcttctgacgaggccggagagaaggaggccaaaagcgacagcggctctgagacacctggaacaagcgagagcgccaccccggaatcctatgaacaacttgcaccacaaccgtgtgtgggagaaactttacattctagcctcccacgagacagtgaactgtttgtgcctgaagaggggagcagcgagaaggagagcgaggacgcgccaaaaacatctcctccgacgcctgggaaacatggtttggaacagactggggaggaaaaagtgatggtgactgttcctgacaaaaatccaccttgtccttgctgtggtacccgggtaaactctgtgttgaatctgattgaacatctgaaagtgtcacacgggaaaaggggggtttgttttcggtgtgcaaaatgtggaaaggaaaatagtaactatcacagtgttgtttgtcattttaagaaatgcaggggtccagagacggagaaagccccagctggggagtggatttgtgaggtatgcaacagagattttacaaccaaaattggcctgggacaacacaagagattggcacacccagcagtgagaaatcaggaaaggatcgttgcttcccaaccgaaagaaacatcaaatagaggtgctcacaaaaggtgctggacaaaggaggaggaagaattactaataagactggaggctcagttcgagggaaacaaaaatattaataagcttattgcagaacacataaccaccaaaacagctaagcagatcagtgacaaaaggcgattgctgtccagaaagccagcagaggagccacgtgaggagcctggaacgtgtcatcacaccaggagagcagctgcgagcctgagaacggagcctgagatgagtcatcacgcccaggcagaggacagagataatggacctgggagacgccctctgccaggcagggcagctgccggagggagaacaatggacgagataagacgccaccctgataagggcaacggacagcagagacccaccaagcaaaaatcagaagaacagctgcaggcttactataaaaagacactagaggaacgactttcagctggggcacttaacaccttcccccgagcattcaagcaggtaatggaaggccgggatataaagctagtaatcaatcagacagcgcaggactgcttcggatgcctggaatccataagccaaataagaacggcaacccgagataaaaaggacacggtgacccgggagaaacacccaaagaaaccttttcagaagtggatgaagaagagagcaatcaaaaaaggtaattatcttcggttccagcgtttattttatcttgatagagggaaactggctaaaatcattttagatgatattgaatgcttgtcttgtgacataccactcagtgaaatttattcggtttttaaaacaagatgggaaacaactggtagctttaaaagccttggggactttaaaacttacgggaaggctgacaacactgccttcagagaattaattacggctaaagaaattgagaaaaatgtgcaggaaatgagcaaaggctcggctcccggtccagacgggattactcttggggacgtcgtaaagatggatcccgagttttcccggaccatggagattttcaatttatggttaacaactggtaaaatcccggacatggtgagggggtgcagaaccgttttgattccaaaatcatcaaagccggatcgtttgaaagacattaataactggagacctatcacgatcggttccatcttgctgagactgttctccaggattgtaacagctaggctgagcaaagcgtgccccctgaacccaaggcaaagaggctttatcagagcggcgggatgctctgaaaacttaaaactcctgcaaactataatttggtcggccaaaagagaacacagaccactgggtgttgtattcgtggacatcgccaaggcttttgacaccgtaagccaccagcacatcattcatgctttgcagcaaagagaggtggatccccacatcgtcggtctggtgagcaatatgtacgagaacatcagtacgtatatcaccacaaagaggaacacacacacagacaaaatccagatccgggttggagtaaagcagggtgacccgatgtcgccccttttatttaacctggcaatggaccctctattatgcaagctggaagagagtggcaaaggataccaccgaggacagagcagcatcacagcgatggcatttgcagacgatctggttttgctgagcgactcctgggaaaatatgaatacaaatattagcatactggagaccttctgcaatctgaccggactcaaaacacaggggcaaaagtgccacggcttttacatcaagccgacaaagaagtcttacaccatcaatgactgcgctgcctggactatcaacggcacacccctgaacatgatcgaccccggcgaatctgagaaatacctcggcctgcagtttgacccgtggattggaatagcaaggtccggtctctccacaaaactagatttttggcttcagcggatcgatcaagcaccacttaaacctctgcagaaaactgatattctcaaaacatacaccatccctcggctgatctacatagctgaccactcagaagtgaaaagcgcactactcgaaacccttgaccagaagatccggacagcggtcaaggaatggcttcacctacctccgtgcacctgcgatgccatcctgtactcgagcacgagagacggcggtttgggcatcaccaaattggcaggactgatccccagcgtgcaggcccgtagactgcatcggatcgcacagtcatctgacgatacgatgaaatgcttcatggaaaaagagaaaatggaacagctgcataagaaattgtggattcaagctggaggggacagagagaacataccctcgatttgggaagcaccaccgtcgagtgaggacccaaacaacgtgagcacaaattcggaatgggaagcaccgacccagaaagataaatttccaaagccttgcaattggaggaaaaacgaattcaaaaaatggaccaaattggcatcccaaggccgcggaattgtaaattttgaaagagacaaaattagtaaccattggatccaatactacagacgcatacctcacaggaaactcctcactgcactacaactcagggccaacgtttaccccacgagagaatttctagccaggggtagacaagaccaatacatcaaggcgtgtaggcactgcgatgcggacaacgaatcctgcgcccacatcatcggcaactgcccagtgacacaggacgcccgaatcaagaggcacaattacatctgcgaactgcttctcgaggaggcgaagaagaaggactgggtagtgttcaaggaaccgcacataagggattccaacaaggaactgtacaaacctgacctgatatttgtgaaggatgggcgtgcacttgtcgtggatgtgacagtacggtatgaagcagccaaatcatcgctggaggaagccgctgcagagaaagtgagaaagtacaaacacctggaaacggaagtaagacatctcacgaatgcaaaggacgttacttttgtgggctttcccctaggagcgcgggggaaatggcaccaagataactttaaacttttgactgagcttggcctctccaaatcgaggcaagtgaaaatggcagagactttttccacagtagcgctcttttcatctgtggacattgtacatatgtttgccagtagggccagaaaatctatggttatgtgataataggctgccttctgcggggcttgccttctggccatgcccttcttctctcccttgcacctgtacctcttggtctttgaataaagcctgagtaggaaggaccggtaaaaaaaaaaaaaaaaaaaaaaaaaaaaaaacgttgactaaaaaaaaaaaaaaaaaaaaaaaaaaaaaaaaaaaaaaaaaaaaaaaaaaaaaaaaaaaaaaaaaaaaaa

SEQ ID NO: 10752 - DNA, 5264 bp, synthetic construct
  source 1..5264: mol_type = other DNA
gaaataagagagaaaagaagagtaagaagaaatataagagaattcgccaccatggcccctaagaaaaagcggaaggtgaatatcagcggctctagctgcggcagccccaacagcgccgacaccagcagcgacttcaaggacctgtggaccaagctgaaggaatgccacgaccgggaagtgcagggactccaggtgaaggtcaccaaactcaagcaagaaagaatcctggacgcccagagactggaagaattcttcaccaagaaccagcagctgagagagcagcagaaagtgctgcacgagacaatcaaggttctggaagatagactgcgggccggcctgtgcgacagatgcgccgtgaccgaggaacacatgcgcaaaaagcagcaggagttcgagaacattagacagcaaaatctgaaattgatcacagagctgatgaacgagagaaacacactgcaggaggagaacaagaagctgagcgagcagctgcaacagaagatcgagaatgatcagcaacaccaggccgctgagctggaatgtgaagaggacgtgatccccgacagcccaatcacagctttcagcttttctggcgtgaacagactgaggcggaaggaaaacccccacgtgcggtacatcgagcagacccataccaagctggaacacagcgtgtgtgccaacgagatgagaaaggtgtccaagtcctccacccatccccagcacaaccctaacgaaaatgagatcctggtggctgatacctacgaccagtctcagagccctatggccaaggcccacggcaccagctcttatacccctgataagagctccttcaacctggccaccgtggtggccgagacactgggcctgggcgtgcaggaggaaagcgagacacagggcccaatgagccctctgggagatgagctgtaccactgcctggaaggcaaccacaagaaacagccttttgagtccggctccgagactcctggaacaagcgagagcgctacacctgagggcagccctaagagaaaggtgtccagcgccgagggcgctgccaaggaagagcctaaacggagaagcgccagactgagcgccaagccccccgccaaggtggaagccaagcctaagaaggccgccgctaaggacaagagcagcgataagaaagtccagaccaagggcaagcggggcgccaaaggcaaacaggccgaggtggccaaccaggagacaaaggaagatctgcctgctgagaacggcgaaaccaagaccgaggaatctccagcttctgacgaggccggagagaaggaggccaaaagcgacagcggctctgagacacctggaacaagcgagagcgccaccccggaatcctatgaacaacttgcaccacaaccgtgtgtgggagaaactttacattctagcctcccacgagacagtgaactgtttgtgcctgaagaggggagcagcgagaaggagagcgaggacgcgccaaaaacatctcctccgacgcctgggaaacatggtttggaacagactggggaggaaaaagtgatggtgactgttcctgacaaaaatccaccttgtccttgctgtggtacccgggtaaactctgtgttgaatctgattgaacatctgaaagtgtcacacgggaaaaggggggtttgttttcggtgtgcaaaatgtggaaaggaaaatagtaactatcacagtgttgtttgtcattttaagaaatgcaggggtccagagacggagaaagccccagctggggagtggatttgtgaggtatgcaacagagattttacaaccaaaattggcctgggacaacacaagagattggcacacccagcagtgagaaatcaggaaaggatcgttgcttcccaaccgaaagaaacatcaaatagaggtgctcacaaaaggtgctggacaaaggaggaggaagaattactaataagactggaggctcagttcgagggaaacaaaaatattaataagcttattgcagaacacataaccaccaaaacagctaagcagatcagtgacaaaaggcgattgctgtccagaaagccagcagaggagccacgtgaggagcctggaacgtgtcatcacaccaggagagcagctgcgagcctgagaacggagcctgagatgagtcatcacgcccaggcagaggacagagataatggacctgggagacgccctctgccaggcagggcagctgccggagggagaacaatggacgagataagacgccaccctgataagggcaacggacagcagagacccaccaagcaaaaatcagaagaacagctgcaggcttactataaaaagacactagaggaacgactttcagctggggcacttaacaccttcccccgagcattcaagcaggtaatggaaggccgggatataaagctagtaatcaatcagacagcgcaggactgcttcggatgcctggaatccataagccaaataagaacggcaacccgagataaaaaggacacggtgacccgggagaaacacccaaagaaaccttttcagaagtggatgaagaagagagcaatcaaaaaaggtaattatcttcggttccagcgtttattttatcttgatagagggaaactggctaaaatcattttagatgatattgaatgcttgtcttgtgacataccactcagtgaaatttattcggtttttaaaacaagatgggaaacaactggtagctttaaaagccttggggactttaaaacttacgggaaggctgacaacactgccttcagagaattaattacggctaaagaaattgagaaaaatgtgcaggaaatgagcaaaggctcggctcccggtccagacgggattactcttggggacgtcgtaaagatggatcccgagttttcccggaccatggagattttcaatttatggttaacaactggtaaaatcccggacatggtgagggggtgcagaaccgttttgattccaaaatcatcaaagccggatcgtttgaaagacattaataactggagacctatcacgatcggttccatcttgctgagactgttctccaggattgtaacagctaggctgagcaaagcgtgccccctgaacccaaggcaaagaggctttatcagagcggcgggatgctctgaaaacttaaaactcctgcaaactataatttggtcggccaaaagagaacacagaccactgggtgttgtattcgtggacatcgccaaggcttttgacaccgtaagccaccagcacatcattcatgctttgcagcaaagagaggtggatccccacatcgtcggtctggtgagcaatatgtacgagaacatcagtacgtatatcaccacaaagaggaacacacacacagacaaaatccagatccgggttggagtaaagcagggtgacccgatgtcgccccttttatttaacctggcaatggaccctctattatgcaagctggaagagagtggcaaaggataccaccgaggacagagcagcatcacagcgatggcatttgcagacgccctggttttgctgagcgactcctgggaaaatatgaatacaaatattagcatactggagaccttctgcaatctgaccggactcaaaacacaggggcaaaagtgccacggcttttacatcaagccgacaaagaagtcttacaccatcaatgactgcgctgcctggactatcaacggcacacccctgaacatgatcgaccccggcgaatctgagaaatacctcggcctgcagtttgacccgtggattggaatagcaaggtccggtctctccacaaaactagatttttggcttcagcggatcgatcaagcaccacttaaacctctgcagaaaactgatattctcaaaacatacaccatccctcggctgatctacatagctgaccactcagaagtgaaaagcgcactactcgaaacccttgaccagaagatccggacagcggtcaaggaatggcttcacctacctccgtgcacctgcgatgccatcctgtactcgagcacgagagacggcggtttgggcatcaccaaattggcaggactgatccccagcgtgcaggcccgtagactgcatcggatcgcacagtcatctgacgatacgatgaaatgcttcatggaaaaagagaaaatggaacagctgcataagaaattgtggattcaagctggaggggacagagagaacataccctcgatttgggaagcaccaccgtcgagtgaaccaccaaacaacgtgagcacaaattcggaatgggaagcaccgacccagaaagataaatttccaaagccttgcaattggaggaaaaacgaattcaaaaaatggaccaaattggcatcccaaggccgcggaattgtaaattttgaaagagacaaaattagtaaccattggatccaatactacagacgcatacctcacaggaaactcctcactgcactacaactcagggccaacgtttaccccacgagagaatttctagccaggggtagacaagaccaatacatcaaggcgtgtaggcactgcgatgcggacaacgaatcctgcgcccacatcatcggcaactgcccagtgacacaggacgcccgaatcaagaggcacaattacatctgcgaactgcttctcgaggaggcgaagaagaaggactgggtagtgttcaaggaaccgcacataagggattccaacaaggaactgtacaaacctgacctgatatttgtgaaggatgggcgtgcacttgtcgtggatgtgacagtacggtatgaagcagccaaatcatcgctggaggaagccgctgcagagaaagtgagaaagtacaaacacctggaaacggaagtaagacatctcacgaatgcaaaggacgttacttttgtgggctttcccctaggagcgcgggggaaatggcaccaagataactttaaacttttgactgagcttggcctctccaaatcgaggcaagtgaaaatggcagagactttttccacagtagcgctcttttcatctgtggacattgtacatatgtttgccagtagggccagaaaatctatggttatgtgataataggctgccttctgcggggcttgccttctggccatgcccttcttctctcccttgcacctgtacctcttggtctttgaataaagcctgagtaggaaggaccggtaaaaaaaaaaaaaaaaaaaaaaaaaaaaaaacgttgactaaaaaaaaaaaaaaaaaaaaaaaaaaaaaaaaaaaaaaaaaaaaaaaaaaaaaaaaaaaaaaaaaaaaaa

SEQ ID NO: 10753 - DNA, 5264 bp, synthetic construct
  source 1..5264: mol_type = other DNA
gaaataagagagaaaagaagagtaagaagaaatataagagaattcgccaccatggcccctaagaaaaagcggaaggtgaatatcagcggctctagctgcggcagccccaacagcgccgacaccagcagcgacttcaaggacctgtggaccaagctgaaggaatgccacgaccgggaagtgcagggactccaggtgaaggtcaccaaactcaagcaagaaagaatcctggacgcccagagactggaagaattcttcaccaagaaccagcagctgagagagcagcagaaagtgctgcacgagacaatcaaggttctggaagatagactgcgggccggcctgtgcgacagatgcgccgtgaccgaggaacacatgcgcaaaaagcagcaggagttcgagaacattagacagcaaaatctgaaattgatcacagagctgatgaacgagagaaacacactgcaggaggagaacaagaagctgagcgagcagctgcaacagaagatcgagaatgatcagcaacaccaggccgctgagctggaatgtgaagaggacgtgatccccgacagcccaatcacagctttcagcttttctggcgtgaacagactgaggcggaaggaaaacccccacgtgcggtacatcgagcagacccataccaagctggaacacagcgtgtgtgccaacgagatgagaaaggtgtccaagtcctccacccatccccagcacaaccctaacgaaaatgagatcctggtggctgatacctacgaccagtctcagagccctatggccaaggcccacggcaccagctcttatacccctgataagagctccttcaacctggccaccgtggtggccgagacactgggcctgggcgtgcaggaggaaagcgagacacagggcccaatgagccctctgggagatgagctgtaccactgcctggaaggcaaccacaagaaacagccttttgagtccggctccgagactcctggaacaagcgagagcgctacacctgagggcagccctaagagaaaggtgtccagcgccgagggcgctgccaaggaagagcctaaacggagaagcgccagactgagcgccaagccccccgccaaggtggaagccaagcctaagaaggccgccgctaaggacaagagcagcgataagaaagtccagaccaagggcaagcggggcgccaaaggcaaacaggccgaggtggccaaccaggagacaaaggaagatctgcctgctgagaacggcgaaaccaagaccgaggaatctccagcttctgacgaggccggagagaaggaggccaaaagcgacagcggctctgagacacctggaacaagcgagagcgccaccccggaatcctatgaacaacttgcaccacaaccgtgtgtgggagaaactttacattctagcctcccacgagacagtgaactgtttgtgcctgaagaggggagcagcgagaaggagagcgaggacgcgccaaaaacatctcctccgacgcctgggaaacatggtttggaacagactggggaggaaaaagtgatggtgactgttcctgacaaaaatccaccttgtccttgctgtggtacccgggtaaactctgtgttgaatctgattgaacatctgaaagtgtcacacgggaaaaggggggtttgttttcggtgtgcaaaatgtggaaaggaaaatagtaactatcacagtgttgtttgtcattttaagaaatgcaggggtccagagacggagaaagccccagctggggagtggatttgtgaggtatgcaacagagattttacaaccaaaattggcctgggacaacacaagagattggcacacccagcagtgagaaatcaggaaaggatcgttgcttcccaaccgaaagaaacatcaaatagaggtgctcacaaaaggtgctggacaaaggaggaggaagaattactaataagactggaggctcagttcgagggaaacaaaaatattaataagcttattgcagaacacataaccaccaaaacagctaagcagatcagtgacaaaaggcgattgctgtccagaaagccagcagaggagccacgtgaggagcctggaacgtgtcatcacaccaggagagcagctgcgagcctgagaacggagcctgagatgagtcatcacgcccaggcagaggacagagataatggacctgggagacgccctctgccaggcagggcagctgccggagggagaacaatggacgagataagacgccaccctgataagggcaacggacagcagagacccaccaagcaaaaatcagaagaacagctgcaggcttactataaaaagacactagaggaacgactttcagctggggcacttaacaccttcccccgagcattcaagcaggtaatggaaggccgggatataaagctagtaatcaatcagacagcgcaggactgcttcggatgcctggaatccataagccaaataagaacggcaacccgagataaaaaggacacggtgacccgggagaaacacccaaagaaaccttttcagaagtggatgaagaagagagcaatcaaaaaaggtaattatcttcggttccagcgtttattttatcttgatagagggaaactggctaaaatcattttagatgatattgaatgcttgtcttgtgacataccactcagtgaaatttattcggtttttaaaacaagatgggaaacaactggtagctttaaaagccttggggactttaaaacttacgggaaggctgacaacactgccttcagagaattaattacggctaaagaaattgagaaaaatgtgcaggaaatgagcaaaggctcggctcccggtccagacgggattactcttggggacgtcgtaaagatggatcccgagttttcccggaccatggagattttcaatttatggttaacaactggtaaaatcccggacatggtgagggggtgcagaaccgttttgattccaaaatcatcaaagccggatcgtttgaaagacattaataactggagacctatcacgatcggttccatcttgctgagactgttctccaggattgtaacagctaggctgagcaaagcgtgccccctgaacccaaggcaaagaggctttatcagagcggcgggatgctctgaaaacttaaaactcctgcaaactataatttggtcggccaaaagagaacacagaccactgggtgttgtattcgtggacatcgccaaggcttttgacaccgtaagccaccagcacatcattcatgctttgcagcaaagagaggtggatccccacatcgtcggtctggtgagcaatatgtacgagaacatcagtacgtatatcaccacaaagaggaacacacacacagacaaaatccagatccgggttggagtaaagcagggtgacccgatgtcgccccttttatttaacctggcaatggaccctctattatgcaagctggaagagagtggcaaaggataccaccgaggacagagcagcatcacagcgatggcatttgcagacgatctggttttgctgagcgactcctgggaaaatatgaatacaaatattagcatactggagaccttctgcaatctgaccggactcaaaacacaggggcaaaagtgccacggcttttacatcaagccgacaaagaagtcttacaccatcaatgactgcgctgcctggactatcaacggcacacccctgaacatgatcgaccccggcgaatctgagaaatacctcggcctgcagtttgacccgtggattggaatagcaaggtccggtctctccacaaaactagatttttggcttcagcggatcgatcaagcaccacttaaacctctgcagaaaactgatattctcaaaacatacaccatccaccggctgatctacatagctgaccactcagaagtgaaaagcgcactactcgaaacccttgaccagaagatccggacagcggtcaaggaatggcttcacctacctccgtgcacctgcgatgccatcctgtactcgagcacgagagacggcggtttgggcatcaccaaattggcaggactgatccccagcgtgcaggcccgtagactgcatcggatcgcacagtcatctgacgatacgatgaaatgcttcatggaaaaagagaaaatggaacagctgcataagaaattgtggattcaagctggaggggacagagagaacataccctcgatttgggaagcaccaccgtcgagtgaaccaccaaacaacgtgagcacaaattcggaatgggaagcaccgacccagaaagataaatttccaaagccttgcaattggaggaaaaacgaattcaaaaaatggaccaaattggcatcccaaggccgcggaattgtaaattttgaaagagacaaaattagtaaccattggatccaatactacagacgcatacctcacaggaaactcctcactgcactacaactcagggccaacgtttaccccacgagagaatttctagccaggggtagacaagaccaatacatcaaggcgtgtaggcactgcgatgcggacaacgaatcctgcgcccacatcatcggcaactgcccagtgacacaggacgcccgaatcaagaggcacaattacatctgcgaactgcttctcgaggaggcgaagaagaaggactgggtagtgttcaaggaaccgcacataagggattccaacaaggaactgtacaaacctgacctgatatttgtgaaggatgggcgtgcacttgtcgtggatgtgacagtacggtatgaagcagccaaatcatcgctggaggaagccgctgcagagaaagtgagaaagtacaaacacctggaaacggaagtaagacatctcacgaatgcaaaggacgttacttttgtgggctttcccctaggagcgcgggggaaatggcaccaagataactttaaacttttgactgagcttggcctctccaaatcgaggcaagtgaaaatggcagagactttttccacagtagcgctcttttcatctgtggacattgtacatatgtttgccagtagggccagaaaatctatggttatgtgataataggctgccttctgcggggcttgccttctggccatgcccttcttctctcccttgcacctgtacctcttggtctttgaataaagcctgagtaggaaggaccggtaaaaaaaaaaaaaaaaaaaaaaaaaaaaaaacgttgactaaaaaaaaaaaaaaaaaaaaaaaaaaaaaaaaaaaaaaaaaaaaaaaaaaaaaaaaaaaaaaaaaaaaaa

SEQ ID NO: 10754 - DNA, 5264 bp, synthetic construct
  source 1..5264: mol_type = other DNA
gaaataagagagaaaagaagagtaagaagaaatataagagaattcgccaccatggcccctaagaaaaagcggaaggtgaatatcagcggctctagctgcggcagccccaacagcgccgacaccagcagcgacttcaaggacctgtggaccaagctgaaggaatgccacgaccgggaagtgcagggactccaggtgaaggtcaccaaactcaagcaagaaagaatcctggacgcccagagactggaagaattcttcaccaagaaccagcagctgagagagcagcagaaagtgctgcacgagacaatcaaggttctggaagatagactgcgggccggcctgtgcgacagatgcgccgtgaccgaggaacacatgcgcaaaaagcagcaggagttcgagaacattagacagcaaaatctgaaattgatcacagagctgatgaacgagagaaacacactgcaggaggagaacaagaagctgagcgagcagctgcaacagaagatcgagaatgatcagcaacaccaggccgctgagctggaatgtgaagaggacgtgatccccgacagcccaatcacagctttcagcttttctggcgtgaacagactgaggcggaaggaaaacccccacgtgcggtacatcgagcagacccataccaagctggaacacagcgtgtgtgccaacgagatgagaaaggtgtccaagtcctccacccatccccagcacaaccctaacgaaaatgagatcctggtggctgatacctacgaccagtctcagagccctatggccaaggcccacggcaccagctcttatacccctgataagagctccttcaacctggccaccgtggtggccgagacactgggcctgggcgtgcaggaggaaagcgagacacagggcccaatgagccctctgggagatgagctgtaccactgcctggaaggcaaccacaagaaacagccttttgagtccggctccgagactcctggaacaagcgagagcgctacacctgagggcagccctaagagaaaggtgtccagcgccgagggcgctgccaaggaagagcctaaacggagaagcgccagactgagcgccaagccccccgccaaggtggaagccaagcctaagaaggccgccgctaaggacaagagcagcgataagaaagtccagaccaagggcaagcggggcgccaaaggcaaacaggccgaggtggccaaccaggagacaaaggaagatctgcctgctgagaacggcgaaaccaagaccgaggaatctccagcttctgacgaggccggagagaaggaggccaaaagcgacagcggctctgagacacctggaacaagcgagagcgccaccccggaatcctatgaacaacttgcaccacaaccgtgtgtgggagaaactttacattctagcctcccacgagacagtgaactgtttgtgcctgaagaggggagcagcgagaaggagagcgaggacgcgccaaaaacatctcctccgacgcctgggaaacatggtttggaacagactggggaggaaaaagtgatggtgactgttcctgacaaaaatccaccttgtccttgctgtggtacccgggtaaactctgtgttgaatctgattgaacatctgaaagtgtcacacgggaaaaggggggtttgttttcggtgtgcaaaatgtggaaaggaaaatagtaactatcacagtgttgtttgtcattttaagaaatgcaggggtccagagacggagaaagccccagctggggagtggatttgtgaggtatgcaacagagattttacaaccaaaattggcctgggacaacacaagagattggcacacccagcagtgagaaatcaggaaaggatcgttgcttcccaaccgaaagaaacatcaaatagaggtgctcacaaaaggtgctggacaaaggaggaggaagaattactaataagactggaggctcagttcgagggaaacaaaaatattaataagcttattgcagaacacataaccaccaaaacagctaagcagatcagtgacaaaaggcgattgctgtccagaaagccagcagaggagccacgtgaggagcctggaacgtgtcatcacaccaggagagcagctgcgagcctgagaacggagcctgagatgagtcatcacgcccaggcagaggacagagataatggacctgggagacgccctctgccaggcagggcagctgccggagggagaacaatggacgagataagacgccaccctgataagggcaacggacagcagagacccaccaagcaaaaatcagaagaacagctgcaggcttactataaaaagacactagaggaacgactttcagctggggcacttaacaccttcccccgagcattcaagcaggtaatggaaggccgggatataaagctagtaatcaatcagacagcgcaggactgcttcggatgcctggaatccataagccaaataagaacggcaacccgagataaaaaggacacggtgacccgggagaaacacccaaagaaaccttttcagaagtggatgaagaagagagcaatcaaaaaaggtaattatcttcggttccagcgtttattttatcttgatagagggaaactggctaaaatcattttagatgatattgaatgcttgtcttgtgacataccactcagtgaaatttattcggtttttaaaacaagatgggaaacaactggtagctttaaaagccttggggactttaaaacttacgggaaggctgacaacactgccttcagagaattaattacggctaaagaaattgagaaaaatgtgcaggaaatgagcaaaggctcggctcccggtccagacgggattactcttggggacgtcgtaaagatggatcccgagttttcccggaccatggagattttcaatttatggttaacaactggtaaaatcccggacatggtgagggggtgcagaaccgttttgattccaaaatcatcaaagccggatcgtttgaaagacattaataactggagacctatcacgatcggttccatcttgctgagactgttctccaggattgtaacagctaggctgagcaaagcgtgccccctgaacccaaggcaaagaggctttatcagagcggcgggatgctctgaaaacttaaaactcctgcaaactataatttggtcggccaaaagagaacacagaccactgggtgttgtattcgtggacatcgccaaggcttttgacaccgtaagccaccagcacatcattcatgctttgcagcaaagagaggtggatccccacatcgtcggtctggtgagcaatatgtacgagaacatcagtacgtatatcaccacaaagaggaacacacacacagacaaaatccagatccgggttggagtaaagcagggtgacccgatgtcgccccttttatttaacctggcaatggaccctctattatgcaagctggaagagagtggcaaaggataccaccgaggacagagcagcatcacagcgatggcatttgcagacatgctggttttgctgagcgactcctgggaaaatatgaatacaaatattagcatactggagaccttctgcaatctgaccggactcaaaacacaggggcaaaagtgccacggcttttacatcaagccgacaaagaagtcttacaccatcaatgactgcgctgcctggactatcaacggcacacccctgaacatgatcgaccccggcgaatctgagaaatacctcggcctgcagtttgacccgtggattggaatagcaaggtccggtctctccacaaaactagatttttggcttcagcggatcgatcaagcaccacttaaacctctgcagaaaactgatattctcaaaacatacaccatccctcggctgatctacatagctgaccactcagaagtgaaaagcgcactactcgaaacccttgaccagaagatccggacagcggtcaaggaatggcttcacctacctccgtgcacctgcgatgccatcctgtactcgagcacgagagacggcggtttgggcatcaccaaattggcaggactgatccccagcgtgcaggcccgtagactgcatcggatcgcacagtcatctgacgatacgatgaaatgcttcatggaaaaagagaaaatggaacagctgcataagaaattgtggattcaagctggaggggacagagagaacataccctcgatttgggaagcaccaccgtcgagtgaaccaccaaacaacgtgagcacaaattcggaatgggaagcaccgacccagaaagataaatttccaaagccttgcaattggaggaaaaacgaattcaaaaaatggaccaaattggcatcccaaggccgcggaattgtaaattttgaaagagacaaaattagtaaccattggatccaatactacagacgcatacctcacaggaaactcctcactgcactacaactcagggccaacgtttaccccacgagagaatttctagccaggggtagacaagaccaatacatcaaggcgtgtaggcactgcgatgcggacaacgaatcctgcgcccacatcatcggcaactgcccagtgacacaggacgcccgaatcaagaggcacaattacatctgcgaactgcttctcgaggaggcgaagaagaaggactgggtagtgttcaaggaaccgcacataagggattccaacaaggaactgtacaaacctgacctgatatttgtgaaggatgggcgtgcacttgtcgtggatgtgacagtacggtatgaagcagccaaatcatcgctggaggaagccgctgcagagaaagtgagaaagtacaaacacctggaaacggaagtaagacatctcacgaatgcaaaggacgttacttttgtgggctttcccctaggagcgcgggggaaatggcaccaagataactttaaacttttgactgagcttggcctctccaaatcgaggcaagtgaaaatggcagagactttttccacagtagcgctcttttcatctgtggacattgtacatatgtttgccagtagggccagaaaatctatggttatgtgataataggctgccttctgcggggcttgccttctggccatgcccttcttctctcccttgcacctgtacctcttggtctttgaataaagcctgagtaggaaggaccggtaaaaaaaaaaaaaaaaaaaaaaaaaaaaaaacgttgactaaaaaaaaaaaaaaaaaaaaaaaaaaaaaaaaaaaaaaaaaaaaaaaaaaaaaaaaaaaaaaaaaaaaaa

SEQ ID NO: 10755 - DNA, 5264 bp, synthetic construct
  source 1..5264: mol_type = other DNA
gaaataagagagaaaagaagagtaagaagaaatataagagaattcgccaccatggcccctaagaaaaagcggaaggtgaatatcagcggctctagctgcggcagccccaacagcgccgacaccagcagcgacttcaaggacctgtggaccaagctgaaggaatgccacgaccgggaagtgcagggactccaggtgaaggtcaccaaactcaagcaagaaagaatcctggacgcccagagactggaagaattcttcaccaagaaccagcagctgagagagcagcagaaagtgctgcacgagacaatcaaggttctggaagatagactgcgggccggcctgtgcgacagatgcgccgtgaccgaggaacacatgcgcaaaaagcagcaggagttcgagaacattagacagcaaaatctgaaattgatcacagagctgatgaacgagagaaacacactgcaggaggagaacaagaagctgagcgagcagctgcaacagaagatcgagaatgatcagcaacaccaggccgctgagctggaatgtgaagaggacgtgatccccgacagcccaatcacagctttcagcttttctggcgtgaacagactgaggcggaaggaaaacccccacgtgcggtacatcgagcagacccataccaagctggaacacagcgtgtgtgccaacgagatgagaaaggtgtccaagtcctccacccatccccagcacaaccctaacgaaaatgagatcctggtggctgatacctacgaccagtctcagagccctatggccaaggcccacggcaccagctcttatacccctgataagagctccttcaacctggccaccgtggtggccgagacactgggcctgggcgtgcaggaggaaagcgagacacagggcccaatgagccctctgggagatgagctgtaccactgcctggaaggcaaccacaagaaacagccttttgagtccggctccgagactcctggaacaagcgagagcgctacacctgagggcagccctaagagaaaggtgtccagcgccgagggcgctgccaaggaagagcctaaacggagaagcgccagactgagcgccaagccccccgccaaggtggaagccaagcctaagaaggccgccgctaaggacaagagcagcgataagaaagtccagaccaagggcaagcggggcgccaaaggcaaacaggccgaggtggccaaccaggagacaaaggaagatctgcctgctgagaacggcgaaaccaagaccgaggaatctccagcttctgacgaggccggagagaaggaggccaaaagcgacagcggctctgagacacctggaacaagcgagagcgccaccccggaatcctatgaacaacttgcaccacaaccgtgtgtgggagaaactttacattctagcctcccacgagacagtgaactgtttgtgcctgaagaggggagcagcgagaaggagagcgaggacgcgccaaaaacatctcctccgacgcctgggaaacatggtttggaacagactggggaggaaaaagtgatggtgactgttcctgacaaaaatccaccttgtccttgctgtggtacccgggtaaactctgtgttgaatctgattgaacatctgaaagtgtcacacgggaaaaggggggtttgttttcggtgtgcaaaatgtggaaaggaaaatagtaactatcacagtgttgtttgtcattttaagaaatgcaggggtccagagacggagaaagccccagctggggagtggatttgtgaggtatgcaacagagattttacaaccaaaattggcctgggacaacacaagagattggcacacccagcagtgagaaatcaggaaaggatcgttgcttcccaaccgaaagaaacatcaaatagaggtgctcacaaaaggtgctggacaaaggaggaggaagaattactaataagactggaggctcagttcgagggaaacaaaaatattaataagcttattgcagaacacataaccaccaaaacagctaagcagatcagtgacaaaaggcgattgctgtccagaaagccagcagaggagccacgtgaggagcctggaacgtgtcatcacaccaggagagcagctgcgagcctgagaacggagcctgagatgagtcatcacgcccaggcagaggacagagataatggacctgggagacgccctctgccaggcagggcagctgccggagggagaacaatggacgagataagacgccaccctgataagggcaacggacagcagagacccaccaagcaaaaatcagaagaacagctgcaggcttactataaaaagacactagaggaacgactttcagctggggcacttaacaccttcccccgagcattcaagcaggtaatggaaggccgggatataaagctagtaatcaatcagacagcgcaggactgcttcggatgcctggaatccataagccaaataagaacggcaacccgagataaaaaggacacggtgacccgggagaaacacccaaagaaaccttttcagaagtggatgaagaagagagcaatcaaaaaaggtaattatcttcggttccagcgtttattttatcttgatagagggaaactggctaaaatcattttagatgatattgaatgcttgtcttgtgacataccactcagtgaaatttattcggtttttaaaacaagatgggaaacaactggtagctttaaaagccttggggactttaaaacttacgggaaggctgacaacactgccttcagagaattaattacggctaaagaaattgagaaaaatgtgcaggaaatgcagaaaggctcggctcccggtccagacgggattactcttggggacgtcgtaaagatggatcccgagttttcccggaccatggagattttcaatttatggttaacaactggtaaaatcccggacatggtgagggggtgcagaaccgttttgattccaaaatcatcaaagccggatcgtttgaaagacattaataactggagacctatcacgatcggttccatcttgctgagactgttctccaggattgtaacagctaggctgagcaaagcgtgccccctgaacccaaggcaaagaggctttatcagagcggcgggatgctctgaaaacttaaaactcctgcaaactataatttggtcggccaaaagagaacacagaccactgggtgttgtattcgtggacatcgccaaggcttttgacaccgtaagccaccagcacatcattcatgctttgcagcaaagagaggtggatccccacatcgtcggtctggtgagcaatatgtacgagaacatcagtacgtatatcaccacaaagaggaacacacacacagacaaaatccagatccgggttggagtaaagcagggtgacccgatgtcgccccttttatttaacctggcaatggaccctctattatgcaagctggaagagagtggcaaaggataccaccgaggacagagcagcatcacagcgatggcatttgcagacgatctggttttgctgagcgactcctgggaaaatatgaatacaaatattagcatactggagaccttctgcaatctgaccggactcaaaacacaggggcaaaagtgccacggcttttacatcaagccgacaaagaagtcttacaccatcaatgactgcgctgcctggactatcaacggcacacccctgaacatgatcgaccccggcgaatctgagaaatacctcggcctgcagtttgacccgtggattggaatagcaaggtccggtctctccacaaaactagatttttggcttcagcggatcgatcaagcaccacttaaacctctgcagaaaactgatattctcaaaacatacaccatccctcggctgatctacatagctgaccactcagaagtgaaaagcgcactactcgaaacccttgaccagaagatccggacagcggtcaaggaatggcttcacctacctccgtgcacctgcgatgccatcctgtactcgagcacgagagacggcggtttgggcatcaccaaattggcaggactgatccccagcgtgcaggcccgtagactgcatcggatcgcacagtcatctgacgatacgatgaaatgcttcatggaaaaagagaaaatggaacagctgcataagaaattgtggattcaagctggaggggacagagagaacataccctcgatttgggaagcaccaccgtcgagtgaaccaccaaacaacgtgagcacaaattcggaatgggaagcaccgacccagaaagataaatttccaaagccttgcaattggaggaaaaacgaattcaaaaaatggaccaaattggcatcccaaggccgcggaattgtaaattttgaaagagacaaaattagtaaccattggatccaatactacagacgcatacctcacaggaaactcctcactgcactacaactcagggccaacgtttaccccacgagagaatttctagccaggggtagacaagaccaatacatcaaggcgtgtaggcactgcgatgcggacaacgaatcctgcgcccacatcatcggcaactgcccagtgacacaggacgcccgaatcaagaggcacaattacatctgcgaactgcttctcgaggaggcgaagaagaaggactgggtagtgttcaaggaaccgcacataagggattccaacaaggaactgtacaaacctgacctgatatttgtgaaggatgggcgtgcacttgtcgtggatgtgacagtacggtatgaagcagccaaatcatcgctggaggaagccgctgcagagaaagtgagaaagtacaaacacctggaaacggaagtaagacatctcacgaatgcaaaggacgttacttttgtgggctttcccctaggagcgcgggggaaatggcaccaagataactttaaacttttgactgagcttggcctctccaaatcgaggcaagtgaaaatggcagagactttttccacagtagcgctcttttcatctgtggacattgtacatatgtttgccagtagggccagaaaatctatggttatgtgataataggctgccttctgcggggcttgccttctggccatgcccttcttctctcccttgcacctgtacctcttggtctttgaataaagcctgagtaggaaggaccggtaaaaaaaaaaaaaaaaaaaaaaaaaaaaaaacgttgactaaaaaaaaaaaaaaaaaaaaaaaaaaaaaaaaaaaaaaaaaaaaaaaaaaaaaaaaaaaaaaaaaaaaaa

SEQ ID NO: 10756 - DNA, 5264 bp, synthetic construct
  source 1..5264: mol_type = other DNA
gaaataagagagaaaagaagagtaagaagaaatataagagaattcgccaccatggcccctaagaaaaagcggaaggtgaatatcagcggctctagctgcggcagccccaacagcgccgacaccagcagcgacttcaaggacctgtggaccaagctgaaggaatgccacgaccgggaagtgcagggactccaggtgaaggtcaccaaactcaagcaagaaagaatcctggacgcccagagactggaagaattcttcaccaagaaccagcagctgagagagcagcagaaagtgctgcacgagacaatcaaggttctggaagatagactgcgggccggcctgtgcgacagatgcgccgtgaccgaggaacacatgcgcaaaaagcagcaggagttcgagaacattagacagcaaaatctgaaattgatcacagagctgatgaacgagagaaacacactgcaggaggagaacaagaagctgagcgagcagctgcaacagaagatcgagaatgatcagcaacaccaggccgctgagctggaatgtgaagaggacgtgatccccgacagcccaatcacagctttcagcttttctggcgtgaacagactgaggcggaaggaaaacccccacgtgcggtacatcgagcagacccataccaagctggaacacagcgtgtgtgccaacgagatgagaaaggtgtccaagtcctccacccatccccagcacaaccctaacgaaaatgagatcctggtggctgatacctacgaccagtctcagagccctatggccaaggcccacggcaccagctcttatacccctgataagagctccttcaacctggccaccgtggtggccgagacactgggcctgggcgtgcaggaggaaagcgagacacagggcccaatgagccctctgggagatgagctgtaccactgcctggaaggcaaccacaagaaacagccttttgagtccggctccgagactcctggaacaagcgagagcgctacacctgagggcagccctaagagaaaggtgtccagcgccgagggcgctgccaaggaagagcctaaacggagaagcgccagactgagcgccaagccccccgccaaggtggaagccaagcctaagaaggccgccgctaaggacaagagcagcgataagaaagtccagaccaagggcaagcggggcgccaaaggcaaacaggccgaggtggccaaccaggagacaaaggaagatctgcctgctgagaacggcgaaaccaagaccgaggaatctccagcttctgacgaggccggagagaaggaggccaaaagcgacagcggctctgagacacctggaacaagcgagagcgccaccccggaatcctatgaacaacttgcaccacaaccgtgtgtgggagaaactttacattctagcctcccacgagacagtgaactgtttgtgcctgaagaggggagcagcgagaaggagagcgaggacgcgccaaaaacatctcctccgacgcctgggaaacatggtttggaacagactggggaggaaaaagtgatggtgactgttcctgacaaaaatccaccttgtccttgctgtggtacccgggtaaactctgtgttgaatctgattgaacatctgaaagtgtcacacgggaaaaggggggtttgttttcggtgtgcaaaatgtggaaaggaaaatagtaactatcacagtgttgtttgtcattttaagaaatgcaggggtccagagacggagaaagccccagctggggagtggatttgtgaggtatgcaacagagattttacaaccaaaattggcctgggacaacacaagagattggcacacccagcagtgagaaatcaggaaaggatcgttgcttcccaaccgaaagaaacatcaaatagaggtgctcacaaaaggtgctggacaaaggaggaggaagaattactaataagactggaggctcagttcgagggaaacaaaaatattaataagcttattgcagaacacataaccaccaaaacagctaagcagatcagtgacaaaaggcgattgctgtccagaaagccagcagaggagccacgtgaggagcctggaacgtgtcatcacaccaggagagcagctgcgagcctgagaacggagcctgagatgagtcatcacgcccaggcagaggacagagataatggacctgggagacgccctctgccaggcagggcagctgccggagggagaacaatggacgagataagacgccaccctgataagggcaacggacagcagagacccaccaagcaaaaatcagaagaacagctgcaggcttactataaaaagacactagaggaacgactttcagctggggcacttaacaccttcccccgagcattcaagcaggtaatggaaggccgggatataaagctagtaatcaatcagacagcgcaggactgcttcggatgcctggaatccataagccaaataagaacggcaacccgagataaaaaggacacggtgacccgggagaaacacccaaagaaaccttttcagaagtggatgaagaagagagcaatcaaaaaaggtaattatcttcggttccagcgtttattttatcttgatagagggaaactggctaaaatcattttagatgatattgaatgcttgtcttgtgacataccactcagtgaaatttattcggtttttaaaacaagatgggaaacaactggtagctttaaaagccttggggactttaaaacttacgggaaggctgacaacactgccttcagagaattaattacggctaaagaaattgagaaaaatgtgcaggaaatgagcaaaggctcggctcccggtccagacgggattactcttggggacgtcgtaaagatggatcccgagttttcccggaccatggagattttcaatttatggttaacaactggtaaaatcccggacatggtgagggggtgcagaaccgttttgattccaaaatcatcaaagccggatcgtttgaaagacattaataactggagacctatcacgatcggttccatcttgctgagactgttctccaggattgtaacagctaggctgagcaaagcgtgccccctgaacccaaggcaaagaggctttatcagagcggcgggatgctctgaaaacttaaaactcctgcaaactataatttggtcggccaaaagagaacacagaccactgggtgttgtattcgtggacatcgccaaggcttttgacaccgtaagccaccagcacatcattcatgctttgcagcaaagagaggtggatccccacatcgtcggtctggtgagcaatatgtacgagaacatcagtacgtatatcaccacaaagaggaacacacacacagacaaaatccagatccgggttggagtaaagcagggtgacccgatgtcgccccttttatttaacctggcaatggaccctctattatgcaagctggaagagagtggcaaaggataccaccgaggacagagcagcatcacagcgatggcatttgcagacgatctggttttgctgagcgactcctgggaaaatatgaatacaaatattagcatactggagaccttctgcaatctgaccggactcaaaacacaggggcaaaagtgccacggcttttacatcaagccgacaaagaagtcttacaccatcaatgactgcgctgcctggactatcaacggcacacccctgaacatgatcgaccccggcgaatctgagaaatacctcggcctgcagtttgacccgtggattggaatagcaaggtccggtctctccacaaaactagatttttggcttcagcggatcgatcaagcaccacttaaacctctgcagaaaactgatattctcaaaacatacaccatccagcggctgatctacatagctgaccactcagaagtgaaaagcgcactactcgaaacccttgaccagaagatccggacagcggtcaaggaatggcttcacctacctccgtgcacctgcgatgccatcctgtactcgagcacgagagacggcggtttgggcatcaccaaattggcaggactgatccccagcgtgcaggcccgtagactgcatcggatcgcacagtcatctgacgatacgatgaaatgcttcatggaaaaagagaaaatggaacagctgcataagaaattgtggattcaagctggaggggacagagagaacataccctcgatttgggaagcaccaccgtcgagtgaaccaccaaacaacgtgagcacaaattcggaatgggaagcaccgacccagaaagataaatttccaaagccttgcaattggaggaaaaacgaattcaaaaaatggaccaaattggcatcccaaggccgcggaattgtaaattttgaaagagacaaaattagtaaccattggatccaatactacagacgcatacctcacaggaaactcctcactgcactacaactcagggccaacgtttaccccacgagagaatttctagccaggggtagacaagaccaatacatcaaggcgtgtaggcactgcgatgcggacaacgaatcctgcgcccacatcatcggcaactgcccagtgacacaggacgcccgaatcaagaggcacaattacatctgcgaactgcttctcgaggaggcgaagaagaaggactgggtagtgttcaaggaaccgcacataagggattccaacaaggaactgtacaaacctgacctgatatttgtgaaggatgggcgtgcacttgtcgtggatgtgacagtacggtatgaagcagccaaatcatcgctggaggaagccgctgcagagaaagtgagaaagtacaaacacctggaaacggaagtaagacatctcacgaatgcaaaggacgttacttttgtgggctttcccctaggagcgcgggggaaatggcaccaagataactttaaacttttgactgagcttggcctctccaaatcgaggcaagtgaaaatggcagagactttttccacagtagcgctcttttcatctgtggacattgtacatatgtttgccagtagggccagaaaatctatggttatgtgataataggctgccttctgcggggcttgccttctggccatgcccttcttctctcccttgcacctgtacctcttggtctttgaataaagcctgagtaggaaggaccggtaaaaaaaaaaaaaaaaaaaaaaaaaaaaaaacgttgactaaaaaaaaaaaaaaaaaaaaaaaaaaaaaaaaaaaaaaaaaaaaaaaaaaaaaaaaaaaaaaaaaaaaaa

SEQ ID NO: 10757 - DNA, 5264 bp, synthetic construct
  source 1..5264: mol_type = other DNA
gaaataagagagaaaagaagagtaagaagaaatataagagaattcgccaccatggcccctaagaaaaagcggaaggtgaatatcagcggctctagctgcggcagccccaacagcgccgacaccagcagcgacttcaaggacctgtggaccaagctgaaggaatgccacgaccgggaagtgcagggactccaggtgaaggtcaccaaactcaagcaagaaagaatcctggacgcccagagactggaagaattcttcaccaagaaccagcagctgagagagcagcagaaagtgctgcacgagacaatcaaggttctggaagatagactgcgggccggcctgtgcgacagatgcgccgtgaccgaggaacacatgcgcaaaaagcagcaggagttcgagaacattagacagcaaaatctgaaattgatcacagagctgatgaacgagagaaacacactgcaggaggagaacaagaagctgagcgagcagctgcaacagaagatcgagaatgatcagcaacaccaggccgctgagctggaatgtgaagaggacgtgatccccgacagcccaatcacagctttcagcttttctggcgtgaacagactgaggcggaaggaaaacccccacgtgcggtacatcgagcagacccataccaagctggaacacagcgtgtgtgccaacgagatgagaaaggtgtccaagtcctccacccatccccagcacaaccctaacgaaaatgagatcctggtggctgatacctacgaccagtctcagagccctatggccaaggcccacggcaccagctcttatacccctgataagagctccttcaacctggccaccgtggtggccgagacactgggcctgggcgtgcaggaggaaagcgagacacagggcccaatgagccctctgggagatgagctgtaccactgcctggaaggcaaccacaagaaacagccttttgagtccggctccgagactcctggaacaagcgagagcgctacacctgagggcagccctaagagaaaggtgtccagcgccgagggcgctgccaaggaagagcctaaacggagaagcgccagactgagcgccaagccccccgccaaggtggaagccaagcctaagaaggccgccgctaaggacaagagcagcgataagaaagtccagaccaagggcaagcggggcgccaaaggcaaacaggccgaggtggccaaccaggagacaaaggaagatctgcctgctgagaacggcgaaaccaagaccgaggaatctccagcttctgacgaggccggagagaaggaggccaaaagcgacagcggctctgagacacctggaacaagcgagagcgccaccccggaatcctatgaacaacttgcaccacaaccgtgtgtgggagaaactttacattctagcctcccacgagacagtgaactgtttgtgcctgaagaggggagcagcgagaaggagagcgaggacgcgccaaaaacatctcctccgacgcctgggaaacatggtttggaacagactggggaggaaaaagtgatggtgactgttcctgacaaaaatccaccttgtccttgctgtggtacccgggtaaactctgtgttgaatctgattgaacatctgaaagtgtcacacgggaaaaggggggtttgttttcggtgtgcaaaatgtggaaaggaaaatagtaactatcacagtgttgtttgtcattttaagaaatgcaggggtccagagacggagaaagccccagctggggagtggatttgtgaggtatgcaacagagattttacaaccaaaattggcctgggacaacacaagagattggcacacccagcagtgagaaatcaggaaaggatcgttgcttcccaaccgaaagaaacatcaaatagaggtgctcacaaaaggtgctggacaaaggaggaggaagaattactaataagactggaggctcagttcgagggaaacaaaaatattaataagcttattgcagaacacataaccaccaaaacagctaagcagatcagtgacaaaaggcgattgctgtccagaaagccagcagaggagccacgtgaggagcctggaacgtgtcatcacaccaggagagcagctgcgagcctgagaacggagcctgagatgagtcatcacgcccaggcagaggacagagataatggacctgggagacgccctctgccaggcagggcagctgccggagggagaacaatggacgagataagacgccaccctgataagggcaacggacagcagagacccaccaagcaaaaatcagaagaacagctgcaggcttactataaaaagacactagaggaacgactttcagctggggcacttaacaccttcccccgagcattcaagcaggtaatggaaggccgggatataaagctagtaatcaatcagacagcgcaggactgcttcggatgcctggaatccataagccaaataagaacggcaacccgagataaaaaggacacggtgacccgggagaaacacccaaagaaaccttttcagaagtggatgaagaagagagcaatcaaaaaaggtaattatcttcggttccagcgtttattttatcttgatagagggaaactggctaaaatcattttagatgatattgaatgcttgtcttgtgacataccactcagtgaaatttattcggtttttaaaacaagatgggaaacaactggtagctttaaaagccttggggactttaaaacttacgggaaggctgacaacactgccttcagagaattaattacggctaaagaaattgagaaaaatgtgcaggaaatgagcaaaggctcggctcccggtccagacgggattactcttggggacgtcgtaaagatggatcccgagttttcccggaccatggagattttcaatttatggttaacaactggtaaaatcccggacatggtgagggggtgcagaaccgttttgattccaaaatcatcaaagccggatcgtttgaaagacattaataactggagacctatcacgatcggttccatcttgctgagactgttctccaggattgtaacagctaggctgagcaaagcgtgccccctgaacccaaggcaaagaggctttatcagagcggcgggatgctctgaaaacttaaaactcctgcaaactataatttggtcggccaaaagagaacacagaccactgggtgttgtattcgtggacatcgccaaggcttttgacaccgtaagccaccagcacatcattcatgctttgcagcaaagagaggtggatccccacatcgtcggtctggtgagcaatatgtacgagaacatcagtacgtatatcaccacaaagaggaacacacacacagacaaaatccagatccgggttggagtaaagcagggtgacccgatgtcgccccttttatacaacctggcaatggaccctctattatgcaagctggaagagagtggcaaaggataccaccgaggacagagcagcatcacagcgatggcatttgcagacgatctggttttgctgagcgactcctgggaaaatatgaatacaaatattagcatactggagaccttctgcaatctgaccggactcaaaacacaggggcaaaagtgccacggcttttacatcaagccgacaaagaagtcttacaccatcaatgactgcgctgcctggactatcaacggcacacccctgaacatgatcgaccccggcgaatctgagaaatacctcggcctgcagtttgacccgtggattggaatagcaaggtccggtctctccacaaaactagatttttggcttcagcggatcgatcaagcaccacttaaacctctgcagaaaactgatattctcaaaacatacaccatccctcggctgatctacatagctgaccactcagaagtgaaaagcgcactactcgaaacccttgaccagaagatccggacagcggtcaaggaatggcttcacctacctccgtgcacctgcgatgccatcctgtactcgagcacgagagacggcggtttgggcatcaccaaattggcaggactgatccccagcgtgcaggcccgtagactgcatcggatcgcacagtcatctgacgatacgatgaaatgcttcatggaaaaagagaaaatggaacagctgcataagaaattgtggattcaagctggaggggacagagagaacataccctcgatttgggaagcaccaccgtcgagtgaaccaccaaacaacgtgagcacaaattcggaatgggaagcaccgacccagaaagataaatttccaaagccttgcaattggaggaaaaacgaattcaaaaaatggaccaaattggcatcccaaggccgcggaattgtaaattttgaaagagacaaaattagtaaccattggatccaatactacagacgcatacctcacaggaaactcctcactgcactacaactcagggccaacgtttaccccacgagagaatttctagccaggggtagacaagaccaatacatcaaggcgtgtaggcactgcgatgcggacaacgaatcctgcgcccacatcatcggcaactgcccagtgacacaggacgcccgaatcaagaggcacaattacatctgcgaactgcttctcgaggaggcgaagaagaaggactgggtagtgttcaaggaaccgcacataagggattccaacaaggaactgtacaaacctgacctgatatttgtgaaggatgggcgtgcacttgtcgtggatgtgacagtacggtatgaagcagccaaatcatcgctggaggaagccgctgcagagaaagtgagaaagtacaaacacctggaaacggaagtaagacatctcacgaatgcaaaggacgttacttttgtgggctttcccctaggagcgcgggggaaatggcaccaagataactttaaacttttgactgagcttggcctctccaaatcgaggcaagtgaaaatggcagagactttttccacagtagcgctcttttcatctgtggacattgtacatatgtttgccagtagggccagaaaatctatggttatgtgataataggctgccttctgcggggcttgccttctggccatgcccttcttctctcccttgcacctgtacctcttggtctttgaataaagcctgagtaggaaggaccggtaaaaaaaaaaaaaaaaaaaaaaaaaaaaaaacgttgactaaaaaaaaaaaaaaaaaaaaaaaaaaaaaaaaaaaaaaaaaaaaaaaaaaaaaaaaaaaaaaaaaaaaaa

SEQ ID NO: 10758 - DNA, 2492 bp, synthetic construct; identical to SEQ ID NO: 758
  source 1..2492: mol_type = other DNA

SEQ ID NO: 10759 - DNA, 2338 bp, synthetic construct; identical to SEQ ID NO: 759
  source 1..2338: mol_type = other DNA

SEQ ID NO: 10760 - DNA, 5264 bp, synthetic construct
  source 1..5264: mol_type = other DNA
gaaataagagagaaaagaagagtaagaagaaatataagagaattcgccaccatggcccctaagaaaaagcggaaggtgaatatcagcggctctagctgcggcagccccaacagcgccgacaccagcagcgacttcaaggacctgtggaccaagctgaaggaatgccacgaccgggaagtgcagggactccaggtgaaggtcaccaaactcaagcaagaaagaatcctggacgcccagagactggaagaattcttcaccaagaaccagcagctgagagagcagcagaaagtgctgcacgagacaatcaaggttctggaagatagactgcgggccggcctgtgcgacagatgcgccgtgaccgaggaacacatgcgcaaaaagcagcaggagttcgagaacattagacagcaaaatctgaaattgatcacagagctgatgaacgagagaaacacactgcaggaggagaacaagaagctgagcgagcagctgcaacagaagatcgagaatgatcagcaacaccaggccgctgagctggaatgtgaagaggacgtgatccccgacagcccaatcacagctttcagcttttctggcgtgaacagactgaggcggaaggaaaacccccacgtgcggtacatcgagcagacccataccaagctggaacacagcgtgtgtgccaacgagatgagaaaggtgtccaagtcctccacccatccccagcacaaccctaacgaaaatgagatcctggtggctgatacctacgaccagtctcagagccctatggccaaggcccacggcaccagctcttatacccctgataagagctccttcaacctggccaccgtggtggccgagacactgggcctgggcgtgcaggaggaaagcgagacacagggcccaatgagccctctgggagatgagctgtaccactgcctggaaggcaaccacaagaaacagccttttgagtccggctccgagactcctggaacaagcgagagcgctacacctgagggcagccctaagagaaaggtgtccagcgccgagggcgctgccaaggaagagcctaaacggagaagcgccagactgagcgccaagccccccgccaaggtggaagccaagcctaagaaggccgccgctaaggacaagagcagcgataagaaagtccagaccaagggcaagcggggcgccaaaggcaaacaggccgaggtggccaaccaggagacaaaggaagatctgcctgctgagaacggcgaaaccaagaccgaggaatctccagcttctgacgaggccggagagaaggaggccaaaagcgacagcggctctgagacacctggaacaagcgagagcgccaccccggaatcctatgaacaacttgcaccacaaccgtgtgtgggagaaactttacattctagcctcccacgagacagtgaactgtttgtgcctgaagaggggagcagcgagaaggagagcgaggacgcgccaaaaacatctcctccgacgcctgggaaacatggtttggaacagactggggaggaaaaagtgatggtgactgttcctgacaaaaatccaccttgtccttgctgtggtacccgggtaaactctgtgttgaatctgattgaacatctgaaagtgtcacacgggaaaaggggggtttgttttcggtgtgcaaaatgtggaaaggaaaatagtaactatcacagtgttgtttgtcattttaagaaatgcaggggtccagagacggagaaagccccagctggggagtggatttgtgaggtatgcaacagagattttacaaccaaaattggcctgggacaacacaagagattggcacacccagcagtgagaaatcaggaaaggatcgttgcttcccaaccgaaagaaacatcaaatagaggtgctcacaaaaggtgctggacaaaggaggaggaagaattactaataagactggaggctcagttcgagggaaacaaaaatattaataagcttattgcagaacacataaccaccaaaacagctaagcagatcagtgacaaaaggcgattgctgtccagaaagccagcagaggagccacgtgaggagcctggaacgtgtcatcacaccaggagagcagctgcgagcctgagaacggagcctgagatgagtcatcacgcccaggcagaggacagagataatggacctgggagacgccctctgccaggcagggcagctgccggagggagaacaatggacgagataagacgccaccctgataagggcaacggacagcagagacccaccaagcaaaaatcagaagaacagctgcaggcttactataaaaagacactagaggaacgactttcagctggggcacttaacaccttcccccgagcattcaagcaggtaatggaaggccgggatataaagctagtaatcaatcagacagcgcaggactgcttcggatgcctggaatccataagccaaataagaacggcaacccgagataaaaaggacacggtgacccgggagaaacacccaaagaaaccttttcagaagtggatgaagaagagagcaatcaaaaaaggtaattatcttcggttccagcgtttattttatcttgatagagggaaactggctaaaatcattttagatgatattgaatgcttgtcttgtgacataccactcagtgaaatttattcggtttttaaaacaagatgggaaacaactggtagctttaaaagccttggggactttaaaacttacgggaaggctgacaacactgccttcagagaattaattacggctaaagaaattgagaaaaatgtgcaggaaatgagcaaaggctcggctcccggtccagacgggattactcttggggacgtcgtaaagatggatcccgagttttcccggaccatggagattttcaatttatggttaacaactggtaaaatcccggacatggtgagggggtgcagaaccgttttgattccaaaatcatcaaagccggatcgtttgaaagacattaataactggagacctatcacgatcggttccatcttgctgagactgttctccaggattgtaacagctaggctgagcaaagcgtgccccctgaacccaaggcaaagaggctttatcagagcggcgggatgctctgaaaacttaaaactcctgcaaactataatttggtcggccaaaagagaacacagaccactgggtgttgtattcgtggacatcgccaaggcttttgacaccgtaagccaccagcacatcattcatgctttgcagcaaagagaggtggatccccacatcgtcggtctggtgagcaatatgtacgagaacatcagtacgtatatcaccacaaagaggaacacacacacagacaaaatccagatccgggttggagtaaagcagggtgacccgatgtcgccccttttatttaacatcgcaatggaccctctattatgcaagctggaagagagtggcaaaggataccaccgaggacagagcagcatcacagcgatggcatttgcagacgatctggttttgctgagcgactcctgggaaaatatgaatacaaatattagcatactggagaccttctgcaatctgaccggactcaaaacacaggggcaaaagtgccacggcttttacatcaagccgacaaagaagtcttacaccatcaatgactgcgctgcctggactatcaacggcacacccctgaacatgatcgaccccggcgaatctgagaaatacctcggcctgcagtttgacccgtggattggaatagcaaggtccggtctctccacaaaactagatttttggcttcagcggatcgatcaagcaccacttaaacctctgcagaaaactgatattctcaaaacatacaccatccctcggctgatctacatagctgaccactcagaagtgaaaagcgcactactcgaaacccttgaccagaagatccggacagcggtcaaggaatggcttcacctacctccgtgcacctgcgatgccatcctgtactcgagcacgagagacggcggtttgggcatcaccaaattggcaggactgatccccagcgtgcaggcccgtagactgcatcggatcgcacagtcatctgacgatacgatgaaatgcttcatggaaaaagagaaaatggaacagctgcataagaaattgtggattcaagctggaggggacagagagaacataccctcgatttgggaagcaccaccgtcgagtgaaccaccaaacaacgtgagcacaaattcggaatgggaagcaccgacccagaaagataaatttccaaagccttgcaattggaggaaaaacgaattcaaaaaatggaccaaattggcatcccaaggccgcggaattgtaaattttgaaagagacaaaattagtaaccattggatccaatactacagacgcatacctcacaggaaactcctcactgcactacaactcagggccaacgtttaccccacgagagaatttctagccaggggtagacaagaccaatacatcaaggcgtgtaggcactgcgatgcggacaacgaatcctgcgcccacatcatcggcaactgcccagtgacacaggacgcccgaatcaagaggcacaattacatctgcgaactgcttctcgaggaggcgaagaagaaggactgggtagtgttcaaggaaccgcacataagggattccaacaaggaactgtacaaacctgacctgatatttgtgaaggatgggcgtgcacttgtcgtggatgtgacagtacggtatgaagcagccaaatcatcgctggaggaagccgctgcagagaaagtgagaaagtacaaacacctggaaacggaagtaagacatctcacgaatgcaaaggacgttacttttgtgggctttcccctaggagcgcgggggaaatggcaccaagataactttaaacttttgactgagcttggcctctccaaatcgaggcaagtgaaaatggcagagactttttccacagtagcgctcttttcatctgtggacattgtacatatgtttgccagtagggccagaaaatctatggttatgtgataataggctgccttctgcggggcttgccttctggccatgcccttcttctctcccttgcacctgtacctcttggtctttgaataaagcctgagtaggaaggaccggtaaaaaaaaaaaaaaaaaaaaaaaaaaaaaaacgttgactaaaaaaaaaaaaaaaaaaaaaaaaaaaaaaaaaaaaaaaaaaaaaaaaaaaaaaaaaaaaaaaaaaaaaa

SEQ ID NO: 10761 - DNA, 5264 bp, synthetic construct
  source 1..5264: mol_type = other DNA
gaaataagagagaaaagaagagtaagaagaaatataagagaattcgccaccatggcccctaagaaaaagcggaaggtgaatatcagcggctctagctgcggcagccccaacagcgccgacaccagcagcgacttcaaggacctgtggaccaagctgaaggaatgccacgaccgggaagtgcagggactccaggtgaaggtcaccaaactcaagcaagaaagaatcctggacgcccagagactggaagaattcttcaccaagaaccagcagctgagagagcagcagaaagtgctgcacgagacaatcaaggttctggaagatagactgcgggccggcctgtgcgacagatgcgccgtgaccgaggaacacatgcgcaaaaagcagcaggagttcgagaacattagacagcaaaatctgaaattgatcacagagctgatgaacgagagaaacacactgcaggaggagaacaagaagctgagcgagcagctgcaacagaagatcgagaatgatcagcaacaccaggccgctgagctggaatgtgaagaggacgtgatccccgacagcccaatcacagctttcagcttttctggcgtgaacagactgaggcggaaggaaaacccccacgtgcggtacatcgagcagacccataccaagctggaacacagcgtgtgtgccaacgagatgagaaaggtgtccaagtcctccacccatccccagcacaaccctaacgaaaatgagatcctggtggctgatacctacgaccagtctcagagccctatggccaaggcccacggcaccagctcttatacccctgataagagctccttcaacctggccaccgtggtggccgagacactgggcctgggcgtgcaggaggaaagcgagacacagggcccaatgagccctctgggagatgagctgtaccactgcctggaaggcaaccacaagaaacagccttttgagtccggctccgagactcctggaacaagcgagagcgctacacctgagggcagccctaagagaaaggtgtccagcgccgagggcgctgccaaggaagagcctaaacggagaagcgccagactgagcgccaagccccccgccaaggtggaagccaagcctaagaaggccgccgctaaggacaagagcagcgataagaaagtccagaccaagggcaagcggggcgccaaaggcaaacaggccgaggtggccaaccaggagacaaaggaagatctgcctgctgagaacggcgaaaccaagaccgaggaatctccagcttctgacgaggccggagagaaggaggccaaaagcgacagcggctctgagacacctggaacaagcgagagcgccaccccggaatcctatgaacaacttgcaccacaaccgtgtgtgggagaaactttacattctagcctcccacgagacagtgaactgtttgtgcctgaagaggggagcagcgagaaggagagcgaggacgcgccaaaaacatctcctccgacgcctgggaaacatggtttggaacagactggggaggaaaaagtgatggtgactgttcctgacaaaaatccaccttgtccttgctgtggtacccgggtaaactctgtgttgaatctgattgaacatctgaaagtgtcacacgggaaaaggggggtttgttttcggtgtgcaaaatgtggaaaggaaaatagtaactatcacagtgttgtttgtcattttaagaaatgcaggggtccagagacggagaaagccccagctggggagtggatttgtgaggtatgcaacagagattttacaaccaaaattggcctgggacaacacaagagattggcacacccagcagtgagaaatcaggaaaggatcgttgcttcccaaccgaaagaaacatcaaatagaggtgctcacaaaaggtgctggacaaaggaggaggaagaattactaataagactggaggctcagttcgagggaaacaaaaatattaataagcttattgcagaacacataaccaccaaaacagctaagcagatcagtgacaaaaggcgattgctgtccagaaagccagcagaggagccacgtgaggagcctggaacgtgtcatcacaccaggagagcagctgcgagcctgagaacggagcctgagatgagtcatcacgcccaggcagaggacagagataatggacctgggagacgccctctgccaggcagggcagctgccggagggagaacaatggacgagataagacgccaccctgataagggcaacggacagcagagacccaccaagcaaaaatcagaagaacagctgcaggcttactataaaaagacactagaggaacgactttcagctggggcacttaacaccttcccccgagcattcaagcaggtaatggaaggccgggatataaagctagtaatcaatcagacagcgcaggactgcttcggatgcctggaatccataagccaaataagaacggcaacccgagataaaaaggacacggtgacccgggagaaacacccaaagaaaccttttcagaagtggatgaagaagagagcaatcaaaaaaggtaattatcttcggttccagcgtttattttatcttgatagagggaaactggctaaaatcattttagatgatattgaatgcttgtcttgtgacataccactcagtgaaatttattcggtttttaaaacaagatgggaaacaactggtagctttaaaagccttggggactttaaaacttacgggaaggctgacaacactgccttcagagaattaattacggctaaagaaattgagaaaaatgtgcaggaaatgagcaaaggctcggctcccggtccagacgggattactcttggggacgtcgtaaagatggatcccgagttttcccggaccatggagattttcaatttatggttaacaactggtaaaatcccggacatggtgagggggtgcagaaccgttttgattccaaaatcatcaaagccggatcgtttgaaagacattaataactggagacctatcacgatcggttccatcttgctgagactgttctccaggattgtaacagctaggctgagcaaagcgtgccccctgaacccaaggcaaagaggctttatcagagcggcgggatgctctgaaaacttaaaactcctgcaaactataatttggtcggccaaaagagaacacagaccactgggtgttgtattcgtggacatcgccaaggcttttgacaccgtaagccaccagcacatcattcatgctttgcagcaaagagaggtggatccccacatcgtcggtctggtgagcaatatgtacgagaacatcagtacgtatatcaccacaaagaggaacacacacacagacaaaatccagatccgggttggagtaaagcagggtgacccgatgtcgccccttttatttaacctggcaatggaccctctaatctgcaagctggaagagagtggcaaaggataccaccgaggacagagcagcatcacagcgatggcatttgcagacgatctggttttgctgagcgactcctgggaaaatatgaatacaaatattagcatactggagaccttctgcaatctgaccggactcaaaacacaggggcaaaagtgccacggcttttacatcaagccgacaaagaagtcttacaccatcaatgactgcgctgcctggactatcaacggcacacccctgaacatgatcgaccccggcgaatctgagaaatacctcggcctgcagtttgacccgtggattggaatagcaaggtccggtctctccacaaaactagatttttggcttcagcggatcgatcaagcaccacttaaacctctgcagaaaactgatattctcaaaacatacaccatccctcggctgatctacatagctgaccactcagaagtgaaaagcgcactactcgaaacccttgaccagaagatccggacagcggtcaaggaatggcttcacctacctccgtgcacctgcgatgccatcctgtactcgagcacgagagacggcggtttgggcatcaccaaattggcaggactgatccccagcgtgcaggcccgtagactgcatcggatcgcacagtcatctgacgatacgatgaaatgcttcatggaaaaagagaaaatggaacagctgcataagaaattgtggattcaagctggaggggacagagagaacataccctcgatttgggaagcaccaccgtcgagtgaaccaccaaacaacgtgagcacaaattcggaatgggaagcaccgacccagaaagataaatttccaaagccttgcaattggaggaaaaacgaattcaaaaaatggaccaaattggcatcccaaggccgcggaattgtaaattttgaaagagacaaaattagtaaccattggatccaatactacagacgcatacctcacaggaaactcctcactgcactacaactcagggccaacgtttaccccacgagagaatttctagccaggggtagacaagaccaatacatcaaggcgtgtaggcactgcgatgcggacaacgaatcctgcgcccacatcatcggcaactgcccagtgacacaggacgcccgaatcaagaggcacaattacatctgcgaactgcttctcgaggaggcgaagaagaaggactgggtagtgttcaaggaaccgcacataagggattccaacaaggaactgtacaaacctgacctgatatttgtgaaggatgggcgtgcacttgtcgtggatgtgacagtacggtatgaagcagccaaatcatcgctggaggaagccgctgcagagaaagtgagaaagtacaaacacctggaaacggaagtaagacatctcacgaatgcaaaggacgttacttttgtgggctttcccctaggagcgcgggggaaatggcaccaagataactttaaacttttgactgagcttggcctctccaaatcgaggcaagtgaaaatggcagagactttttccacagtagcgctcttttcatctgtggacattgtacatatgtttgccagtagggccagaaaatctatggttatgtgataataggctgccttctgcggggcttgccttctggccatgcccttcttctctcccttgcacctgtacctcttggtctttgaataaagcctgagtaggaaggaccggtaaaaaaaaaaaaaaaaaaaaaaaaaaaaaaacgttgactaaaaaaaaaaaaaaaaaaaaaaaaaaaaaaaaaaaaaaaaaaaaaaaaaaaaaaaaaaaaaaaaaaaaaa

SEQ ID NO: 10762 - DNA, 5264 bp, synthetic construct
  source 1..5264: mol_type = other DNA
gaaataagagagaaaagaagagtaagaagaaatataagagaattcgccaccatggcccctaagaaaaagcggaaggtgaatatcagcggctctagctgcggcagccccaacagcgccgacaccagcagcgacttcaaggacctgtggaccaagctgaaggaatgccacgaccgggaagtgcagggactccaggtgaaggtcaccaaactcaagcaagaaagaatcctggacgcccagagactggaagaattcttcaccaagaaccagcagctgagagagcagcagaaagtgctgcacgagacaatcaaggttctggaagatagactgcgggccggcctgtgcgacagatgcgccgtgaccgaggaacacatgcgcaaaaagcagcaggagttcgagaacattagacagcaaaatctgaaattgatcacagagctgatgaacgagagaaacacactgcaggaggagaacaagaagctgagcgagcagctgcaacagaagatcgagaatgatcagcaacaccaggccgctgagctggaatgtgaagaggacgtgatccccgacagcccaatcacagctttcagcttttctggcgtgaacagactgaggcggaaggaaaacccccacgtgcggtacatcgagcagacccataccaagctggaacacagcgtgtgtgccaacgagatgagaaaggtgtccaagtcctccacccatccccagcacaaccctaacgaaaatgagatcctggtggctgatacctacgaccagtctcagagccctatggccaaggcccacggcaccagctcttatacccctgataagagctccttcaacctggccaccgtggtggccgagacactgggcctgggcgtgcaggaggaaagcgagacacagggcccaatgagccctctgggagatgagctgtaccactgcctggaaggcaaccacaagaaacagccttttgagtccggctccgagactcctggaacaagcgagagcgctacacctgagggcagccctaagagaaaggtgtccagcgccgagggcgctgccaaggaagagcctaaacggagaagcgccagactgagcgccaagccccccgccaaggtggaagccaagcctaagaaggccgccgctaaggacaagagcagcgataagaaagtccagaccaagggcaagcggggcgccaaaggcaaacaggccgaggtggccaaccaggagacaaaggaagatctgcctgctgagaacggcgaaaccaagaccgaggaatctccagcttctgacgaggccggagagaaggaggccaaaagcgacagcggctctgagacacctggaacaagcgagagcgccaccccggaatcctatgaacaacttgcaccacaaccgtgtgtgggagaaactttacattctagcctcccacgagacagtgaactgtttgtgcctgaagaggggagcagcgagaaggagagcgaggacgcgccaaaaacatctcctccgacgcctgggaaacatggtttggaacagactggggaggaaaaagtgatggtgactgttcctgacaaaaatccaccttgtccttgctgtggtacccgggtaaactctgtgttgaatctgattgaacatctgaaagtgtcacacgggaaaaggggggtttgttttcggtgtgcaaaatgtggaaaggaaaatagtaactatcacagtgttgtttgtcattttaagaaatgcaggggtccagagacggagaaagccccagctggggagtggatttgtgaggtatgcaacagagattttacaaccaaaattggcctgggacaacacaagagattggcacacccagcagtgagaaatcaggaaaggatcgttgcttcccaaccgaaagaaacatcaaatagaggtgctcacaaaaggtgctggacaaaggaggaggaagaattactaataagactggaggctcagttcgagggaaacaaaaatattaataagcttattgcagaacacataaccaccaaaacagctaagcagatcagtgacaaaaggcgattgctgtccagaaagccagcagaggagccacgtgaggagcctggaacgtgtcatcacaccaggagagcagctgcgagcctgagaacggagcctgagatgagtcatcacgcccaggcagaggacagagataatggacctgggagacgccctctgccaggcagggcagctgccggagggagaacaatggacgagataagacgccaccctgataagggcaacggacagcagagacccaccaagcaaaaatcagaagaacagctgcaggcttactataaaaagacactagaggaacgactttcagctggggcacttaacaccttcccccgagcattcaagcaggtaatggaaggccgggatataaagctagtaatcaatcagacagcgcaggactgcttcggatgcctggaatccataagccaaataagaacggcaacccgagataaaaaggacacggtgacccgggagaaacacccaaagaaaccttttcagaagtggatgaagaagagagcaatcaaaaaaggtaattatcttcggttccagcgtttattttatcttgatagagggaaactggctaaaatcattttagatgatattgaatgcttgtcttgtgacataccactcagtgaaatttattcggtttttaaaacaagatgggaaacaactggtagctttaaaagccttggggactttaaaacttacgggaaggctgacaacactgccttcagagaattaattacggctaaagaaattgagaaaaatgtgcaggaaatgagcaaaggctcggctcccggtccagacgggattactcttggggacgtcgtaaagatggatcccgagttttcccggaccatggagattttcaatttatggttaacaactggtaaaatcccggacatggtgagggggtgcagaaccgttttgattccaaaatcatcaaagccggatcgtttgaaagacattaataactggagacctatcacgatcggttccatcttgctgagactgttctccaggattgtaacagctaggctgagcaaagcgtgccccctgaacccaaggcaaagaggctttatcagagcggcgggatgctctgaaaacttaaaactcctgcaaactataatttggtcggccaaaagagaacacagaccactgggtgttgtattcgtggacatcgccaaggcttttgacaccgtaagccaccagcacatcattcatgctttgcagcaaagagaggtggatccccacatcgtcggtctggtgagcaatatgtacgagaacatcagtacgtatatcaccacaaagaggaacacacacacagacaaaatccagatccgggttggagtaaagcagggtgacccgatgtcgccccttttatttaacctggcaatggaccctctattatgcaagctggaagagagtggcaaaggataccaccgaggacagagcagcatcacagcgatggcatttgcagacgatctggttttgctgagcgactcctgggaaaatatgaatacaaatattagcatactggagaccttctgcaatctgaccggactcaaaacacaggggcaaaagtgccacggcttttacatcaagccgacaaagaagtcttacaccatcaatgactgcgctgcctggactatcaacggcacacccctgaacatgatcgaccccggcgaatctgagaaatacctcggcctgcagtttgacccgtggattggaatagcaaggtccggtctctccacaaaactagatttttggcttcagcggatcgatcaagcaccacttaaacctctgcagaaaactgatattctcaaaacatacaccatccctcggctgatctacatagctgaccactcagaagtgaaaagcgcactactcgaaacccttgaccagaagatccggacagcggtcaaggaatggcttcacctacctccgtgcacctgcgatgccatcctgtactcgagcacgagagacggcggtttgggcatcaccaaattggcaggactgatccccagcgtgcaggcccgtagactgcatcggatcgcacagtcatctgacgatacgatgaaatgcttcatggaaaaagagaaaatggaacagctgcataagaaattgtggattcaagctggaggggacagagagaacataccctcgatttgggaagcaccaccgtcgagtgaaccaccaaacaacgtgagcacaaattcggaatgggaagcaccgacccagaaagataaatttccaaagccttgcaattggaggaaaaacgaattcaaaaaatggaccaaattggcatcccaaggccgcggaattgtaaattacgaaagagacaaaattagtaaccattggatccaatactacagacgcatacctcacaggaaactcctcactgcactacaactcagggccaacgtttaccccacgagagaatttctagccaggggtagacaagaccaatacatcaaggcgtgtaggcactgcgatgcggacaacgaatcctgcgcccacatcatcggcaactgcccagtgacacaggacgcccgaatcaagaggcacaattacatctgcgaactgcttctcgaggaggcgaagaagaaggactgggtagtgttcaaggaaccgcacataagggattccaacaaggaactgtacaaacctgacctgatatttgtgaaggatgggcgtgcacttgtcgtggatgtgacagtacggtatgaagcagccaaatcatcgctggaggaagccgctgcagagaaagtgagaaagtacaaacacctggaaacggaagtaagacatctcacgaatgcaaaggacgttacttttgtgggctttcccctaggagcgcgggggaaatggcaccaagataactttaaacttttgactgagcttggcctctccaaatcgaggcaagtgaaaatggcagagactttttccacagtagcgctcttttcatctgtggacattgtacatatgtttgccagtagggccagaaaatctatggttatgtgataataggctgccttctgcggggcttgccttctggccatgcccttcttctctcccttgcacctgtacctcttggtctttgaataaagcctgagtaggaaggaccggtaaaaaaaaaaaaaaaaaaaaaaaaaaaaaaacgttgactaaaaaaaaaaaaaaaaaaaaaaaaaaaaaaaaaaaaaaaaaaaaaaaaaaaaaaaaaaaaaaaaaaaaaa

SEQ ID NO: 10763 - DNA, 5264 bp, synthetic construct
  source 1..5264: mol_type = other DNA
gaaataagagagaaaagaagagtaagaagaaatataagagaattcgccaccatggcccctaagaaaaagcggaaggtgaatatcagcggctctagctgcggcagccccaacagcgccgacaccagcagcgacttcaaggacctgtggaccaagctgaaggaatgccacgaccgggaagtgcagggactccaggtgaaggtcaccaaactcaagcaagaaagaatcctggacgcccagagactggaagaattcttcaccaagaaccagcagctgagagagcagcagaaagtgctgcacgagacaatcaaggttctggaagatagactgcgggccggcctgtgcgacagatgcgccgtgaccgaggaacacatgcgcaaaaagcagcaggagttcgagaacattagacagcaaaatctgaaattgatcacagagctgatgaacgagagaaacacactgcaggaggagaacaagaagctgagcgagcagctgcaacagaagatcgagaatgatcagcaacaccaggccgctgagctggaatgtgaagaggacgtgatccccgacagcccaatcacagctttcagcttttctggcgtgaacagactgaggcggaaggaaaacccccacgtgcggtacatcgagcagacccataccaagctggaacacagcgtgtgtgccaacgagatgagaaaggtgtccaagtcctccacccatccccagcacaaccctaacgaaaatgagatcctggtggctgatacctacgaccagtctcagagccctatggccaaggcccacggcaccagctcttatacccctgataagagctccttcaacctggccaccgtggtggccgagacactgggcctgggcgtgcaggaggaaagcgagacacagggcccaatgagccctctgggagatgagctgtaccactgcctggaaggcaaccacaagaaacagccttttgagtccggctccgagactcctggaacaagcgagagcgctacacctgagggcagccctaagagaaaggtgtccagcgccgagggcgctgccaaggaagagcctaaacggagaagcgccagactgagcgccaagccccccgccaaggtggaagccaagcctaagaaggccgccgctaaggacaagagcagcgataagaaagtccagaccaagggcaagcggggcgccaaaggcaaacaggccgaggtggccaaccaggagacaaaggaagatctgcctgctgagaacggcgaaaccaagaccgaggaatctccagcttctgacgaggccggagagaaggaggccaaaagcgacagcggctctgagacacctggaacaagcgagagcgccaccccggaatcctatgaacaacttgcaccacaaccgtgtgtgggagaaactttacattctagcctcccacgagacagtgaactgtttgtgcctgaagaggggagcagcgagaaggagagcgaggacgcgccaaaaacatctcctccgacgcctgggaaacatggtttggaacagactggggaggaaaaagtgatggtgactgttcctgacaaaaatccaccttgtccttgctgtggtacccgggtaaactctgtgttgaatctgattgaacatctgaaagtgtcacacgggaaaaggggggtttgttttcggtgtgcaaaatgtggaaaggaaaatagtaactatcacagtgttgtttgtcattttaagaaatgcaggggtccagagacggagaaagccccagctggggagtggatttgtgaggtatgcaacagagattttacaaccaaaattggcctgggacaacacaagagattggcacacccagcagtgagaaatcaggaaaggatcgttgcttcccaaccgaaagaaacatcaaatagaggtgctcacaaaaggtgctggacaaaggaggaggaagaattactaataagactggaggctcagttcgagggaaacaaaaatattaataagcttattgcagaacacataaccaccaaaacagctaagcagatcagtgacaaaaggcgattgctgtccagaaagccagcagaggagccacgtgaggagcctggaacgtgtcatcacaccaggagagcagctgcgagcctgagaacggagcctgagatgagtcatcacgcccaggcagaggacagagataatggacctgggagacgccctctgccaggcagggcagctgccggagggagaacaatggacgagataagacgccaccctgataagggcaacggacagcagagacccaccaagcaaaaatcagaagaacagctgcaggcttactataaaaagacactagaggaacgactttcagctggggcacttaacaccttcccccgagcattcaagcaggtaatggaaggccgggatataaagctagtaatcaatcagacagcgcaggactgcttcggatgcctggaatccataagccaaataagaacggcaacccgagataaaaaggacacggtgacccgggagaaacacccaaagaaaccttttcagaagtggatgaagaagagagcaatcaaaaaaggtaattatcttcggttccagcgtttattttatcttgatagagggaaactggctaaaatcattttagatgatattgaatgcttgtcttgtgacataccactcagtgaaatttattcggtttttaaaacaagatgggaaacaactggtagctttaaaagccttggggactttaaaacttacgggaaggctgacaacactgccttcagagaattaattacggctaaagaaattgagaaaaatgtgcaggaaatgagcaaaggctcggctcccggtccagacgggattactcttggggacgtcgtaaagatggatcccgagttttcccggaccatggagattttcaatttatggttaacaactggtaaaatcccggacatggtgagggggtgcagaaccgttttgattccaaaatcatcaaagccggatcgtttgaaagacattaataactggagacctatcacgatcggttccatcttgctgagactgttctccaggattgtaacagctaggctgagcaaagcgtgccccctgaacccaaggcaaagaggctttatcagagcggcgggatgctctgaaaacttaaaactcctgcaaactataatttggtcggccaaaagagaacacagaccactgggtgttgtattcgtggacatcgccaaggcttttgacaccgtaagccaccagcacatcattcatgctttgcagcaaagagaggtggatccccacatcgtcggtctggtgagcaatatgtacgagaacatcagtacgtatatcaccacaaagaggaacacacacacagacaaaatccagatccgggttggagtaaagcagggtgacccgatgtcgccccttttatttaacctggcaatggaccctctattatgcaagctggaagagagtggcaaaggataccaccgaggacagagcagcatcacagcgatggcatttgcagacgatctggttttgctgagcgactcctgggaaaatatgaatacaaatattagcatactggagaccttctgcaatctgaccggactcaaaacacaggggcaaaagtgccacggcttttacatcaagccgacaaagaagtcttacaccatcaatgactgcgctgcctggactatcaacggcacacccctgaacatgatcgaccccggcgaatctgagaaatacctcggcctgcagtttgacccgtggattggaatagcaaggtccggtctctccacaaaactagatttttggcttcagcggatcgatcaagcaccacttaaacctctgcagaaaactgatattctcaaaacatacaccatccctcggctgatctacatagctgaccactcagaagtgaaaagcgcactactcgaaacccttgaccagaagatccggacagcggtcaaggaatggcttcacctacctccgtgcacctgcgatgccatcctgtactcgagcacgagagacggcggtttgggcatcaccaaattggcaggactgatccccagcgtgcaggcccgtagactgcatcggatcgcacagtcatctgacgatacgatgaaatgcttcatggaaaaagagaaaatggaacagctgcataagaaattgtggattcaagctggaggggacagagagaacataccctcgatttgggaagcaccaccgtcgagtgaaccaccaaacaacgtgagcacaaattcggaatgggaagcaccgacccagaaagataaatttccaaagccttgcaattggaggaaaaacgaattcaaaaaatggaccaaattggcatcccaaggccgcggaattgtaaattttgaaagagacaaaattagtaaccattggatcagatactacagacgcatacctcacaggaaactcctcactgcactacaactcagggccaacgtttaccccacgagagaatttctagccaggggtagacaagaccaatacatcaaggcgtgtaggcactgcgatgcggacaacgaatcctgcgcccacatcatcggcaactgcccagtgacacaggacgcccgaatcaagaggcacaattacatctgcgaactgcttctcgaggaggcgaagaagaaggactgggtagtgttcaaggaaccgcacataagggattccaacaaggaactgtacaaacctgacctgatatttgtgaaggatgggcgtgcacttgtcgtggatgtgacagtacggtatgaagcagccaaatcatcgctggaggaagccgctgcagagaaagtgagaaagtacaaacacctggaaacggaagtaagacatctcacgaatgcaaaggacgttacttttgtgggctttcccctaggagcgcgggggaaatggcaccaagataactttaaacttttgactgagcttggcctctccaaatcgaggcaagtgaaaatggcagagactttttccacagtagcgctcttttcatctgtggacattgtacatatgtttgccagtagggccagaaaatctatggttatgtgataataggctgccttctgcggggcttgccttctggccatgcccttcttctctcccttgcacctgtacctcttggtctttgaataaagcctgagtaggaaggaccggtaaaaaaaaaaaaaaaaaaaaaaaaaaaaaaacgttgactaaaaaaaaaaaaaaaaaaaaaaaaaaaaaaaaaaaaaaaaaaaaaaaaaaaaaaaaaaaaaaaaaaaaaa

SEQ ID NO: 10764 - DNA, 4046 bp, synthetic construct
  source 1..4046: mol_type = other DNA
gaaataagagagaaaagaagagtaagaagaaatataagagaattcgccaccatgggcagacctacgagaatctccttcgtgagcgtggccacccagacctcccccctggaccttagagacaacctggtgagttgtagcaccaaggatcacggcggactgctggaggtgcggtttgaaattcggggcctcgagttcgtgaactctgatctggtgggccccaagggccagcagtcccctacactgaccgactacctggccctgctgccagaagtgtacgagatcagcaacagcctgagtctgagagacgagaatacctgtcctacgcctgtggaaatcgagaacgaggaagaagaatccagccccctcggagctaccgccagaaccagccctctgcctagcacccctgtcagccgtagcagagacgacctgcccacagagggtacacccgtggtgaaaattcctgacagaaacaccagctgtccttgctgcggcaatagaatgggcaagctaagcggccttatcgagcacctgaagagggcccatggaaaaaagaagatcctgttccagtgcgccagatgcggaagaactgatgtgcggcaccacagcatcgcctgccacttccctaagtgcaagggccctgtggaagccagccctgagaggagctggaagtgcgaagaatgcgaaaagaccttcgagacaaagattggcctggggcaacacaagagactcgtgcaccccgtgaccagaaatctggagaggattgccgctaccagacccaaggccggaacaatgagaggagcccacagaagatgctggaccgaggacgagattgaactgctgcggaagctggataaacagtacgagggacaaaaaaacatcaacaagctgatcgccgagcacattcctacgaaaaccacaaagcagatcagcgacaaacggagagacctgcacaagagcccagtgaaaaagggcaaagaccacggccggaaaaagcacctggaactggaaggagaacacctggcggaaggcgaacacctggtttgtatcggcagcgagctggagggcggactgagatctcggtacagaaagaccatcgccgagtgggtgacctctggcaaactgtcgatcctgcacggaatgttcgaacaggtgatcgaaggcgaagaggaccctgctatcgtcgccgacagagccatgaaggattgcttcgcctgtctggcctctaaatctgtggaactgaaggccggccaaggcaggccctgccagagggcccagacagccaggcctagcgagcctcctaaaggctggatgaagaagcgggctagaaaaagaggccaatttctgagattccaacgtctgttctacctggaccggggcaagctggccggcatcatcctggatgatgttgaatccctgaagtgcggcatcccccaggacgagatccacgacgtctttaaatctagatgggagagccctggtaccttcaagggcctgggcgcctttagaagcaagggacaggccgataactcagcctttgaggccatgatcacagccagagaaatttccaagaacatcagagagatgaacaagaacagtgcccctggacctgatagactgtccctgcgggacatcatcaagatcgacccccactgtgtgcagctgatggaagttttcaacctgtggctggtcaccggaatcgtgcctgacgtggtcaaggagtgccggacagtgctgatctccaagtcctccctgcctgagagacagatggacatcaacaactggcgccccatcacaatcggcagcatcatcctgagactgttcagtagaatcctgacagccagacttgccaaggcctgccccatcaatcctagacagaagggcttcatccggagcgcaggttgtgccgagaacctgaagctgctgcagctgctcatcaaaaacgccaagaaggaacacagacccctgggcgtggtgtttatcgatctggcaaaagccttcgacacagtgagccaccaccacctcatcgccgttctgaagcagaagggagtggatcaccacatcataaccctgatctctaacatgtaccagaacatcagaacccgaatcaccatgaaaaatgaacagagcgatcccatcggcatccagatcggcgtgaaacagggcgaccctatgtctccactgctcttcaacctgagcgtggaccccctgctgtgtaaactggaggaagagggcaatggctatcaccacggaagcaagtgcgtgacaagcatggcctttgctgatgatctggtgctgctgagcggcagctgggagggcatgcagtctaatattaagatccttgaagcattctgcgacctgaccggcctgagaacacagggcgagaaatgccacggcttttacatccaacctaccaaggacagctacaccatcaacgactgccctccttggcaaattaacggcacacccctgaacatgatcgagcccggctcttccgagaaatacctgggactacgtatcgatccttggaccggcatcagcaaacctgaactgctgatgaaaatcagagattggctgcagagaatcggagaggcccctctgaagccgttccagaaagtggacatcctgaagggatacaccatcccaagactgatctacctggccgaccaggccgacgtgaaggccacctacttggaagagctggacctcgccatccggaccaccgtcaaggaatggctgcatctgccacctagcacctgcgatgctatcctgtactcgtctacccgggatggcggcctgggcatcaccagactgagcggcttaatccccagcatccaggccagacgcctgcataggatcgcccagtcatctgatgacgtgatccggagcatcgtgaagcaagaggggatcgacaaagagttcgagaagctgtggctgatcgccggcggcgacaaggagaagatccccagcatctgggaccctagcgccatccgagtgacaagcgaggaactgggcgaagaggaacttgtttctgaatgggaaatccctacaccaaagaccatcttcccaaagccttgtgattggcggaagcaggagttcaagaattggaccaagctgcagagccagggcagaggcatcgctaacttcgagaaggacaagatctccaacaactggctggaaagataccggggcatcccacacagaaagctgttgaccgccctccagctgcgggctaatgtgtaccctacaagagagttcctggccagaggcagacaggaaagccacatcaagagctgtagacattgccaggctgaaaacgagagcagcgcccacatcatcggctactgccctgccgtgcaggacgccagaatcaagcgccacaaccagctgtgcgacctactggccgtggaggtgaagcggaaggactggatcgtgttccaggagcctatcctgaaagacgagcagaatgagatctataagcccgacctcgtgttcgtgaaaggcgatcaggctatcgtgatcgacgtgacaatcagatatgagtcaaaactgtcaagcctggccgacgccgctgccgaaaaggtgaagaagtactgccacctgaagagccagatccaggagctgaccaacgccaagaacatcacattcaagggcttcccagtcggcgctagaggcaagtggtacagcggcaactacgaggtgctgaaggctctgggcatttctaacagcagacaagataagatcgctagatgcatgagccggaaggccctgttcaccagcgtggacatcatccacatgttcgtgtctcacagcagaagtatcgtgcgaacctgataataggctgccttctgcggggcttgccttctggccatgcccttcttctctcccttgcacctgtacctcttggtctttgaataaagcctgagtaggaaggaccggtaaaaaaaaaaaaaaaaaaaaaaaaaaaaaaacgttgactaaaaaaaaaaaaaaaaaaaaaaaaaaaaaaaaaaaaaaaaaaaaaaaaaaaaaaaaaaaaaaaaaaaaaa

SEQ ID NO: 10765 - DNA, 4022 bp, synthetic construct
  source 1..4022: mol_type = other DNA
gaaataagagagaaaagaagagtaagaagaaatataagagaattcgccaccatgggcagacctatcagagtggcctttgtgtccgtggctacccagaccagccccctggatctgagagatgacgtggtcatcaagtctattatcgaccacagagaggtggttggagaggagatcgagtacagaggcttggaattcatcaacagccagattgtgggcgtgatggcccaccctcctacccctatcgaaacactggccatgctgcccgacgtctacgaggtgcccgacgtggggcctagaggcgccacaacctccccacatctggttgaggtggaatcagaagaggaggttctgtccccccctggcgccaccgcccaccccattcagatcccttccacacctatcctgggagctggcagcgagcaccctacagagggcacccctgtggtgaaagtgcctgacaacaaccccccctgtccttgctgcggcaatagaatgggaaagatgagcggcctgatcgagcacctgcggagagcccacggcaagcgcaagatcctgttccaatgtgctcggtgcggaagaaccaacgtgaagcaccactctatcgcctgccacttccccaaatgtaaaggcgatatcaccagccctcccaaaggcgactgggtgtgcgaagagtgcggcaaggcctttgaaacaaaaatcggcctaggccagcacaagcggctggtccaccctgccgcccggaacatcgaaagaatcatcgccagccggccaaaggaaggcaccgccagaggcctgcatagacagtgctggaccgaagaggaagtggaactgcttaagagactcgataagcagtacgagggctccaagaacatcaacaagctgatcgccgagcacatcccctctaagaccgctaagcagatcagcgacaagcggagaggccttcataaaagccccatcaagcgaggaaaggaacagggaggcaaaaagctgctggaagaggaaggcgagcacctggtggaaaccggcagccacgagaacggaggtttaagatcccactacagaagaaccgtgagcgagtggatcaccagcgagaaactacccatactgcagggcacattcgagagcgtgctggaaggttcaggcgagccctctacactggtggacgaggccgtggacgagagctacgcccgcatgttcagaaccagcatcgagctgaaagcttgtcaagagagaaagcagcggatggccagacgggccagacccagcgaaccaccgaagggctggatgaaaagacgcgccaagaagagaggccagttcctgagattccagagactgtttcacctggatagaggtaagctggccggcatcatcctggatgatgtggaaagcctgaagtgcgagatcccactggacgaggtgcacagcgtgttcaagagccggtgggagagccccggaaccttcaagggactgggcgcttttagaaccaacggccaggccgataatagcgccttcgaggctatgatcacagccaaggaaatctcaaagaacattaaggagatgagcaagaacgccgctcctggccctgacggcctgaccctgcgcgacctgatcaagatggaccctgagtgcgatcaactgatggaagtgttcaacctgtggctggtgacaggctccatccctgacatggtcagagagtgtagaacagtcctcatcagcaagtccgccctgcctgaacggcagagagacattaacaactggcggcctatcaccatcggctctatcctgctgcggctgtttagcagaatcctgaccgccagactgaccaaagcttgccctatcaaccctagacagagaggctttatcaagagcgccggctgcgccgagaacctgaagctgctgcagctgctgatcaaaaatgccaaaaaggaacacagacccctgggcattgtgttcgtggacctggccaaggccttcgacacagtaagccaccaccatattatcatggccctgaagcagcggggagtggataaccacatcatcgcactgatcaagaatctgtacagcaacatcagcacaagaatctacttgaagaacgagcagtccgaccctatcggcattcacatcggcgtgaagcagggcgacccgatgagccctatcctgttcaacctgagcatcgaccctctgctctgcaagctggaagaggaaggaaacggcttccaacactgcagcagaacaatcaccgccctggccttcgccgacgacctggtcctcctaagcggctcttgggagggcatggaacggaacatcgagatccttgaagccttttgcgagctgacaggcctgaaaacccagggcgagaagtgtcacggcttctacatcaagcccaccaaggacagctataccataaacgactgccctgcctggaccataaatggcacccctctgaacatgatcgagcctggaagtaccgagaaatatctgggactgcaaatcgacccttgggtgggaatctctaagcctgagctgcggatgaagatcgaggactggctccagcgaatcggccgggctcctctgaaacccttccagaaggtggacatcctgaaaggctacaccatcccaagactgatttacctggcagaccaggccgatgtgaaggtgacctacctggaaagcctggacttgatcatcagaacgaccgtaaaagaatggctgcacctgcctacatctacctgtgatgccatcctgtacagcaatacccgcgatggcggcttgggcatcactagactggtgggcctgatccctaacatccaggctagacggctgcacaggatcgcccagagcagcgacgagctgatcagaagcgtggtgaaggaagaaggcatcgagagagaattcgagaagctctgggtcacagccggaggaaagaaggacaagatccccagcatctgggacccaggcaccgtgatgatcatttctgaaggcgtgggcggcgaggaacctgccagcgaatgggaaatcccagcccctaaggccatttttccacggccttgtgactggcggaaacaggagttcgccaactggacaaagttgctgtcccagggcagaggtatctctaacttcgaaaaggacaagatcagcaacagctggctggaatactacagaggcatccctcaccggaagctgattaccgccctgcagctgagagcaaatgtgtaccctaccagagaattcctggccagaggcaggcaggagtaccagatcaaagcctgcagacactgtcaggccgaaaacgagtcctgcgcccacataataggattctgccccgccgtgcaggacgcccggatcaagcggcacaaccagctgtgcgagctgctagcaaacgaggccaagaagaaggactggatcatcttcaatgaaccagtgctgagggatgaacagaacgagctgtataaacctgatctgatcttcgtgaaagaaaatcaggctatggtggtggacatcaccatcagatacgagtctaaaatcacaagcctggtggatgccgctgccgaaaaggtgaagaaatacgagcacctgaagattcagatccaggacctgacaaactgcgagaacatcaagttctacgggttccctatcggcgccagaggaaagtggtaccagggcaactaccagctgctgacagagctgggactgagcagtagccggcaagagaaagtggcccgccagatgtctaagcgggccctgttcaccagcgttgatatcatgcacatgttcatgagcaagagccggagcgtggtgcggagctgataataggctgccttctgcggggcttgccttctggccatgcccttcttctctcccttgcacctgtacctcttggtctttgaataaagcctgagtaggaaggaccggtaaaaaaaaaaaaaaaaaaaaaaaaaaaaaaacgttgactaaaaaaaaaaaaaaaaaaaaaaaaaaaaaaaaaaaaaaaaaaaaaaaaaaaaaaaaaaaaaaaaaaaaaa

SEQ ID NO: 10766 - DNA, 4433 bp, synthetic construct
  source 1..4433: mol_type = other DNA
gaaataagagagaaaagaagagtaagaagaaatataagagaattcgccaccatggcttcttgccctaagcttggacctcctatttctgctggcgctatgtctcttgagtctggccttactactcactctgtgcttgctattgagcacggccctaactctcttgctaactctggctctgacttcggcggcggcggacttggccttcctgtttgtttgcttcgtgtgtctgtgggcactcagacttctcgttctgactgggtggaccttgtgtcttggagccaccctggcccttcttctaagtctcagcgtgtggacctggtgtctcttttccctaagcaccgtgtggacttgctttctaagaacgaccaggtggacttggtggctcagttccttccttctaagttccctcctaaccttgctgagaacgaccttgctcttcttgtgaaccttgagttctaccgttctgaccttcacgtgtacgagtgcgtgcacttcgctgctgactgggagggcctttctggcttaccagaggtgtacgagcagcttgctcctcagccttgcgtgggcgagactcttcactcttctcttcctcgtgactctgagcctttcgtgcctgaggagggctcttctgagaaggagtctgaggacgctcctaagacttctcctcctactcctggcaagcacggcgagcagactggcgaggagaaggttgtggtgactgtgcctgacaagaaccctccttgcccttgctgcggcactcgtgtgaactctgtgctgaaccgtattgagcaccttaaggtgtctcacggcaagcgtggcgtgtgcttccgttgcgctaagtgcggcaaggaaaactctaactaccactctgtggtgtgccacttccctaagtgccgtggccctgagactgagaaggctcctgctggagaatggatttacgaggtgtgcaaccgtaacttcactactaagattggccttggccagcacaagcgtcttgctcaccctgctgtgcgtaaccaggagcgtattgtggcttctcagcctaaggagacttctaaccgtggcgctcacaagcgttgctggactaaggaggaggaggaacttcttattcgtcttgaggctcagttcgagggcaacaagaacattaacaagcttattgctgagcacattactactaagactgctaagcagatttctgacaagcgtcgtcttttgcctcgtaagcctgctgaggagactcgtgaggagcctggcgtgtgtcaccgtactcgtcgtgctgctgctggccttcgtactgagcctgagatgtctcaccacgctcaggctgaggctcgtgacaatggccctggacgtagacctcttcctggccgtgctgccgctggaggacgtactatggatgagattcgtcaccaccctgacaagggcaacggccgtcagcgtactactaagcagaagtctgagggccagcttcaggcttactacaagaaaactcttgaggagcgtctttctgccggcgctcttaacactttccctcgtgctttcaagcaggtgactgagggccgtgacattcagcttgtgattaaccagactgctcagtcttgcttcggctgccttgagtctatttctcagattcgtactgctactcgtgacaagaaggacactgtgactcgtgaagagcgtcctaagaagcctttccagaagtggatgaaggaccgtgctattaagaagggcaactaccttcgtttccagcgtcttttctaccttgaccgtggcaagcttgctaagattattcttgacgacattgagtgcctttcttgcgacattcctccttctgagatttactctgtgttcaagactcgttgggagactactggcaacttcaagtctcttggcgacttcaagacttacggcaaggctgacaacactgctttccgtgagcttattactgctaaggagattgagaagaacgtgcaggagatgtctaagggctctgctcctggccctgacggcattactcttggcgatgtggtgaagatggaccctgagttcagtagaacgatggagattttcaacctttggcttactacgggcaagattcctgacatggtgcgtggctgccgtactgtgcttattcctaagtctactaagcctgaccgtcttaaggacattaacaactggcgtcctattactattggctctattcttcttcgtcttttctctcgtattgtgactgctcgtctttctaaggcttgccctcttaaccctcgtcagcgtggcttcattcgcgccgctggatgttctgagaaccttaagcttcttcagactattatttggtctgctaagcgtgagcaccgtcctcttggcgtggtgttcgtggacattgctaaggctttcgacactgtgtctcaccagcacattattcacgctcttcagcagcgtgaggtggaccctcacattgtgggccttgtgtctaacatgtacgagaacatttctacttacattactacgaagcgtaacactcacactgacaagattcagattcgtgtgggcgtgaagcagggcgaccctatgtctcctcttcttttcaacctggctatggaccctcttctttgcaagcttgaggagtctggcaagggctaccaccgtggccagtctagcattactgctatggctttcgctgacgaccttgtgcttctttctgactcttgggagaacatgaacactaacatttctattcttgagactttctgcaaccttactggccttaagactcagggccagaagtgccacggcttctacattaagcctactaaggactcttacactattaacgactgcgctgcttggactattaacggcactcctcttaacatgattgaccctggcgagtctgagaagtaccttggccttcagttcgacccttggattggcattgctcgttctggcctttctactaagcttgacttctggcttcagcgtattgaccaggctcctcttaagcctcttcagaaaactgacattcttaagacttacacgattcctcgtcttatttacattgctgaccactctgaggtgaaaactggccttcttgagacgcttgaccagaagattaggactgctgtgaaggagtggcttcaccttcctccttgcacttgcgacgctattctttactcttctactcgtgatggcggccttggcattactaaactggctggccttattccttctgtgcaggctagacggttacaccgtattgctcagtctagcgacgagactatgaagtgcttcatggagaaggagaagatggagcagcttcacaagaagctttggattcaggctggcggcgaccgtgagaacattccttctatttgggaggctcctccttctattgagcctcctaacaacgtgtctactaactctgagtgggaggcccctactcagaaggacaagttccctaagccttgcaactggcgtaagaacgagttcaagaagtggactaagcttgcttctcagggccgtggcattgtgaacttcgagcgtgacaagatttctaacccttggatacagtactaccgtcgtattcctcaccgtaagcttcttactgctcttcagcttcgtgctaacgtgtaccctactcgtgagttccttgctcgtggccgtcaggaccagtacattaaggcttgcaggcactgcgacgctgacattgagtcttgcgctcacattattggcaactgccctgtgactcaggacgctcgtattaagcgtcacaactacatttgcgagcttcttcttgaggaggctaagaagaaggactgggtggtgttcaaggagcctcacattcgtgactctaacaaggagctttacaagcctgaccttattttcgtgaaggacgctagggctcttgtggtggacgtgactgtgcgttacgaggctgctaagtctagccttgaggaagctgctgctgagaaggtgcgtaagtacaagcaccttgagatggaggtgcgtcaccttactaacgctaaggacgtgactttcgtgggcttccctcttggcgctcgtggcaagtggcatcaagacaacttcaagcttctgactgagcttggcctctcaaagtctcgtcaggtaaagatggctgagactttcagcactgtggctcttttctcttctgtggacattgtgcacatgttcgcttctcgtgctcgtcagatggtgatgtgataataggctgccttctgcggggcttgccttctggccatgcccttcttctctcccttgcacctgtacctcttggtctttgaataaagcctgagtaggaaggaccggtaaaaaaaaaaaaaaaaaaaaaaaaaaaaaaacgttgactaaaaaaaaaaaaaaaaaaaaaaaaaaaaaaaaaaaaaaaaaaaaaaaaaaaaaaaaaaaaaaaaaaaaaa

SEQ ID NO: 10767 - DNA, 4436 bp, synthetic construct
  source 1..4436: mol_type = other DNA
gaaataagagagaaaagaagagtaagaagaaatataagagaattcgccaccatggcttcttgccctaagcctggacctcctgtgtctgctggcgctatgtctcttgagtctggccttactactcactctgtgcttgctattgagcgtggccctaactctcttgctaactctggctctgacttcggcggcggcggacttggccttcctgtttgtttgcttcgtgtgtctgtgggcactcagacttctcgttctgactgggtggaccttgtgtcttggagccaccctggcccttcttctaagtctcagcgtgtggacctggtgtctcttttccctaagcaccgtgtggacttgctttctaagaacgaccaggtggacttggtggctcagttccttccttctaagttccctcctaaccttgctgagaacgaccttgctcttcttgtgaaccttgagttctaccgttctgaccttcacgtgtacgagtgcgtgcacttcgctgctgactgggagggcctttctggattgccggaggtgtacgagcagcttgctcctcagccttgcgttggcgagactcttcactcttctcttcctcgtgactctgagcctttcgtgcctgaggagggctcttctgagaaggagtctgaggacgctcctaagacttctcctcctactcctggcaagcacggcgagcagactggcgaggagaaggttgtggtgactgtgcctgacaagaaccctccttgcccttgctgcggcactcgtgtgaactctgtgctgaaccgtattgagcaccttaaggtgtctcacggcaagcgtggcgtgtgcttccgttgcgctaagtgcggcaaggaaaactctaactaccactctgtggtgtgccacttccctaagtgccgtggccctgagactgagaaggctcctgctggagaatggatttacgaggtgtgcaaccgtaacttcactactaagattggccttggccagcacaagcgtcttgctcaccctgctgtgcgtaaccaggagcgtattgtggcttctcagcctaaggagacttctaaccgtggcgctcacaagcgttgctggactaaggaggaggaggaacttcttattcgtcttgaggctcagttcgagggcaacaagaacattaacaagcttattgctgagcacattactactaagactgctaagcagatttctgacaagcgtcgtcttttgcctcgtaagcctgctgaggagactcgtgaggagcctggcgtgtgtcaccgtactcgtcgtgctgctgctggccttcgtactgagcctgagatgtctcaccacgctcaggctgaggctcgtgacaatggccctggacgtagacctcttcctggccgtgctgccgctggaggacgtactatggatgagattcgtcaccaccctgacaagggcaacggccgtcagcgtactactaagcagaagtctgagggccagcttcaggcttactacaagaaaactcttgaggagcgtctttctgccggcgctcttaacactttccctcgtgctttcaagcaggtgactgagggccgtgacattcagcttgtgattaaccagactgctcagtcttgcttcggctgccttgagtctatttctcagattcgtactgctactcgtgacaagaaggacactgtgactcgtgaagagcgtcctaagaagcctttccagaagtggatgaaggaccgtgctattaagaagggcaactaccttcgtttccagcgtcttttctaccttgaccgtggcaagcttgctaagattattcttgacgacattgagtgcctttcttgcgacattcctccttctgagatttactctgtgttcaagactcgttgggagactactggcaacttcaagtctcttggcgacttcaagacttacggcaaggctgacaacactgctttccgtgagcttattactgctaaggagattgagaagaacgtgcaggagatgtctaagggctctgctcctggccctgacggcattactcttggcgatgtggtgaagatggaccctgagttctcacgtacgatggagattttcaacctttggcttactacgggcaagattcctgacatggtgcgtggctgccgtactgtgcttattcctaagtctactaagcctgaccgtcttaaggacattaacaactggcgtcctattactattggctctattcttcttcgtcttttctctcgtattgtgactgctcgtctttctaaggcttgccctcttaaccctcgtcagcgtggcttcattcgagcggccggatgttctgagaaccttaagcttcttcagactattatttggtctgctaagcgtgagcaccgtcctcttggcgtggtgttcgtggacattgctaaggctttcgacactgtgtctcaccagcacattattcacgctcttcagcagcgtgaggtggaccctcacattgtgggccttgtgtctaacatgtacgagaacatttctacttacattactacgaagcgtaacactcacactgacaagattcagattcgtgtgggcgtgaagcagggcgaccctatgtctcctcttcttttcaacctggctatggaccctcttctttgcaagcttgaggagtctggcaagggctaccaccgtggccagtctagcattactgctatggctttcgctgacgaccttgtgcttctttctgactcttgggagaacatgaacactaacatttctattcttgagactttctgcaaccttactggccttaagactcagggccagaagtgccacggcttctacattaagcctactaaggactcttacactattaacgactgcgctgcttggactattaacggcactcctcttaacatgattgaccctggcgagtctgagaagtaccttggccttcagttcgacccttggattggcattgctcgttctggcctttctactaagcttgacttctggcttcagcgtattgaccaggctcctcttaagcctttacaaaaaactgacattcttaagacttacacgattcctcgtcttatttacattgctgaccactctgaggtgaaaactggccttcttgagacgcttgaccagaagattaggactgctgtgaaggagtggcttcaccttcctccttgcacttgcgacgctattctttactcttctactcgtgatggcggccttggcattacaaagttggctggccttattccttctgtgcaggctcggcgtctgcaccgtattgctcagtctagcgacgagactatgaagtgcttcatggagaaggacaagatggagcagcttcacaagaagctttggattcaggctggcggcgaccgtgagaacattccttctatttgggaggctcctccttcttctgagcctcctaacaacgtgtctactaactctgagtgggaggcccctactcagaaggataagttccctaagccttgcaactggcgtaagaacgagttcaagaagtggactaagcttgcttctcagggccgtggcattgtgaacttcgagcgtgacaagatttctaacccttggatacagtactaccgtcgtattcctcaccgtaagcttcttactgctcttcagcttcgtgctaacgtgtaccctactcgtgagttccttgctcgtggccgtcaggaccagtacattaaggcttgcaggcactgcgacgctgacattgagtcttgcgctcacattattggcaactgccctgtgactcaggacgctcgtattaagcgtcacaactacatttgcgagcttcttcttgaggaggctaagaagaaggactgggtggtgttcaaggagcctcacattcgtgactctaacaaggagctttacaagcctgaccttattttcgtgaaggacgctagggctcttgtggtggacgtgactgtgcgttacgaggctgctaagtctagccttgaggaagctgctgctgagaaggtgcgtaagtacaagcaccttgagactgaggtgcgtcaccttactaacgctaaggacgtgactttcgtgggcttccctcttggcgctcgtggcaagtggcatcaagacaacttcaaattattgactgagcttggcctcagcaagtctcgtcaagtgaaaatggctgagactttcagcactgtggctcttttctcttctgtggacattgtgcacatgttcgcttctcgtgctcgtaagtctatggtgatgtgataataggctgccttctgcggggcttgccttctggccatgcccttcttctctcccttgcacctgtacctcttggtctttgaataaagcctgagtaggaaggaccggtaaaaaaaaaaaaaaaaaaaaaaaaaaaaaaacgttgactaaaaaaaaaaaaaaaaaaaaaaaaaaaaaaaaaaaaaaaaaaaaaaaaaaaaaaaaaaaaaaaaaaaaaa

SEQ ID NO: 10768 - DNA, 5204 bp, synthetic construct
  source 1..5204: mol_type = other DNA
gaaataagagagaaaagaagagtaagaagaaatataagagaattcgccaccatggcccctaagaaaaagcggaaggtgaatatcagcggctctagctgcggcagccccaacagcgccgacaccagcagcgacttcaaggacctgtggaccaagctgaaggaatgccacgaccgggaagtgcagggactccaggtgaaggtcaccaaactcaagcaagaaagaatcctggacgcccagagactggaagaattcttcaccaagaaccagcagctgagagagcagcagaaagtgctgcacgagacaatcaaggttctggaagatagactgcgggccggcctgtgcgacagatgcgccgtgaccgaggaacacatgcgcaaaaagcagcaggagttcgagaacattagacagcaaaatctgaaattgatcacagagctgatgaacgagagaaacacactgcaggaggagaacaagaagctgagcgagcagctgcaacagaagatcgagaatgatcagcaacaccaggccgctgagctggaatgtgaagaggacgtgatccccgacagcccaatcacagctttcagcttttctggcgtgaacagactgaggcggaaggaaaacccccacgtgcggtacatcgagcagacccataccaagctggaacacagcgtgtgtgccaacgagatgagaaaggtgtccaagtcctccacccatccccagcacaaccctaacgaaaatgagatcctggtggctgatacctacgaccagtctcagagccctatggccaaggcccacggcaccagctcttatacccctgataagagctccttcaacctggccaccgtggtggccgagacactgggcctgggcgtgcaggaggaaagcgagacacagggcccaatgagccctctgggagatgagctgtaccactgcctggaaggcaaccacaagaaacagccttttgagtccggctccgagactcctggaacaagcgagagcgctacacctgagggcagccctaagagaaaggtgtccagcgccgagggcgctgccaaggaagagcctaaacggagaagcgccagactgagcgccaagccccccgccaaggtggaagccaagcctaagaaggccgccgctaaggacaagagcagcgataagaaagtccagaccaagggcaagcggggcgccaaaggcaaacaggccgaggtggccaaccaggagacaaaggaagatctgcctgctgagaacggcgaaaccaagaccgaggaatctccagcttctgacgaggccggagagaaggaggccaaaagcgacagcggctctgagacacctggaacaagcgagagcgccaccccggaatcctatgaaactccgagggtgatgggcaaagtcaccagcccgagttctgtgctgaccgaacatgagggagatagaacatcttctcccccaagaacaccacctcctattcttgagaccggggcagaccttccacaggagggcacacctgtggtaaaggtcccggatgataatccagcgtgtccatgctgcggtaatcgaataggaaggatttcggggcttatcgatcacttaaagagaacccatggaaagaaaaagatcctctttcaatgtgccaaatgtgggagaacaaatctgaaacatcacagtatcgcttgtcacgttccaaagtgcaaaggcgccaaggggaccagcccattaaggggctgggcctgcgaggaatgcaatagaacatttgggactaaaattggcttaggacaacacaagagattggcacacccagcagtgagaaatcaggaaaggatcgttgcttcccaaccgaaagaaacatcaaatagaggtgctcacaaaaggtgctggacaaaggaggaggaagaattactaataagactggaggctcagttcgagggaaacaaaaatattaataagcttattgcagaacacataaccaccaaaacagctaagcagatcagtgacaaaaggcgattgctgtccagaaagccagcagaggagccacgtgaggagcctggaacgtgtcatcacaccaggagagcagctgcgagcctgagaacggagcctgagatgagtcatcacgcccaggcagaggacagagataatggacctccatctaaaaagaaggtgaaagagctggggataagagaagaacttatgaaagagggagaatatctggaaaggagtggctcccaagaagaggggggactaaggtcccgatatcgaaagtcgattgcagaatggttaagaactcggaaaataaccactctcagggagatctacgagagagtgatgaaagggaaaaaagatcttcccgcgctagtggatgaagctgcccagggccactatgcatgcctgaaaaaagatcttttggaaggggaaagacggcaaattcagaagatccgagaaatccgcagatcccgtccacagaaaccatcaaagcaatggacaataaagagggccagaaaaagggggcagttcctacggttccagcggctattccatctggatagaaggaaactggccggtattatcctggacgatgtagaatccctccaatgtggtattccacttgatgcgatacatgaggtattcaagtcaagatgggaatcacccggaacattcaagggcctgggtacattctgtaccaatggacttgcagataattcagcattccaacctatgattactgtgaaggagattgagaagaatatcagagaaatgaacaaaaatacagcaccaggaccggatggggtcactctgcgggatctcatgaaagccgatccccaatgtgtcaatttaatggaattatttaatttatggttattaaccgggtatataccggatggcattaaaaattgtagaacaatattgatacctaaatcaaatgtaccagaaaagttaaacgatgtgaacaattggagacctataacaattggctcgattatattaagattgttttctaaaatattaacggcacgattaagtaaggcatgcccaattaatacccggcagagggggtttataaaatcgcctggatgctccgaaaatttaaaattattacagcttgtgattcagtatgcaaaaagggagcaccgccctctcggggtagtctttgttgatctggcgaaagcatttgatacggtgagccatgctcatataatagcagtattaaagcaaaaaggtgtggatgaacatataataaatttgattgaaaattcttatcataatattaagacttatattgatatgaaaaaggaaaaatctgactcaattggaattcgaattggagtaaaacaaggcgatccaatgtctccaattttgtttaacttatctgtcgatcctctattatgtaaactggatgagattggtaatgggtttgagtgtcatacgaaagttgtaacatcactggccttcgccgacgatttagtattattaagtgggtcctgggaaggcatgcagaaaaacatagaaattgtcgagaccttttgtgaacttacgggtctcaaaatgcagggggaaaaatgtcacggcttttacatcaagccaacaaaagattcatatactatcaatgattgtcctccttggactattaatggcaccccccttaatatgattgaacccggtagctctgagaaatatttgggtctccgtatagacccatggacaggaatatctaaaccagaactactggagaaagttgatagatggcttgcgaaagtgggaaaggctcctttgaaaccttttcagaaggttgatatcttgaaagggcacttgatcccaagattgatataccttgcggaccaagcaaatttaaaaccaactcatttggaaaatattgatttggccatacgaaacggagtcaaggagtggttgcacttaccagcgtgcacatgtgatgccatcctgtattctaatactcaggatggaggattgggaattaatagattggcagcattaattcctaatgttcaaactcgacgattacatagaattgcccagacaacggatgatgtattgaaagagattgtgaaacaagaaggaattgagagagaatatgagaaattgtgggtaatggctggtggtgataaggaaaagataccatctatatgggacccgaaatcaataatggtaatatcagaaacgggcggggaagaactatcggaatgggagtcccccaatccaaaattgatttatccaaaaccttgtaactggagaaaaagggaatttaacaattgggtcaaattgtcaacacagggtcgaggtattagtaattttgaaaaagataaaataagtaataattggatacaacaatataggggcattcctcaaaggaaagtaattacagcattacaattacgtgctaatatctatccaacaagggaatttttagcgagaggacaatcagaaacatatattaaatcttgtcgtcattgtcaggctgatatagaaacgtgtgcacatataattggctattgtccatctgtacaggatgcaagaattaaaagacataatcaaatttgtaatatattggcagaggaagctaagagtaaagattggcttgtgtatcaagaaccattattaagagatgaatcaaatgaattatataaacctgatttaatttttgttaaggagaatcaggctattgtgacggatgtaactgtacggtatgaagcagccaaatcatcgctggaggaagccgctgcagagaaagtgagaaagtacaaacacctggaaacggaagtaagacatctcacgaatgcaaaggacgttacttttgtgggctttcccctaggagcgcgggggaaatggcaccaagataactttaaacttttgactgagcttggcctctccaaatcgaggcaagtgaaaatggcagagactttttccacagtagcgctcttttcatctgtggacattgtacatatgtttgccagtagggccagaaaatctatggttatgtgataataggctgccttctgcggggcttgccttctggccatgcccttcttctctcccttgcacctgtacctcttggtctttgaataaagcctgagtaggaaggaccggtaaaaaaaaaaaaaaaaaaaaaaaaaaaaaaacgttgactaaaaaaaaaaaaaaaaaaaaaaaaaaaaaaaaaaaaaaaaaaaaaaaaaaaaaaaaaaaaaaaaaaaaaa

SEQ ID NO: 10769 - DNA, 3983 bp, synthetic construct
  source 1..3983: mol_type = other DNA
gaaataagagagaaaagaagagtaagaagaaatataagagaattcgccaccatgggatggtccggccggatttggtttgtgtctgtggccactcagaccaagtacagcgactgggccttcaccgtgcccagcatcctgaaccccgagctggctggcgacggaatcgccgaaatcaggggcctcgagttcgtgaacagcgagaaaggctattacgtgggcctgagcccttctagatcctctctgctggcaacactgccagaggtgtacgagtccccaagagtgatgggcaaagttatctctcctagtagcgtgcagacagagtacgagggcgagagaacctccagcccccctcggacccctccacctatcctggaagctggagctgacctgcctcaagagggcacccctgtggtgaaggtgccagacaacaaccctgcctgcccatgttgcggcaacagaatgggcagaatcaccggcctgatcgaccacctgaaacggacccacggaaagaagaagatcctgttccagtgcgcccgctgcggcagaaccaatctgaagcaccactctatcgcctgtcacgtgcctaagtgcaagggcgccaaggagagcagcccactgaggggctggacctgtgaagagtgcaatagaacatttggtaccaagatcggcctgagccaacacaagcggctcgcgcatcctgtgaccagaaacatcgaaagaatcaccgcctctagacctaaggaagaaagcgccagaggcgctcatagaagatgctggtccgaggaagaagtggaactgctcaagaaactggaaaagcagtacgagggaaacaagaacattaacaagctgatcgccgaacacctgcccacaaagaccgccaaacagatctccgataagagaaggggactggtcaaaagcccttctaagaagaagggcaaggacctggccctgcgggagcaactgatggaagagggagagcacctggtggaatctggctctcaggagggcggcggcctgcggtcccactacagaaaaagcatcgcagaatggctgcgcagccaaaagatcacgacactgcgtaagatctacgagcgggtgatcaagggcaaggaagatttgcctagcctggtggacgaggccgcacaggattgctacgcctgcctgaagaaggacctgatcgagggcgagggccgccagattcagaagatcagagagatccggcggcctcggcctcagaagcctagcaagcagtggaccaagaagagagcccggaagcgaggccagttcctgagattccagagactattccacctggacagaggcaagctggccggcatcatcctggacgacgtggaaagcctgaaatgcggcattcccctggatgccgtgcacgaggtgttcaagtccagatgggagtcccccggaacttttaagggcctgggcacattttgcaccatcggccacgccgataacagcgccttccagagcatgatcaccgcgaaggagatcaaaaagaacatccgggagatgaacaagaacgccgctcctggccctgatggaatcaccctgagagatctgatgaagatcgacccccagtgcgtgaagctgatggaacttttcaacctgtggctgctgacaggctacatccccgacggcgtgaagaattgcagaacaatcctgatccccaaaagcaacgtgccggaaaaactgaacgacgtcaacaactggaggcctatcacaatcggcagcatcattctgcggctgttcagcaagatcctgacagctcggctgagcaaggcttgtcccatcaatacaagacaaagaggatttatcaaaagcccaggatgtagcgaaaacctgaagctgctgcagctgctgatacggtatgccaagagagagcacagacccctgggcgtggtgttcgtggacctggccaaggcgttcgatacagtgagccacagccacatcctggctgtgttgaagcagaagggcgtcgacgagcacatcatcagactgatcgagaacagctaccacaatatcaagacctacatcgacatgaaaaacgaaaagagcgatagcatcggcatcagaatcggcgtcaagcagggcgaccctatgagccctatcctgttcaacctgtctgtggacccactgttgtgcaagctggaagagatcggcaacggtttccagtgtcacagccagaatgtgacagcgctggcctttgccgacgatctcgtgctgctgagcggcagctgggagggcatgcagaacaacattgagatcgtggaaaccttctgcgagctgaccggacttaagatgcagggcgagaagtgccacggcttctacatcaagccgacaaaggattcttacaccattaatgactgtcctccttggacaatcaacggcacccccctcaacatgatcgagcccggctcaagcgagaaatatctggggctgtacatcgatccctggaccggcatcagcaaacctgaactgctcgaaaaagtggacagatggctggccaaggtgggcaaggcccctctgaaaccgttccagaaagtggacatcctgaaaggctacctgatccctagactgatctacctggccgatcaggccaacctgaagccaacctacctggagaacatcgacctggctatccggaatggcgtgaaagagtggctgcacctgcccgcctgtacctgcgacgccatcctgtacagcaacacccaggacggcggcctgggcatcagcagactggctgccctgatcccaagcgtgcaggccagacggctgcaccggatagcccagacctccgacgacgtgttaaaggaaatcgtgaaacaggaaggcatcgagagagaattcgagaagctgtggctgatggccggtggcgataaggaaaagatccctagcatttgggacccaaagacgatcatggtgatcagcgagacaggaggagatgagctgtctgaatgggaaaccccaaaccctaagctgatctaccctaagccctgcaactggcggaagcgggaattcaacaactggaccaagctcctgtctcagggaagaggcatcgtgaacttcgagaaggataagatatctaacaattggatcacccaatacagagggatccctcagaggaagctgatcaccgctctgcagctccgggccaatatctaccccaccagagagttcctggccagaggcagaagcgagacatacatcaaatcatgcagacactgccaggccgacaacgagacatgtgcccacatcatcggctactgcccttcagtgcaggacgccagaatcaagcgccacaaccagatctgccatatcctggcggaagaggccaagtctaaggactggctcgtctaccaggagcctctgctgcgcgacgagcagaatgagctgtataagcctgatctgatcttcgtgaaaggaaaccaggccatcgttacagacgtgaccatccggtacgaaaccaccatcacaaccctggaggaagccgccctggaaaaggccaagaaatacgctcacctgaagagccaagtgcaagatctgaccaacaccagcatcattaacttcacaggtttccctctgggaagcagaggaaaatggtaccagggcaattacaagatcctcaaagagctgggcctgagcagcagcagacaggagaaggtggcccggcgtctgagcaactacgccctgttcagcagcgtggatatcgtccacatgttcgccagcaaggccagaacagaggttagatgataataggctgccttctgcggggcttgccttctggccatgcccttcttctctcccttgcacctgtacctcttggtctttgaataaagcctgagtaggaaggaccggtaaaaaaaaaaaaaaaaaaaaaaaaaaaaaaacgttgactaaaaaaaaaaaaaaaaaaaaaaaaaaaaaaaaaaaaaaaaaaaaaaaaaaaaaaaaaaaaaaaaaaaaaa

SEQ ID NO: 10770 - DNA, 4046 bp, synthetic construct
  source 1..4046: mol_type = other DNA
gaaataagagagaaaagaagagtaagaagaaatataagagaattcgccaccatgggcagacctatgcggatcagcttcgtgtccgtggccacacagaccagccctctggatctccgggacaacgtggttagctgcagcaccaaggaccacggaggactgctggaggtgagatttgagatcagaggcctggaattcgtgaacagcgatctagttggacctaagggccagcagagccctaccctgacagactacctggcactgctgcccgaggtgtatgaggtgtccaacagcctcagtctgagagacaagaacacctgtcccacccctgtggaaagcgaaaacgaggaagaggaatcttctcctctgggagccactgccagaacctctcccctgccttctacccctgtctctagaagccgggacgacctgcctaccgagggcacccctgtggtgaagatccccgataagaacacaagctgcccttgctgcggcaaccggatggggaagctgagcggcctgatcgagcacctgaagcgcgcccacgggaagaagaaaatcctcttccagtgcgctagatgtggccggaccgatgtgcgccaccattctatcgcctgccacttccccaagtgcaagggccctgtggaagccagccctgagagaagctggaagtgcgaggaatgcgaaaagacctttgataccaagatcggcctgggccaacacaagcggctggtgcaccccgtcacccgaaacctggaaagaatcactgccgctaggcctaaggctgggacaatgagaggcgcccatagaagatgctggacagaagatgagatcgaactgctgcggaagctggacaagcagtacgagggccagaaaaatatcaacaagctgatcgccgaacacatccctaccaaaacaacaaagcagatcagcgacaagagacgggacctgcataagagccccgtgaagaagggcaaagaccagggccggaagaagcacctggagctggaaggcgagcacctggctgagggagagcacctggtttgtatcggatctgaaatggaaggcggactgaggagcagatacagaaagaccatcagcgaatgggtgacgagcggcaaactgagcatcctgcatggcatgttcgagcaggtaatcgagggagaggaagatcctgctattgtggccgacaaggccatgaaggattgcttcgcctgtctggccagcaagtccgtcgagctgaaagccggccagggccggccccggcaagtggcccagaccgccagaccttctgagcctcctaaaggctggatgaagaagagagccagaaagcgcgggcagttcctgagattccagagactgttctaccttgatagaggcaaactagccggcattatcctggacgatgtggaaagcctgaagtgtggcatccctcaggacgagatccacgatgtgttcaagagtcggtgggaaagccccggaaccttcaagggactgggcgcttttagaagcaagggccaggccgataactctgcctttgaagccatgatcaccgccaaggaaatctctaaaaatatccgggaaatgaacaagaactctgcccctggcccggacagactgtccctgcgggacatcatcaaaatcgacccccactgcgtgcagctgatggaggtgttcaatctctggctggtgaccggcgtggtgcccgacgttgtgaaagaatgcagaaccgtgctgatcagcaagtccagccttccagagcggcagatggacattaacaactggagacccatcacaattggcagcatcatcctcaggcttttcagccggatcctgaccgccagactggccaaggcctgccctatcaatcctagacagaagggcttcattagaagcgccggctgcgccgagaacctcaagttactgcagctgctgatcaagaacgccaagaaagagcaccggcctctcggtgttgtgtttatcgaccttgctaaggcgttcgacaccgtgtctcaccaccacctgatcgctgtcctgaagcaaaagggagtcgaccaccacatcattacgctgatcacaaacatgtaccagaacatcagaacaagaataacaatgaagaacgagcagagcgacccgatcggaatccagatcggcgtgaagcagggcgaccctatgagccctctcctgttcaacctgagcgtggacccactgctgtgcaagctcgaggaagaaggaaacggctaccaccacggcagcaagtgcgtgaccagcatggcctttgctgatgacctggtgctcctgagcggctcctgggagggcatgcagagcaacatcaagatcctggaagccttctgcgaactgacaggcctgcgaacccaaggcgagaagtgtcacggtttctacatccagcctacaaaggatagctacaccatcaacgactgcccaccttggcagattaacggcacacccctgaatatgatcgagcctggctcttctgagaagtacctgggcctgcggatcgacccttggaccggcatctctaagcctgaactgctgatgaaaatccgggattggctgcaaagaatcggcgaggcccctctgaaacccttccaaaaggtggatatcctgaaaggatacaccatccctagactgatctacctggccgaccaggctgacgtgaaagccacctacctggaagaactggacttgacaatcagaaccacagtgaaggagtggctgcacctgccacctagcacctgcgacgccatcctgtactccagcacccgggacggcggactgggaatcaccagactgtccggcctgatccccagcatccaggctcgcagactgcaccggatcgctcagtccagcgacgacgtcatcagaagtatcgtgaagcaggagggtatcgaaaaggagttcgagaagctgtggctgacagcaggcggcgacaaggaaaagatccccagcatctgggaccctagcgccattagagtgaccagcgaagagctgggcgaagatgagctggtgtctgagtgggagatccccacccctaagaccatcttccccaagccgtgcgactggagaaaacaggagttcatcaactggaccaagctgcagtctcagggcagaggcatcgccaacttcgagaaggacaaaatcagcaacaattggctggaacggtatagaggcatccctcacagaaaactgctgacagccctgcagctgagggccaatgtgtaccccaccagagagttcctggctcgggggaggcaggagtcccacatcaagagctgtagacactgtcaggccgaaaacgagagttctgcccacatcatcggctattgtcccgccgtgcaggatgccaggatcaagcggcacaaccagctgtgtgacctgctgatcaccgaggtgaaaagaaaggactggatcgtgttccaagaacccatactgaaggatgagcagaatgagatttacaagcctgatctcgtgttcgtgaagggggaccaggccatcgtgatcgatgtgaccatcagatacgagagcaagctgtcctcactggccgacgccgctgctgaaaaggtgaagaaatactgccacctgaagtcccaaatccaggagctgaccaacgccaaaaacatcaagttcaagggctttccagtcggcgcccgcggcaagtggtacagcggcaactacgaggtgctgaaggccctgggaatcagcaattctagacaggacaagatcgcccggtgcatgtccagaaaggccctgttcaccagcgtggacatcgtccatatgttcgtgagccacagcagaagcattgtgcggacctgataataggctgccttctgcggggcttgccttctggccatgcccttcttctctcccttgcacctgtacctcttggtctttgaataaagcctgagtaggaaggaccggtaaaaaaaaaaaaaaaaaaaaaaaaaaaaaaacgttgactaaaaaaaaaaaaaaaaaaaaaaaaaaaaaaaaaaaaaaaaaaaaaaaaaaaaaaaaaaaaaaaaaaaaaa

SEQ ID NO: 10771 - DNA, 3983 bp, synthetic construct
  source 1..3983: mol_type = other DNA
gaaataagagagaaaagaagagtaagaagaaatataagagaattcgccaccatgggctggagcggacggatctggttcgtgtcggtggccacccagacaaagtacagcgactgggcctttaccgtgcactccatcacaaaccccgaactggccggcgacggcattgcggagatccggggcttggaattcgtgaacagcgagaagggctactacgtgggccacagtcctagcagaagcagcctgctcgccacactgcctgaagtgtacgaaacccctagagtcatgggaaaggtaatcagcccaagctctgtgcagaccgagcacgagggagaacggacaagctctccgccacggaccccgccacctatcctggaaaccggcgccgatctgcctcaggagggaactccagtggtgaaagtgcctgacgataatcccgcttgcccttgttgcggcaaccggatgggcagaatcagcgggctgattgaccacctgaaaagaacccacggcaagaaaaagatcctgttccagtgtgccaggtgtggccggaccaacctgaagcaccattcaatcgcctgccacgtgcccaagtgtaagggagccaagggcacctcccccctgagaggctggacctgtgaagagtgcaacagaaccttcggcaccaagatcggcctgtcccagcacaagcggctggcacatcctgtgacccggaacatcgaaagaatcaccgctagcagacctaaagaggaaagcgccagaggcgcccacagaaggtgctggtccgaagaggaagtggaactgctgaagaagctggaaaaacagtacgaaggcaacaagaatatcaacaagctgattgcggaacacctgcccagcaagacagccaagcaaatctctgataagaggagaggtcttgtcaagagccctagcaagaaaaagggaaaggaccttgcactgagggagcagctgatggaagagggcgaacacctggtcgagagcggctctcaagagggcggcggcctgcggagccactatcggaagagcatcgccgagtggataagaagccaaaaaatcaccagcctgagaaagatcttcgagcgcgtgatcaagggcaaggaggacctgccatctctggtggacgaggctgctcaggactgctacgcctgcctgaagaaggatctgatcgaaggagagggcagacagatccagaagatcagagagatccgtcggcccagacctcagaaacctagcaagcagtggaccaagaagagagcccggaagcggggccagttcctgagattccagagactgttccacctggatagaggcaaactggccggcatcatattggatgatgtggaatccctgaagtgcggcatccctctggacgtggtgcacgaggtgttcaagtccagatgggaaagccctggcacctttaagggactgggcacatttaataccatcggccacgccgataacagcgccttccagagcatgatcaccgccaaggaaatcaaaaagaacatcagagagatgaacaagaacgccgctcctggacctgacggcatcagcctgagagatctgatgaagatcgaccctcaatgtgtgaagctgatggaactcttcaatctgtggctgctcacaggctacatccccgacggcgtgaaaaactgcagaacaatcctgatccccaagagctccgtgcccgagaagctgaacgacgtcaacaactggagacctatcaccatcggaagcattatcctgagactgttcagcaaaatcctgaccgctagactgaccaaagcctgtcctatcaacacccggcagcgcggcttcatcaagtctccaggctgcagcgagaacctgaagctgctgcagctactgatcagatacgccaaaagagagcacagacctctgggcgtggtgttcgtggacctggccaaggccttcgacaccgtgtcccacagccatattctggctgtgctgaagcagaaaggtgtggatgagcacatcatccggctgatcgagaactcttaccacaatatcaagacatacatcgacatgaagaacgagaagtccgacagcatcggcataagaatcggcgtgaagcagggcgaccctatgagccccatcctgttcaatctgagcgttgaccctctgctgtgcaagctggaagaaatgggcaacggctttcaatgtcactctcagaacgtgaccgccctggcttttgccgacgacctggtgctgctgtctggaagctgggagggcatgcagaacaacatcgagatcgtggaaaccttctgcgagctgaccggcctgaaaatgcagggcgagaaatgccacgggttctacatcaagcccacaaaggacagctatacaatcaacgattgccctccttggacaatcaacggcacccctctgaatatgatcgaacccggctcttccgagaagtacctcggcctgtacatcgacccctggactggcatcagcaaaccagaactgctggagaaagtggatagatggctggccaaggtgggcaaggctcctctgaagccgttccagaaggtggacatcctgaaaggctatctgatcccccggctgatctacctggccgatcaggccaacttaaagccaacctacctggaatctattgacctggcaatcagaaccggcgtgaaagaatggctgcatctgcctgcgtgtacctgcgacgccatcctctacagcaacacccaggatggcggcctgggcatcagccggctggctgccctgatcccttctgttcaagccagacggctgcaccgaatcgctcagacaagcgacgacgtgctgaaaaccatcgttaaaagagaaggcatcgaaagagagttcgagaagctgtggctgatggccggaggcgataaggagaagatcccttctatctgggacccaaaaacaatcatggtgatcagcgagaccggcggagaccagctgtccgagtgggagacccctaacccaaagctgatctaccccaagccctgcaactggcgcaagagagagttcaacaattggactaagctgctgtctcagggcagaggcatagtgaacttcgagaaggataagatcagcaacaactggatcatccactacagaggtatccctcaacggaagctcatcaccgccctgcagctgcgggccaatatatacccaaccagggagtttctggctagaggaagatctgagacttacattaagagctgcagacactgccaggccgacaacgagacgtgcgcccatatcatcggatattgccctagcgtgcaagatgccaggatcaaaaggcacaaccagatctgccacattctggccgaagaggccaaaagcaaggactggctcgtgtaccaggagcctctgctccgggaccagcagaatgagctgtacaagcctgacctgatcttcgtgaagggcaaccaggccattgtgacagacatcacaatcagatacgaaaccacaattaccacactggaggaggccgctctggagaaggccaagaaatacgcccacctgaagagccaggtgcaagacctgaccaacacaagcgtgatcaacttcaccggattccctctgggctctagaggaaagtggtaccagggcaactacaagatcctcaaggagctgggcctgagcagctccagacaggagaaggtggccagaaggctatctaactacgccctgttctctagcgtggacatcgtgcacatgttcgccagcaaggcccgcaccgaggtccggtgataataggctgccttctgcggggcttgccttctggccatgcccttcttctctcccttgcacctgtacctcttggtctttgaataaagcctgagtaggaaggaccggtaaaaaaaaaaaaaaaaaaaaaaaaaaaaaaacgttgactaaaaaaaaaaaaaaaaaaaaaaaaaaaaaaaaaaaaaaaaaaaaaaaaaaaaaaaaaaaaaaaaaaaaaa

SEQ ID NO: 10772 - DNA, 4022 bp, synthetic construct
  source 1..4022: mol_type = other DNA
gaaataagagagaaaagaagagtaagaagaaatataagagaattcgccaccatgggcagacccatgcggatcagcttcgtgagcgtggccacccagacctcccctctggacctgagagacaacgtggtgagctgcagcaccaaggaccatggaggactgctggaagtgcggttcgagatccggggactggaattcgtgaatagcgacctggtgggccctaaaggacagagccctacactgaccgaccatctggccctgctgcctgaggtgtacgaggtgagtaacctgtccctgagagacaagaacacctgtcccaccccagtggagagtgaaaatgaagaggaggaaagctccccgctgggcgccacagccagaaccagccctcttccatctacccctgtatctaggtctagagacgatctgcctaccgagggcacccctgtggttaaaatccccgataagaacaccagctgcccttgctgcggcaacagaatgggcaagctgtctggcctgatcgagcacctgaagagagcccacggaaaaaagaagatcctgtttcagtgcgccagatgcggcagaaccgacgtccggcaccactcgatcgcctgccacttccccaaatgcaagggccctgtggaggctagccctgagagaagctggaagtgcgaggaatgcgaaaagaccttcgacaccaagatcggcctgggccaacacaagcggctggtccaccccgtgaccagaaacctggaaagaataaccgccgcccggcctaaggccggcacgatgcgtggcgcccaccggcggtgctggaccgaggatgagatcgagctgctgcggaagctggacaagcagtacgagggccagaaaaatatcaacaagctgatcgctgagcatatccctactaaaaccacaaagcagatttctgacaagcgtcgcgatctgcacaaaagccccgtgaaaaaaggaaaggaccagggcagaaagaagcatctggaactcgaaggcgagcacctggctgaaatcggctccgaaatggaaggcggcctgagaagccggtatagaaagaccatctcagagtgggttacatctggcaagctgagcatcctgcacggcatgttcgagcaggtgatcgagggcgaggaagatcccgctaccgtggccgacaaggccatgaaagattgtttcgcctgcctggccagcaagagcgtggaactgaaggctggccagggccggcctagacaggttgcccagacagcccggccaagcgagcctcctaagggatggatgaaaaagcgggccagaaagagaggccagttcctgcgcttccagagactgttctacctggatagaggcaagctggccggtattatcctggacgacgtggagagcctgaagtgcggaattcctcaggacgagatccacaacgtgtttaaaagcagatgggaaagccctggcacatttaagggcttaggagctttcagaagcaagggccaggctgataacagcgcctttgaggccatgattaccgccaaagagatctccaagaacatccgggaaatgaacaagaactctgcccctggaccagatggcctctccctccgcgatattatcaagatcgacccccactgtgtgcagctgatggaagtgttcaatctgtggcttgtcacaggtgtggtgccagacgtggtgaaagagtgtagaaccgtgctgatcagcaaaagcagcctccctgaacggcaaatggacatcaacaactggcggcccatcaccatcggatctatcattctaagactgttcagcaggattctgaccgcaagactggccaaggcttgtcctatcaatcccagacaaaaaggctttatcagatctgccggatgtgccgagaacctgaaactgctgcagctgctgatcaagaacgccaagaaagagcacagacccctgggcgtggtgtttatcgacctcgccaaggcatttgacaccgtcagccatcaccacctgatcgccgtgctgaagcagaaaggcgtggaccaccatatcatcacactgatcaccaacatgtaccagaacataagaacaagaatcacaatgaagaatgagcagagcgaccctatcggaatccagatcggcgtgaagcaaggagatcccatgagtcccctgctgtttaacctgtctgtggatcctctgctctgtaaactagaggaagagggaaacggctaccaccacggatctaaatgcgtgacaagcatggcctttgccgatgatctggtgttgctgtctggcagctgggagggcatgcagtccaacatcaaaatcctcgaggccttctgcgagctgaccggactgcgcacacagggcgaaaaatgtcacggtttctacatccaacctacaaaggacagctacaccatcaacgactgccctccatggcagatcaatggcacacctctcaacatgatcgagcccggcagcagcgagaaatacctgggcctgagaatcgacccctggacaggcatctccaagcctgaactgctgatgaagatcagagactggctgcagcggatcggcgaagctcctctgaagcccttccagaaggtggacatcctgaagggctataccatccctcggctgatctacctagcggaccaggccgatgtcaaggccacctacctggaagagctggacctgacgattagaaccacagtgaaggaatggctgcacctgcctcctagcacctgcgatgctatcctgtacagcagcaccagagacggcgggctgggcatcacccgtctgagcggcctcattccttctattcaggccagacggctgcacagaatcgcccagagcagcgatgacgtgatccgctccattgtgaagcaggagggcatcgaaaaggaattcgaaaagctgtggctgacagccggcggcgataaggaaaagatcccttcaatctgggaccccagcgctatccgagtgacatctgaagaactgggagaggacgagctggtgtctgaatgggagatacccacaccaaagaccatcttccctaagccctgcgactggagaaagcaggaattcatcaactggaccaaactgcagagccagggccggggcatcgccaacttcgagaaggacaagatcagcaacaactggctggagagataccggggcattccacacagaaagctcctgacagcgctgcaactgagagctaatgtgtaccctaccagagagttcctggccagaggcagacaggagagccacatcaaaagctgtagacactgccaagccgagaacgagtccagcgcccacatcatcggctactgtcctgccgtgcaggacgcccgtatcaagagacacaaccagctgtgcgacctgctgattaccgaggtgaaacgcaaggactggatcgtgttccaggagcctatcctgaaggacgagcagaacgaaatctataagcctgatcttgtgttcgtgaagggcgaccaagccatcgtgattgacgtgacaatccggtacgagtctaagctgtccagcctggccgacgccgctgctgagaaagtgaagaaatactgccacctgaagtctcagatccaggagctgaccaacgccaagaacatcaagttcaagggcttcccagtcggagccagaggcaagtggtacagcggaaattacgaggtgctgaaggctctgggcatcagcaacagccgccaggataagatcgccagatgcatgagccggaaggccctgttcaccagcgtggacatcgttcacatgttcgtgtcccacagccggtctatcgtcagaacctgataataggctgccttctgcggggcttgccttctggccatgcccttcttctctcccttgcacctgtacctcttggtctttgaataaagcctgagtaggaaggaccggtaaaaaaaaaaaaaaaaaaaaaaaaaaaaaaacgttgactaaaaaaaaaaaaaaaaaaaaaaaaaaaaaaaaaaaaaaaaaaaaaaaaaaaaaaaaaaaaaaaaaaaaaa

SEQ ID NO: 10773 - DNA, 4022 bp, synthetic construct
  source 1..4022: mol_type = other DNA
gaaataagagagaaaagaagagtaagaagaaatataagagaattcgccaccatggggcggcccatgcggatcagcttcgtgtcagtggccacccagaccagccctctggatctcagagataacgtggtgagctgcagcatcaaagaccacggcggcctgctggaggtcagattcgagatcaggggcctggagttcgtgaacagcgacctggtgggcctgaagggccagagccctactctgaccgaccacttagccctgctgcctgaagtctacgaggttcctaacctcagcctgcgagacaaaaacacctgtcctacccctgttgagagcgaaaacgaggaggaggagagcagccccctgggagccaccgcccggaccagccccttgcccagcacccccgtgagcagaagcagggacgacctgcctacagagggcacccctgtggtgaagatccctgacaagaataccagctgcccctgctgcggcaacagaatggggaagctgtctggcctgatcgagcacctgaagagagcccacggaaagaaaaagatcctgttccagtgcgccaggtgtggccggacagacgtgaagcaccacagcatcgcctgtcatttccctaagtgtaaaggccccgtggaagcctctcctgagaggtcctggaagtgcgaggagtgcgaaaagaccttcgacacaaagatcggcctgggccaacacaagcggctggtgcaccccgtgacccggaacctggagcggatcaccgccgccagacccaaggccggcaccatgcgcggagcccatcggcgctgttggacagaagatgaaatcgagctgctgcggaagctggacaaacaatacgagggccagaagaacatcaacaaacttattgccgaacacatcccaaccaagaccaccaagcagatcagcgataagcggagagacctgcacaagagccccgtgaagaaaggaaaggaccagggcagaaagaagcacctggaactggaaggcgagcatctggtggaaatcggctcagaaatggaaggaggcctgcggagtagatacagaaaaacagtgtctgagtgggtgacctctggcaagctgtccatcctgcacggcatgttcgagcaggtgatcgagggagaagaggaccctgccacagtggccgacaaggctatgaaagattgcttcgcctgcctggctagcaagagcgtggaactgaaggccagccagggccgtcctagacaggtggctcagacagcacggccttccgaacctccaaagggctggatgaaaaagagagctagaaagagaggccagttcctgaggttccagagactgttttacctggatagaggaaagttagcaggtatcatcctggacgacgtggaaagcctgaagtgcggcatcccccaggacgagatccacaatgtgttcaagagtagatgggagtcccctggcacttttaagggcctgggcgctttcagaagcaaggggcaggccgataatagcgccttcgaggctatgatcaccgctaaggaaatcagcaagaacatccgggaaatgaacaagaatagcgcccctggccctgacggcctgagcctgcgcgacatcatcaaaatcgatcctcactgcgtgcagctgatggaagtgttcaacctgtggctggtgacaggaaccgtgcccgatgtggtgaaagaatgcagaaccgtccttatcagtaagagctctctgccagagagacagatggacatcaacaactggcgccctatcaccatcggctccatcatcctgagactgttttcccgaatcctgacagctcggctggcaaaggcctgtcctatcaatcctagacaaaaaggcttcatcagaagcgccggctgcgccgaaaatctgaagcttctgcagctgctgattaaaaacgccaagaaggagcaccggcctctgggcgtggtgtttatcgacctggccaaggcctttgatacagtgagccaccaccatctgatcgctgttctgaaacagaagggcgtggaccaccatatcatcaccctgataaccaacatgtaccagaacatccgaacaagaatcaccatgaaaaacgaacagtctgatcctatcggaatccagatcggagtgaagcaaggcgaccctatgagcccgctgctctttaacctgagcgtggatcccctgctgtgcaagctggaagaagaaggcaacggctaccaccacggcagcaaatgtgtgacaagcatggccttcgccgacgacctggtcctcctgagcggctcttgggaaggcatgcagagcaacatcaagatcctggaggccttctgcgagctgaccggcctgagaacccagggcgagaagtgtcacggattctacatccaacctaccaaggacagctacaccatcaacgactgccctccttggcagatcaatggcacccctctgaacatgatcgagccaggcagctctgaaaagtacctgggccttcggatcgatccctggaccggcatcagcaaacctgagctgctgatgaaaatccgagattggctgcagcgcattggcgaagctcctctaaagcctttccaaaaggtagacattctgaagggatatacaatcccaagactgatctacctggctgaccaggccgatgtgaaggccacgtacttggaagagctggacctgaccatccggacaaccgtgaaggaatggctgcacctgccccccagcacctgcgacgccatcctgtacagcagtaccagagatggcggtttgggcatcaccagactgtctggcctgatcccatctatccaggccagacggctgcacagaatagcccagtccagtgacgatgtgatcagaagcatcgtgaagcaggaaggcatcgagaaggaatttgaaaagctctggctgacagctggcggagataaggaaaagatcccttctatctgggacccgtctgccatcagagtgacctccgaggagctgggcgaggacgagctggcgagcgaatgggagataccaacccctaagaccatcttccctaagccctgtgactggcggaagcaggaattcatcaactggaccaagctgcagtctcagggaagaggcatcgccaattttgagaaagataagatctctaacaactggctggaacggtaccggggcattcctcatagaaagctgctgacagctctgcagctgagagccaacgtataccctacaagagagttcctcgccagaggcagacaggagtcccacattaaaagctgtagacactgccaggccgagaacgagtctagcgcccacatcatcgggtactgcccagccgtgcaggacgcgagaattaagagacacaaccagctgtgcgacctgctgatcacagaggtgaagaaaaaggactggatcgtgttccaggagcccatcctgaaggacgagcagaacgagatctacaagcctgacctggtgttcgtgaaaggcgaccaggccatggtgatcgacgtgaccatcagatatgagtccaagttgagcagcctggctgatgccgccgccgagaaggtgaagaagtattgtcacctgaagagccagatccaggagctcacaaacgccaagaatatcaagttcaaggggttcccggttggcgccagaggcaaatggtacagcggaaactacgaggtgctgaaggccctgggaatcagcaacagcagacaagacaagatcgccagatgcatgtcccggaaagccctgttcaccagcgtggatatcgtgcacatgttcgtgtctcactctagatctatcgtgcggacatgataataggctgccttctgcggggcttgccttctggccatgcccttcttctctcccttgcacctgtacctcttggtctttgaataaagcctgagtaggaaggaccggtaaaaaaaaaaaaaaaaaaaaaaaaaaaaaaacgttgactaaaaaaaaaaaaaaaaaaaaaaaaaaaaaaaaaaaaaaaaaaaaaaaaaaaaaaaaaaaaaaaaaaaaaa

SEQ ID NO: 10774 - DNA, 3983 bp, synthetic construct
  source 1..3983: mol_type = other DNA
gaaataagagagaaaagaagagtaagaagaaatataagagaattcgccaccatgggctggtccggccgaatctggttcgtcaccgtggccacccagaccaaatacagcgattgggcctttaccgtgcacagcatcacaaaccccgagctggctggcgacggaatcgccgacctgcggggactggagttcgtgaactctgaaaaaggctattacgtgggccacagccccagcagaagcagcctgctggctactctgcctgaggtgtacgagacacccagagtgatgggcaaggtgaccagccctagcagcgtgctgacagagcacgagggggacagaacaagttctccacctagaactcctcctcctatcctggaaacaggcgccgacctgcctcaggagggcacccctgtggtgaaggtgcccgatgacaaccctgcctgcccttgctgcggcaaccggattggaagaatcagcggcctgatcgaccacctgaagcgcacacacggcaaaaagaagatcctgttccagtgcgccaagtgtggcagaacaaatctgaaacaccactctatcgcctgtcatgtgccaaagtgcaagggcgccaagggcaccagtcctctgagaggctgggcctgtgaagagtgcaaccgaaccttcggcacaaagatcggcctgagccagcacaagcgcctggcacaccccgtgaccagaaacatcgagagaatcaccgccagcagaccaaaggaagagtccgcccggggcgctcatagacggtgctggagcgaagaggaagtggaactgctgaagaagctggaaaagcagtacgaaggcaacaagaacatcaacaaactgatcgccgaacacctgccctcaaagaccgccaaacagatctccgacaagcgcagaggactgatcaagagcccctctaagaaaaacggcaaggacctgacactgcgggaacagctgaccgaagaaggagagcacctgatcgagagcggcagccaggagggcggcggactgagaagccactaccgcaagagtatcgccgagtggatccggagccagaaaataaccagcctcagaaagatcttcgagcgggtgatcgagggcaaggaagatcttccaagcatcgtggacgaggccgctcaggattgctacgcctgcctgaagcgggacctcacagaaggcgagggcagacagatccagaagatcagagagatcagaaggacccaccctcagaagccttccaaacagtggacaaagaagcgggcccggaagcgtggacagtttctgcggttccagcggcttttctacctcgacagaggcaagctggctggcatcatcctggacgatgtcgagtccctgaagtgcggaatcccgttggatgtggtccatgaggtgttcaagagcagatgggaatcccccggcacctttaagggcctcggaacattcaagacaattggacaggctgacaacagcgctttccaggcaatgataacgatgaaggaaatcaagaagaatatcagagaaatgaacaagaacgccgcccctggtcctgatggcatcagcctgcgggacctgatgaaaatcgacccacagtgtgccaagctgatggaactgttcaacctgtggctgctgaccgggtacattcccgacggcgtgaaaaattgcagaacaatactgatccccaagtctacagtgcctgagaagctgaatgacgtgaacaactggagacctatcaccatcggctcaatcatcctgagactgtttagcaaaatcctgaccgcaagactgaccaaggcctgtcccatcaacatcaggcagagaggattcatcaagtccagcggctgtagcgaaaaccttaaactgctgcagctgataatccgctacgccaagcgggagcacagacctcttggtgtggtgtttgtggacctggctaaagccttcgacaccgtcagccacagccacatcctgagtgtgctgaagcagaaaggagtggatgagcacatcatcaaactgatcgagaacagctactacaacatcaaaacctacattgatctgaagaatgagaagtccgacagcatcggcatccggattggcgtgaagcaaggcgatcccatgagccctatcctgttcaatctgtctgtggacccgctgctgtgcaagctggaggaaatgggcaatggctttcagtgccactctcagaatgtgaccgccctggctttcgccgacgacctggtgctgctgagcggcagctgggaaggcatgcagaacaacatcaccattgtcgagacattctgcgagctgaccggcttgaagatgcagggtgagaagtgccacggcttctacatcaagcctaccaaggactcttacaccataaacgactgcccagtctggaccatcaacggaacccccctgaacatgattgagcctggcagctccgagaagtacctgggcctttatgtggacccttggatcggcatcagcaagccagagctgctggaaaaagtggatagatggctggtgaaggtgggcaaggcacctctgaaacccttccaaaaagtggacatcctgaagggatacctgatccctagagtgatctacctggccgaccaggccaatctgaagcctacctacctggaaagcatcgacctcgccatcagaaccggcgtgaaagaatggctgcacctgcccgcctgcacctgcgacgccatcctgtacagcaacacccaggacggcggactgggcatcagccggctggcagctctgatccctagtgtgcaagttagacgtctgcacagaattgctcagacaagcgacgaggtgctgaaaacaatcgttaagagggagggaattgagcgagagttcgagaaactgtggctgatggccggcggcgataaggagagaatcccctctatctgggatcctaagaccgtgatgatcatcagcgagacaggaggtgaccaattatccgaatgggagatccctaatcccaaactgatctaccctaagccttgtaactggcggaaaagagagtttaacaattggacaaagcttctatcgcagggcagaggtatcgtgaacttcgagaaagacaagattagcaacaactggctgatccactacagaggcatcccgcaaaggaagctgatcacagccctgcaactgagagccaacatctaccccacaagagagttcctggccagaggcagaagcgagacctacatcaagtcttgtagacactgccaggctgacaacgaaacctgtgcccacatcatcggctactgcccttccgttcaggatgccagaatcaagcggcacaaccagatctgccatatcctcgccgaggaagccaaacggaaggactggctggtgtaccaagagcctctgctgagggatcagcagaacgagctgtacaagcctgatctgatcttcgtgaagggcaaccaggccatcgtaaccgatatcacaatcagatacgagacaaccatcaccaccctggaggaagccgccctcgagaaggccaagaaatatgtgcacctggaaagccaggtgcaggacctgaccaacacctctgtcatcaatttcaccggattccccctgggctctagaggcaagtggtaccagggcaattacaaaatcctgaacgagctgggcctgagcaacagccggcaggagaaggtcgcccggcgcctgtctaattacgccctctttagctctgtggacatcatccacatgttcgcctcgaaggccaggaccgaagtcagatgataataggctgccttctgcggggcttgccttctggccatgcccttcttctctcccttgcacctgtacctcttggtctttgaataaagcctgagtaggaaggaccggtaaaaaaaaaaaaaaaaaaaaaaaaaaaaaaacgttgactaaaaaaaaaaaaaaaaaaaaaaaaaaaaaaaaaaaaaaaaaaaaaaaaaaaaaaaaaaaaaaaaaaaaaa

SEQ ID NO: 10775 - DNA, 5453 bp, synthetic construct
  source 1..5453: mol_type = other DNA
gaaataagagagaaaagaagagtaagaagaaatataagagaattcgccaccatggccttcggcggcaaccccttcgccagcgtgggcagcagcagcagcagcggcgagggcacccagcccagcaggaccgagaacagggaccccctgcccaacccctgggcccccccccccgccacccagagcagcgccaccaccagcaccaccaccagcaccggcagcggcagcggcaacagcagcagcaacgcccctaagaaaaagcggaaggtgaatatcagcggctctagctgcggcagccccaacagcgccgacaccagcagcgacttcaaggacctgtggaccaagctgaaggaatgccacgaccgggaagtgcagggactccaggtgaaggtcaccaaactcaagcaagaaagaatcctggacgcccagagactggaagaattcttcaccaagaaccagcagctgagagagcagcagaaagtgctgcacgagacaatcaaggttctggaagatagactgcgggccggcctgtgcgacagatgcgccgtgaccgaggaacacatgcgcaaaaagcagcaggagttcgagaacattagacagcaaaatctgaaattgatcacagagctgatgaacgagagaaacacactgcaggaggagaacaagaagctgagcgagcagctgcaacagaagatcgagaatgatcagcaacaccaggccgctgagctggaatgtgaagaggacgtgatccccgacagcccaatcacagctttcagcttttctggcgtgaacagactgaggcggaaggaaaacccccacgtgcggtacatcgagcagacccataccaagctggaacacagcgtgtgtgccaacgagatgagaaaggtgtccaagtcctccacccatccccagcacaaccctaacgaaaatgagatcctggtggctgatacctacgaccagtctcagagccctatggccaaggcccacggcaccagctcttatacccctgataagagctccttcaacctggccaccgtggtggccgagacactgggcctgggcgtgcaggaggaaagcgagacacagggcccaatgagccctctgggagatgagctgtaccactgcctggaaggcaaccacaagaaacagccttttgagtccggctccgagactcctggaacaagcgagagcgctacacctgagggcagccctaagagaaaggtgtccagcgccgagggcgctgccaaggaagagcctaaacggagaagcgccagactgagcgccaagccccccgccaaggtggaagccaagcctaagaaggccgccgctaaggacaagagcagcgataagaaagtccagaccaagggcaagcggggcgccaaaggcaaacaggccgaggtggccaaccaggagacaaaggaagatctgcctgctgagaacggcgaaaccaagaccgaggaatctccagcttctgacgaggccggagagaaggaggccaaaagcgacagcggctctgagacacctggaacaagcgagagcgccaccccggaatcctatgaacaacttgcaccacaaccgtgtgtgggagaaactttacattctagcctcccacgagacagtgaactgtttgtgcctgaagaggggagcagcgagaaggagagcgaggacgcgccaaaaacatctcctccgacgcctgggaaacatggtttggaacagactggggaggaaaaagtgatggtgactgttcctgacaaaaatccaccttgtccttgctgtggtacccgggtaaactctgtgttgaatctgattgaacatctgaaagtgtcacacgggaaaaggggggtttgttttcggtgtgcaaaatgtggaaaggaaaatagtaactatcacagtgttgtttgtcattttaagaaatgcaggggtccagagacggagaaagccccagctggggagtggatttgtgaggtatgcaacagagattttacaaccaaaattggcctgggacaacacaagagattggcacacccagcagtgagaaatcaggaaaggatcgttgcttcccaaccgaaagaaacatcaaatagaggtgctcacaaaaggtgctggacaaaggaggaggaagaattactaataagactggaggctcagttcgagggaaacaaaaatattaataagcttattgcagaacacataaccaccaaaacagctaagcagatcagtgacaaaaggcgattgctgtccagaaagccagcagaggagccacgtgaggagcctggaacgtgtcatcacaccaggagagcagctgcgagcctgagaacggagcctgagatgagtcatcacgcccaggcagaggacagagataatggacctgggagacgccctctgccaggcagggcagctgccggagggagaacaatggacgagataagacgccaccctgataagggcaacggacagcagagacccaccaagcaaaaatcagaagaacagctgcaggcttactataaaaagacactagaggaacgactttcagctggggcacttaacaccttcccccgagcattcaagcaggtaatggaaggccgggatataaagctagtaatcaatcagacagcgcaggactgcttcggatgcctggaatccataagccaaataagaacggcaacccgagataaaaaggacacggtgacccgggagaaacacccaaagaaaccttttcagaagtggatgaagaagagagcaatcaaaaaaggtaattatcttcggttccagcgtttattttatcttgatagagggaaactggctaaaatcattttagatgatattgaatgcttgtcttgtgacataccactcagtgaaatttattcggtttttaaaacaagatgggaaacaactggtagctttaaaagccttggggactttaaaacttacgggaaggctgacaacactgccttcagagaattaattacggctaaagaaattgagaaaaatgtgcaggaaatgagcaaaggctcggctcccggtccagacgggattactcttggggacgtcgtaaagatggatcccgagttttcccggaccatggagattttcaatttatggttaacaactggtaaaatcccggacatggtgagggggtgcagaaccgttttgattccaaaatcatcaaagccggatcgtttgaaagacattaataactggagacctatcacgatcggttccatcttgctgagactgttctccaggattgtaacagctaggctgagcaaagcgtgccccctgaacccaaggcaaagaggctttatcagagcggcgggatgctctgaaaacttaaaactcctgcaaactataatttggtcggccaaaagagaacacagaccactgggtgttgtattcgtggacatcgccaaggcttttgacaccgtaagccaccagcacatcattcatgctttgcagcaaagagaggtggatccccacatcgtcggtctggtgagcaatatgtacgagaacatcagtacgtatatcaccacaaagaggaacacacacacagacaaaatccagatccgggttggagtaaagcagggtgacccgatgtcgccccttttatttaacctggcaatggaccctctattatgcaagctggaagagagtggcaaaggataccaccgaggacagagcagcatcacagcgatggcatttgcagacgatctggttttgctgagcgactcctgggaaaatatgaatacaaatattagcatactggagaccttctgcaatctgaccggactcaaaacacaggggcaaaagtgccacggcttttacatcaagccgacaaagaagtcttacaccatcaatgactgcgctgcctggactatcaacggcacacccctgaacatgatcgaccccggcgaatctgagaaatacctcggcctgcagtttgacccgtggattggaatagcaaggtccggtctctccacaaaactagatttttggcttcagcggatcgatcaagcaccacttaaacctctgcagaaaactgatattctcaaaacatacaccatccctcggctgatctacatagctgaccactcagaagtgaaaagcgcactactcgaaacccttgaccagaagatccggacagcggtcaaggaatggcttcacctacctccgtgcacctgcgatgccatcctgtactcgagcacgagagacggcggtttgggcatcaccaaattggcaggactgatccccagcgtgcaggcccgtagactgcatcggatcgcacagtcatctgacgatacgatgaaatgcttcatggaaaaagagaaaatggaacagctgcataagaaattgtggattcaagctggaggggacagagagaacataccctcgatttgggaagcaccaccgtcgagtgaaccaccaaacaacgtgagcacaaattcggaatgggaagcaccgacccagaaagataaatttccaaagccttgcaattggaggaaaaacgaattcaaaaaatggaccaaattggcatcccaaggccgcggaattgtaaattttgaaagagacaaaattagtaaccattggatccaatactacagacgcatacctcacaggaaactcctcactgcactacaactcagggccaacgtttaccccacgagagaatttctagccaggggtagacaagaccaatacatcaaggcgtgtaggcactgcgatgcggacaacgaatcctgcgcccacatcatcggcaactgcccagtgacacaggacgcccgaatcaagaggcacaattacatctgcgaactgcttctcgaggaggcgaagaagaaggactgggtagtgttcaaggaaccgcacataagggattccaacaaggaactgtacaaacctgacctgatatttgtgaaggatgggcgtgcacttgtcgtggatgtgacagtacggtatgaagcagccaaatcatcgctggaggaagccgctgcagagaaagtgagaaagtacaaacacctggaaacggaagtaagacatctcacgaatgcaaaggacgttacttttgtgggctttcccctaggagcgcgggggaaatggcaccaagataactttaaacttttgactgagcttggcctctccaaatcgaggcaagtgaaaatggcagagactttttccacagtagcgctcttttcatctgtggacattgtacatatgtttgccagtagggccagaaaatctatggttatgtgataataggctgccttctgcggggcttgccttctggccatgcccttcttctctcccttgcacctgtacctcttggtctttgaataaagcctgagtaggaaggaccggtaaaaaaaaaaaaaaaaaaaaaaaaaaaaaaacgttgactaaaaaaaaaaaaaaaaaaaaaaaaaaaaaaaaaaaaaaaaaaaaaaaaaaaaaaaaaaaaaaaaaaaaaa

SEQ ID NO: 10776 - DNA, 5513 bp, synthetic construct
  source 1..5513: mol_type = other DNA
gaaataagagagaaaagaagagtaagaagaaatataagagaattcgccaccatggcctgcaaccagtgcaaggcccccaagcccgacggccccggcggcggccccggcggcagccacatgggcggcaactacggcgacgacaggaggggcggcaggggcggctacgacaggggcggctacaggggcaggggcggcgacaggggcggcttcaggggcggcaggggcggcggcgacaggggcggcttcggccccggcaagatggacagcaggggcgagcacaggcaggacaggagggagaggccctaccctaagaaaaagcggaaggtgaatatcagcggctctagctgcggcagccccaacagcgccgacaccagcagcgacttcaaggacctgtggaccaagctgaaggaatgccacgaccgggaagtgcagggactccaggtgaaggtcaccaaactcaagcaagaaagaatcctggacgcccagagactggaagaattcttcaccaagaaccagcagctgagagagcagcagaaagtgctgcacgagacaatcaaggttctggaagatagactgcgggccggcctgtgcgacagatgcgccgtgaccgaggaacacatgcgcaaaaagcagcaggagttcgagaacattagacagcaaaatctgaaattgatcacagagctgatgaacgagagaaacacactgcaggaggagaacaagaagctgagcgagcagctgcaacagaagatcgagaatgatcagcaacaccaggccgctgagctggaatgtgaagaggacgtgatccccgacagcccaatcacagctttcagcttttctggcgtgaacagactgaggcggaaggaaaacccccacgtgcggtacatcgagcagacccataccaagctggaacacagcgtgtgtgccaacgagatgagaaaggtgtccaagtcctccacccatccccagcacaaccctaacgaaaatgagatcctggtggctgatacctacgaccagtctcagagccctatggccaaggcccacggcaccagctcttatacccctgataagagctccttcaacctggccaccgtggtggccgagacactgggcctgggcgtgcaggaggaaagcgagacacagggcccaatgagccctctgggagatgagctgtaccactgcctggaaggcaaccacaagaaacagccttttgagtccggctccgagactcctggaacaagcgagagcgctacacctgagggcagccctaagagaaaggtgtccagcgccgagggcgctgccaaggaagagcctaaacggagaagcgccagactgagcgccaagccccccgccaaggtggaagccaagcctaagaaggccgccgctaaggacaagagcagcgataagaaagtccagaccaagggcaagcggggcgccaaaggcaaacaggccgaggtggccaaccaggagacaaaggaagatctgcctgctgagaacggcgaaaccaagaccgaggaatctccagcttctgacgaggccggagagaaggaggccaaaagcgacagcggctctgagacacctggaacaagcgagagcgccaccccggaatcctatgaacaacttgcaccacaaccgtgtgtgggagaaactttacattctagcctcccacgagacagtgaactgtttgtgcctgaagaggggagcagcgagaaggagagcgaggacgcgccaaaaacatctcctccgacgcctgggaaacatggtttggaacagactggggaggaaaaagtgatggtgactgttcctgacaaaaatccaccttgtccttgctgtggtacccgggtaaactctgtgttgaatctgattgaacatctgaaagtgtcacacgggaaaaggggggtttgttttcggtgtgcaaaatgtggaaaggaaaatagtaactatcacagtgttgtttgtcattttaagaaatgcaggggtccagagacggagaaagccccagctggggagtggatttgtgaggtatgcaacagagattttacaaccaaaattggcctgggacaacacaagagattggcacacccagcagtgagaaatcaggaaaggatcgttgcttcccaaccgaaagaaacatcaaatagaggtgctcacaaaaggtgctggacaaaggaggaggaagaattactaataagactggaggctcagttcgagggaaacaaaaatattaataagcttattgcagaacacataaccaccaaaacagctaagcagatcagtgacaaaaggcgattgctgtccagaaagccagcagaggagccacgtgaggagcctggaacgtgtcatcacaccaggagagcagctgcgagcctgagaacggagcctgagatgagtcatcacgcccaggcagaggacagagataatggacctgggagacgccctctgccaggcagggcagctgccggagggagaacaatggacgagataagacgccaccctgataagggcaacggacagcagagacccaccaagcaaaaatcagaagaacagctgcaggcttactataaaaagacactagaggaacgactttcagctggggcacttaacaccttcccccgagcattcaagcaggtaatggaaggccgggatataaagctagtaatcaatcagacagcgcaggactgcttcggatgcctggaatccataagccaaataagaacggcaacccgagataaaaaggacacggtgacccgggagaaacacccaaagaaaccttttcagaagtggatgaagaagagagcaatcaaaaaaggtaattatcttcggttccagcgtttattttatcttgatagagggaaactggctaaaatcattttagatgatattgaatgcttgtcttgtgacataccactcagtgaaatttattcggtttttaaaacaagatgggaaacaactggtagctttaaaagccttggggactttaaaacttacgggaaggctgacaacactgccttcagagaattaattacggctaaagaaattgagaaaaatgtgcaggaaatgagcaaaggctcggctcccggtccagacgggattactcttggggacgtcgtaaagatggatcccgagttttcccggaccatggagattttcaatttatggttaacaactggtaaaatcccggacatggtgagggggtgcagaaccgttttgattccaaaatcatcaaagccggatcgtttgaaagacattaataactggagacctatcacgatcggttccatcttgctgagactgttctccaggattgtaacagctaggctgagcaaagcgtgccccctgaacccaaggcaaagaggctttatcagagcggcgggatgctctgaaaacttaaaactcctgcaaactataatttggtcggccaaaagagaacacagaccactgggtgttgtattcgtggacatcgccaaggcttttgacaccgtaagccaccagcacatcattcatgctttgcagcaaagagaggtggatccccacatcgtcggtctggtgagcaatatgtacgagaacatcagtacgtatatcaccacaaagaggaacacacacacagacaaaatccagatccgggttggagtaaagcagggtgacccgatgtcgccccttttatttaacctggcaatggaccctctattatgcaagctggaagagagtggcaaaggataccaccgaggacagagcagcatcacagcgatggcatttgcagacgatctggttttgctgagcgactcctgggaaaatatgaatacaaatattagcatactggagaccttctgcaatctgaccggactcaaaacacaggggcaaaagtgccacggcttttacatcaagccgacaaagaagtcttacaccatcaatgactgcgctgcctggactatcaacggcacacccctgaacatgatcgaccccggcgaatctgagaaatacctcggcctgcagtttgacccgtggattggaatagcaaggtccggtctctccacaaaactagatttttggcttcagcggatcgatcaagcaccacttaaacctctgcagaaaactgatattctcaaaacatacaccatccctcggctgatctacatagctgaccactcagaagtgaaaagcgcactactcgaaacccttgaccagaagatccggacagcggtcaaggaatggcttcacctacctccgtgcacctgcgatgccatcctgtactcgagcacgagagacggcggtttgggcatcaccaaattggcaggactgatccccagcgtgcaggcccgtagactgcatcggatcgcacagtcatctgacgatacgatgaaatgcttcatggaaaaagagaaaatggaacagctgcataagaaattgtggattcaagctggaggggacagagagaacataccctcgatttgggaagcaccaccgtcgagtgaaccaccaaacaacgtgagcacaaattcggaatgggaagcaccgacccagaaagataaatttccaaagccttgcaattggaggaaaaacgaattcaaaaaatggaccaaattggcatcccaaggccgcggaattgtaaattttgaaagagacaaaattagtaaccattggatccaatactacagacgcatacctcacaggaaactcctcactgcactacaactcagggccaacgtttaccccacgagagaatttctagccaggggtagacaagaccaatacatcaaggcgtgtaggcactgcgatgcggacaacgaatcctgcgcccacatcatcggcaactgcccagtgacacaggacgcccgaatcaagaggcacaattacatctgcgaactgcttctcgaggaggcgaagaagaaggactgggtagtgttcaaggaaccgcacataagggattccaacaaggaactgtacaaacctgacctgatatttgtgaaggatgggcgtgcacttgtcgtggatgtgacagtacggtatgaagcagccaaatcatcgctggaggaagccgctgcagagaaagtgagaaagtacaaacacctggaaacggaagtaagacatctcacgaatgcaaaggacgttacttttgtgggctttcccctaggagcgcgggggaaatggcaccaagataactttaaacttttgactgagcttggcctctccaaatcgaggcaagtgaaaatggcagagactttttccacagtagcgctcttttcatctgtggacattgtacatatgtttgccagtagggccagaaaatctatggttatgtgataataggctgccttctgcggggcttgccttctggccatgcccttcttctctcccttgcacctgtacctcttggtctttgaataaagcctgagtaggaaggaccggtaaaaaaaaaaaaaaaaaaaaaaaaaaaaaaacgttgactaaaaaaaaaaaaaaaaaaaaaaaaaaaaaaaaaaaaaaaaaaaaaaaaaaaaaaaaaaaaaaaaaaaaaa

SEQ ID NO: 10777 - DNA, 5822 bp, synthetic construct
  source 1..5822: mol_type = other DNA
gaaataagagagaaaagaagagtaagaagaaatataagagaattcgccaccatggccggcaccgccaggggccccggcaggaaggacgccggcccccccggcgccggcctgcccccccagcagaggaggctgggcgacggcgtgtacgacaccttcatgatgatcgacgagaccaagtgccccccctgcagcaacgtgctgtgcaaccccagcgagccccccccccccaggaggctgaacatgaccaccgagcagttcaccggcgaccacacccagcacttcctggacggcggcgagatgaaggtggagcagctgttccaggagttcggcaacaggaagagcaacaccatccagagcgacggcatcagcgacagcgagaagtgcagccccaccgtgagccagggcaagagcagcgactgcctgaacaccgtgaagagcaacagcagcagcaaggcccccaaggtggtgcccctgacccccgagcaggccctgaagcagtacaagcaccacctgaccgcctacgagaagctggagatcatcaactaccccgagatctacttcgtgggccccaacgccaagaagaggcacggcgtgatcggcggccccaacaacggccctaagaaaaagcggaaggtgaatatcagcggctctagctgcggcagccccaacagcgccgacaccagcagcgacttcaaggacctgtggaccaagctgaaggaatgccacgaccgggaagtgcagggactccaggtgaaggtcaccaaactcaagcaagaaagaatcctggacgcccagagactggaagaattcttcaccaagaaccagcagctgagagagcagcagaaagtgctgcacgagacaatcaaggttctggaagatagactgcgggccggcctgtgcgacagatgcgccgtgaccgaggaacacatgcgcaaaaagcagcaggagttcgagaacattagacagcaaaatctgaaattgatcacagagctgatgaacgagagaaacacactgcaggaggagaacaagaagctgagcgagcagctgcaacagaagatcgagaatgatcagcaacaccaggccgctgagctggaatgtgaagaggacgtgatccccgacagcccaatcacagctttcagcttttctggcgtgaacagactgaggcggaaggaaaacccccacgtgcggtacatcgagcagacccataccaagctggaacacagcgtgtgtgccaacgagatgagaaaggtgtccaagtcctccacccatccccagcacaaccctaacgaaaatgagatcctggtggctgatacctacgaccagtctcagagccctatggccaaggcccacggcaccagctcttatacccctgataagagctccttcaacctggccaccgtggtggccgagacactgggcctgggcgtgcaggaggaaagcgagacacagggcccaatgagccctctgggagatgagctgtaccactgcctggaaggcaaccacaagaaacagccttttgagtccggctccgagactcctggaacaagcgagagcgctacacctgagggcagccctaagagaaaggtgtccagcgccgagggcgctgccaaggaagagcctaaacggagaagcgccagactgagcgccaagccccccgccaaggtggaagccaagcctaagaaggccgccgctaaggacaagagcagcgataagaaagtccagaccaagggcaagcggggcgccaaaggcaaacaggccgaggtggccaaccaggagacaaaggaagatctgcctgctgagaacggcgaaaccaagaccgaggaatctccagcttctgacgaggccggagagaaggaggccaaaagcgacagcggctctgagacacctggaacaagcgagagcgccaccccggaatcctatgaacaacttgcaccacaaccgtgtgtgggagaaactttacattctagcctcccacgagacagtgaactgtttgtgcctgaagaggggagcagcgagaaggagagcgaggacgcgccaaaaacatctcctccgacgcctgggaaacatggtttggaacagactggggaggaaaaagtgatggtgactgttcctgacaaaaatccaccttgtccttgctgtggtacccgggtaaactctgtgttgaatctgattgaacatctgaaagtgtcacacgggaaaaggggggtttgttttcggtgtgcaaaatgtggaaaggaaaatagtaactatcacagtgttgtttgtcattttaagaaatgcaggggtccagagacggagaaagccccagctggggagtggatttgtgaggtatgcaacagagattttacaaccaaaattggcctgggacaacacaagagattggcacacccagcagtgagaaatcaggaaaggatcgttgcttcccaaccgaaagaaacatcaaatagaggtgctcacaaaaggtgctggacaaaggaggaggaagaattactaataagactggaggctcagttcgagggaaacaaaaatattaataagcttattgcagaacacataaccaccaaaacagctaagcagatcagtgacaaaaggcgattgctgtccagaaagccagcagaggagccacgtgaggagcctggaacgtgtcatcacaccaggagagcagctgcgagcctgagaacggagcctgagatgagtcatcacgcccaggcagaggacagagataatggacctgggagacgccctctgccaggcagggcagctgccggagggagaacaatggacgagataagacgccaccctgataagggcaacggacagcagagacccaccaagcaaaaatcagaagaacagctgcaggcttactataaaaagacactagaggaacgactttcagctggggcacttaacaccttcccccgagcattcaagcaggtaatggaaggccgggatataaagctagtaatcaatcagacagcgcaggactgcttcggatgcctggaatccataagccaaataagaacggcaacccgagataaaaaggacacggtgacccgggagaaacacccaaagaaaccttttcagaagtggatgaagaagagagcaatcaaaaaaggtaattatcttcggttccagcgtttattttatcttgatagagggaaactggctaaaatcattttagatgatattgaatgcttgtcttgtgacataccactcagtgaaatttattcggtttttaaaacaagatgggaaacaactggtagctttaaaagccttggggactttaaaacttacgggaaggctgacaacactgccttcagagaattaattacggctaaagaaattgagaaaaatgtgcaggaaatgagcaaaggctcggctcccggtccagacgggattactcttggggacgtcgtaaagatggatcccgagttttcccggaccatggagattttcaatttatggttaacaactggtaaaatcccggacatggtgagggggtgcagaaccgttttgattccaaaatcatcaaagccggatcgtttgaaagacattaataactggagacctatcacgatcggttccatcttgctgagactgttctccaggattgtaacagctaggctgagcaaagcgtgccccctgaacccaaggcaaagaggctttatcagagcggcgggatgctctgaaaacttaaaactcctgcaaactataatttggtcggccaaaagagaacacagaccactgggtgttgtattcgtggacatcgccaaggcttttgacaccgtaagccaccagcacatcattcatgctttgcagcaaagagaggtggatccccacatcgtcggtctggtgagcaatatgtacgagaacatcagtacgtatatcaccacaaagaggaacacacacacagacaaaatccagatccgggttggagtaaagcagggtgacccgatgtcgccccttttatttaacctggcaatggaccctctattatgcaagctggaagagagtggcaaaggataccaccgaggacagagcagcatcacagcgatggcatttgcagacgatctggttttgctgagcgactcctgggaaaatatgaatacaaatattagcatactggagaccttctgcaatctgaccggactcaaaacacaggggcaaaagtgccacggcttttacatcaagccgacaaagaagtcttacaccatcaatgactgcgctgcctggactatcaacggcacacccctgaacatgatcgaccccggcgaatctgagaaatacctcggcctgcagtttgacccgtggattggaatagcaaggtccggtctctccacaaaactagatttttggcttcagcggatcgatcaagcaccacttaaacctctgcagaaaactgatattctcaaaacatacaccatccctcggctgatctacatagctgaccactcagaagtgaaaagcgcactactcgaaacccttgaccagaagatccggacagcggtcaaggaatggcttcacctacctccgtgcacctgcgatgccatcctgtactcgagcacgagagacggcggtttgggcatcaccaaattggcaggactgatccccagcgtgcaggcccgtagactgcatcggatcgcacagtcatctgacgatacgatgaaatgcttcatggaaaaagagaaaatggaacagctgcataagaaattgtggattcaagctggaggggacagagagaacataccctcgatttgggaagcaccaccgtcgagtgaaccaccaaacaacgtgagcacaaattcggaatgggaagcaccgacccagaaagataaatttccaaagccttgcaattggaggaaaaacgaattcaaaaaatggaccaaattggcatcccaaggccgcggaattgtaaattttgaaagagacaaaattagtaaccattggatccaatactacagacgcatacctcacaggaaactcctcactgcactacaactcagggccaacgtttaccccacgagagaatttctagccaggggtagacaagaccaatacatcaaggcgtgtaggcactgcgatgcggacaacgaatcctgcgcccacatcatcggcaactgcccagtgacacaggacgcccgaatcaagaggcacaattacatctgcgaactgcttctcgaggaggcgaagaagaaggactgggtagtgttcaaggaaccgcacataagggattccaacaaggaactgtacaaacctgacctgatatttgtgaaggatgggcgtgcacttgtcgtggatgtgacagtacggtatgaagcagccaaatcatcgctggaggaagccgctgcagagaaagtgagaaagtacaaacacctggaaacggaagtaagacatctcacgaatgcaaaggacgttacttttgtgggctttcccctaggagcgcgggggaaatggcaccaagataactttaaacttttgactgagcttggcctctccaaatcgaggcaagtgaaaatggcagagactttttccacagtagcgctcttttcatctgtggacattgtacatatgtttgccagtagggccagaaaatctatggttatgtgataataggctgccttctgcggggcttgccttctggccatgcccttcttctctcccttgcacctgtacctcttggtctttgaataaagcctgagtaggaaggaccggtaaaaaaaaaaaaaaaaaaaaaaaaaaaaaaacgttgactaaaaaaaaaaaaaaaaaaaaaaaaaaaaaaaaaaaaaaaaaaaaaaaaaaaaaaaaaaaaaaaaaaaaaa

SEQ ID NO: 10778 - DNA, 5483 bp, synthetic construct
  source 1..5483: mol_type = other DNA
gaaataagagagaaaagaagagtaagaagaaatataagagaattcgccaccatggccaccctgcacaggagcaggcccgagaccggcaggcccaggcccaagggcctggagggcaagaggcccgccaggctgaccaggagggaggccgacagggacacctacaggaggtgcagcgtgccccccggcgccgacaagaaggccgaggccggcgccggcagcgccaccgagttccagttcaggggcaggtgcggcaggggcaggggccagcccccccagcctaagaaaaagcggaaggtgaatatcagcggctctagctgcggcagccccaacagcgccgacaccagcagcgacttcaaggacctgtggaccaagctgaaggaatgccacgaccgggaagtgcagggactccaggtgaaggtcaccaaactcaagcaagaaagaatcctggacgcccagagactggaagaattcttcaccaagaaccagcagctgagagagcagcagaaagtgctgcacgagacaatcaaggttctggaagatagactgcgggccggcctgtgcgacagatgcgccgtgaccgaggaacacatgcgcaaaaagcagcaggagttcgagaacattagacagcaaaatctgaaattgatcacagagctgatgaacgagagaaacacactgcaggaggagaacaagaagctgagcgagcagctgcaacagaagatcgagaatgatcagcaacaccaggccgctgagctggaatgtgaagaggacgtgatccccgacagcccaatcacagctttcagcttttctggcgtgaacagactgaggcggaaggaaaacccccacgtgcggtacatcgagcagacccataccaagctggaacacagcgtgtgtgccaacgagatgagaaaggtgtccaagtcctccacccatccccagcacaaccctaacgaaaatgagatcctggtggctgatacctacgaccagtctcagagccctatggccaaggcccacggcaccagctcttatacccctgataagagctccttcaacctggccaccgtggtggccgagacactgggcctgggcgtgcaggaggaaagcgagacacagggcccaatgagccctctgggagatgagctgtaccactgcctggaaggcaaccacaagaaacagccttttgagtccggctccgagactcctggaacaagcgagagcgctacacctgagggcagccctaagagaaaggtgtccagcgccgagggcgctgccaaggaagagcctaaacggagaagcgccagactgagcgccaagccccccgccaaggtggaagccaagcctaagaaggccgccgctaaggacaagagcagcgataagaaagtccagaccaagggcaagcggggcgccaaaggcaaacaggccgaggtggccaaccaggagacaaaggaagatctgcctgctgagaacggcgaaaccaagaccgaggaatctccagcttctgacgaggccggagagaaggaggccaaaagcgacagcggctctgagacacctggaacaagcgagagcgccaccccggaatcctatgaacaacttgcaccacaaccgtgtgtgggagaaactttacattctagcctcccacgagacagtgaactgtttgtgcctgaagaggggagcagcgagaaggagagcgaggacgcgccaaaaacatctcctccgacgcctgggaaacatggtttggaacagactggggaggaaaaagtgatggtgactgttcctgacaaaaatccaccttgtccttgctgtggtacccgggtaaactctgtgttgaatctgattgaacatctgaaagtgtcacacgggaaaaggggggtttgttttcggtgtgcaaaatgtggaaaggaaaatagtaactatcacagtgttgtttgtcattttaagaaatgcaggggtccagagacggagaaagccccagctggggagtggatttgtgaggtatgcaacagagattttacaaccaaaattggcctgggacaacacaagagattggcacacccagcagtgagaaatcaggaaaggatcgttgcttcccaaccgaaagaaacatcaaatagaggtgctcacaaaaggtgctggacaaaggaggaggaagaattactaataagactggaggctcagttcgagggaaacaaaaatattaataagcttattgcagaacacataaccaccaaaacagctaagcagatcagtgacaaaaggcgattgctgtccagaaagccagcagaggagccacgtgaggagcctggaacgtgtcatcacaccaggagagcagctgcgagcctgagaacggagcctgagatgagtcatcacgcccaggcagaggacagagataatggacctgggagacgccctctgccaggcagggcagctgccggagggagaacaatggacgagataagacgccaccctgataagggcaacggacagcagagacccaccaagcaaaaatcagaagaacagctgcaggcttactataaaaagacactagaggaacgactttcagctggggcacttaacaccttcccccgagcattcaagcaggtaatggaaggccgggatataaagctagtaatcaatcagacagcgcaggactgcttcggatgcctggaatccataagccaaataagaacggcaacccgagataaaaaggacacggtgacccgggagaaacacccaaagaaaccttttcagaagtggatgaagaagagagcaatcaaaaaaggtaattatcttcggttccagcgtttattttatcttgatagagggaaactggctaaaatcattttagatgatattgaatgcttgtcttgtgacataccactcagtgaaatttattcggtttttaaaacaagatgggaaacaactggtagctttaaaagccttggggactttaaaacttacgggaaggctgacaacactgccttcagagaattaattacggctaaagaaattgagaaaaatgtgcaggaaatgagcaaaggctcggctcccggtccagacgggattactcttggggacgtcgtaaagatggatcccgagttttcccggaccatggagattttcaatttatggttaacaactggtaaaatcccggacatggtgagggggtgcagaaccgttttgattccaaaatcatcaaagccggatcgtttgaaagacattaataactggagacctatcacgatcggttccatcttgctgagactgttctccaggattgtaacagctaggctgagcaaagcgtgccccctgaacccaaggcaaagaggctttatcagagcggcgggatgctctgaaaacttaaaactcctgcaaactataatttggtcggccaaaagagaacacagaccactgggtgttgtattcgtggacatcgccaaggcttttgacaccgtaagccaccagcacatcattcatgctttgcagcaaagagaggtggatccccacatcgtcggtctggtgagcaatatgtacgagaacatcagtacgtatatcaccacaaagaggaacacacacacagacaaaatccagatccgggttggagtaaagcagggtgacccgatgtcgccccttttatttaacctggcaatggaccctctattatgcaagctggaagagagtggcaaaggataccaccgaggacagagcagcatcacagcgatggcatttgcagacgatctggttttgctgagcgactcctgggaaaatatgaatacaaatattagcatactggagaccttctgcaatctgaccggactcaaaacacaggggcaaaagtgccacggcttttacatcaagccgacaaagaagtcttacaccatcaatgactgcgctgcctggactatcaacggcacacccctgaacatgatcgaccccggcgaatctgagaaatacctcggcctgcagtttgacccgtggattggaatagcaaggtccggtctctccacaaaactagatttttggcttcagcggatcgatcaagcaccacttaaacctctgcagaaaactgatattctcaaaacatacaccatccctcggctgatctacatagctgaccactcagaagtgaaaagcgcactactcgaaacccttgaccagaagatccggacagcggtcaaggaatggcttcacctacctccgtgcacctgcgatgccatcctgtactcgagcacgagagacggcggtttgggcatcaccaaattggcaggactgatccccagcgtgcaggcccgtagactgcatcggatcgcacagtcatctgacgatacgatgaaatgcttcatggaaaaagagaaaatggaacagctgcataagaaattgtggattcaagctggaggggacagagagaacataccctcgatttgggaagcaccaccgtcgagtgaaccaccaaacaacgtgagcacaaattcggaatgggaagcaccgacccagaaagataaatttccaaagccttgcaattggaggaaaaacgaattcaaaaaatggaccaaattggcatcccaaggccgcggaattgtaaattttgaaagagacaaaattagtaaccattggatccaatactacagacgcatacctcacaggaaactcctcactgcactacaactcagggccaacgtttaccccacgagagaatttctagccaggggtagacaagaccaatacatcaaggcgtgtaggcactgcgatgcggacaacgaatcctgcgcccacatcatcggcaactgcccagtgacacaggacgcccgaatcaagaggcacaattacatctgcgaactgcttctcgaggaggcgaagaagaaggactgggtagtgttcaaggaaccgcacataagggattccaacaaggaactgtacaaacctgacctgatatttgtgaaggatgggcgtgcacttgtcgtggatgtgacagtacggtatgaagcagccaaatcatcgctggaggaagccgctgcagagaaagtgagaaagtacaaacacctggaaacggaagtaagacatctcacgaatgcaaaggacgttacttttgtgggctttcccctaggagcgcgggggaaatggcaccaagataactttaaacttttgactgagcttggcctctccaaatcgaggcaagtgaaaatggcagagactttttccacagtagcgctcttttcatctgtggacattgtacatatgtttgccagtagggccagaaaatctatggttatgtgataataggctgccttctgcggggcttgccttctggccatgcccttcttctctcccttgcacctgtacctcttggtctttgaataaagcctgagtaggaaggaccggtaaaaaaaaaaaaaaaaaaaaaaaaaaaaaaacgttgactaaaaaaaaaaaaaaaaaaaaaaaaaaaaaaaaaaaaaaaaaaaaaaaaaaaaaaaaaaaaaaaaaaaaaa

SEQ ID NO: 10779 - DNA, 5999 bp, synthetic construct
  source 1..5999: mol_type = other DNA
gaaataagagagaaaagaagagtaagaagaaatataagagaattcgccaccatggccatgcagagggagatgagcatggacgagagcaagcaggtggagaccaagaccgacgccaagaacggcgaggagaggggcagggacgccagcaagaaggccctgggccccaggagggacagcgacctgggcaaggagcccaagaggggcggcctgaagaagagcttcagcagggacagggacgaggccggcggcaagagcggcgagaagcccaaggaggagaagatcatcaggggcatcgacaagggcagggtgagggccgccgtggacaagaaggaggccggcaaggacggcaggggcgaggagagggccgtggccaccaagaaggaggaggagaagaagggcagcgacaggaacaccggcctgagcagggacaaggacaagaagagggaggagatgaaggaggtggccaagaaggaggacgacgagaaggtgaagggcgagaggaggaacaccgacaccaggaaggagggcgagaagatgaagagggccggcggcaacaccgacatgaagaaggaggacgagaaggtgaagaggggcaccggcaacaccgacaccaagaaggacgacgagaaggtgaagaagaacgagcccctgcacgagaaggaggccaaggacgacagcaagaccaagacccccgagaagcagacccccagcggccccaccaagcccagcgagggccccgccaaggtggaggaggaggccgcccccagcatcttcgacgagcccctggagaggcctaagaaaaagcggaaggtgaatatcagcggctctagctgcggcagccccaacagcgccgacaccagcagcgacttcaaggacctgtggaccaagctgaaggaatgccacgaccgggaagtgcagggactccaggtgaaggtcaccaaactcaagcaagaaagaatcctggacgcccagagactggaagaattcttcaccaagaaccagcagctgagagagcagcagaaagtgctgcacgagacaatcaaggttctggaagatagactgcgggccggcctgtgcgacagatgcgccgtgaccgaggaacacatgcgcaaaaagcagcaggagttcgagaacattagacagcaaaatctgaaattgatcacagagctgatgaacgagagaaacacactgcaggaggagaacaagaagctgagcgagcagctgcaacagaagatcgagaatgatcagcaacaccaggccgctgagctggaatgtgaagaggacgtgatccccgacagcccaatcacagctttcagcttttctggcgtgaacagactgaggcggaaggaaaacccccacgtgcggtacatcgagcagacccataccaagctggaacacagcgtgtgtgccaacgagatgagaaaggtgtccaagtcctccacccatccccagcacaaccctaacgaaaatgagatcctggtggctgatacctacgaccagtctcagagccctatggccaaggcccacggcaccagctcttatacccctgataagagctccttcaacctggccaccgtggtggccgagacactgggcctgggcgtgcaggaggaaagcgagacacagggcccaatgagccctctgggagatgagctgtaccactgcctggaaggcaaccacaagaaacagccttttgagtccggctccgagactcctggaacaagcgagagcgctacacctgagggcagccctaagagaaaggtgtccagcgccgagggcgctgccaaggaagagcctaaacggagaagcgccagactgagcgccaagccccccgccaaggtggaagccaagcctaagaaggccgccgctaaggacaagagcagcgataagaaagtccagaccaagggcaagcggggcgccaaaggcaaacaggccgaggtggccaaccaggagacaaaggaagatctgcctgctgagaacggcgaaaccaagaccgaggaatctccagcttctgacgaggccggagagaaggaggccaaaagcgacagcggctctgagacacctggaacaagcgagagcgccaccccggaatcctatgaacaacttgcaccacaaccgtgtgtgggagaaactttacattctagcctcccacgagacagtgaactgtttgtgcctgaagaggggagcagcgagaaggagagcgaggacgcgccaaaaacatctcctccgacgcctgggaaacatggtttggaacagactggggaggaaaaagtgatggtgactgttcctgacaaaaatccaccttgtccttgctgtggtacccgggtaaactctgtgttgaatctgattgaacatctgaaagtgtcacacgggaaaaggggggtttgttttcggtgtgcaaaatgtggaaaggaaaatagtaactatcacagtgttgtttgtcattttaagaaatgcaggggtccagagacggagaaagccccagctggggagtggatttgtgaggtatgcaacagagattttacaaccaaaattggcctgggacaacacaagagattggcacacccagcagtgagaaatcaggaaaggatcgttgcttcccaaccgaaagaaacatcaaatagaggtgctcacaaaaggtgctggacaaaggaggaggaagaattactaataagactggaggctcagttcgagggaaacaaaaatattaataagcttattgcagaacacataaccaccaaaacagctaagcagatcagtgacaaaaggcgattgctgtccagaaagccagcagaggagccacgtgaggagcctggaacgtgtcatcacaccaggagagcagctgcgagcctgagaacggagcctgagatgagtcatcacgcccaggcagaggacagagataatggacctgggagacgccctctgccaggcagggcagctgccggagggagaacaatggacgagataagacgccaccctgataagggcaacggacagcagagacccaccaagcaaaaatcagaagaacagctgcaggcttactataaaaagacactagaggaacgactttcagctggggcacttaacaccttcccccgagcattcaagcaggtaatggaaggccgggatataaagctagtaatcaatcagacagcgcaggactgcttcggatgcctggaatccataagccaaataagaacggcaacccgagataaaaaggacacggtgacccgggagaaacacccaaagaaaccttttcagaagtggatgaagaagagagcaatcaaaaaaggtaattatcttcggttccagcgtttattttatcttgatagagggaaactggctaaaatcattttagatgatattgaatgcttgtcttgtgacataccactcagtgaaatttattcggtttttaaaacaagatgggaaacaactggtagctttaaaagccttggggactttaaaacttacgggaaggctgacaacactgccttcagagaattaattacggctaaagaaattgagaaaaatgtgcaggaaatgagcaaaggctcggctcccggtccagacgggattactcttggggacgtcgtaaagatggatcccgagttttcccggaccatggagattttcaatttatggttaacaactggtaaaatcccggacatggtgagggggtgcagaaccgttttgattccaaaatcatcaaagccggatcgtttgaaagacattaataactggagacctatcacgatcggttccatcttgctgagactgttctccaggattgtaacagctaggctgagcaaagcgtgccccctgaacccaaggcaaagaggctttatcagagcggcgggatgctctgaaaacttaaaactcctgcaaactataatttggtcggccaaaagagaacacagaccactgggtgttgtattcgtggacatcgccaaggcttttgacaccgtaagccaccagcacatcattcatgctttgcagcaaagagaggtggatccccacatcgtcggtctggtgagcaatatgtacgagaacatcagtacgtatatcaccacaaagaggaacacacacacagacaaaatccagatccgggttggagtaaagcagggtgacccgatgtcgccccttttatttaacctggcaatggaccctctattatgcaagctggaagagagtggcaaaggataccaccgaggacagagcagcatcacagcgatggcatttgcagacgatctggttttgctgagcgactcctgggaaaatatgaatacaaatattagcatactggagaccttctgcaatctgaccggactcaaaacacaggggcaaaagtgccacggcttttacatcaagccgacaaagaagtcttacaccatcaatgactgcgctgcctggactatcaacggcacacccctgaacatgatcgaccccggcgaatctgagaaatacctcggcctgcagtttgacccgtggattggaatagcaaggtccggtctctccacaaaactagatttttggcttcagcggatcgatcaagcaccacttaaacctctgcagaaaactgatattctcaaaacatacaccatccctcggctgatctacatagctgaccactcagaagtgaaaagcgcactactcgaaacccttgaccagaagatccggacagcggtcaaggaatggcttcacctacctccgtgcacctgcgatgccatcctgtactcgagcacgagagacggcggtttgggcatcaccaaattggcaggactgatccccagcgtgcaggcccgtagactgcatcggatcgcacagtcatctgacgatacgatgaaatgcttcatggaaaaagagaaaatggaacagctgcataagaaattgtggattcaagctggaggggacagagagaacataccctcgatttgggaagcaccaccgtcgagtgaaccaccaaacaacgtgagcacaaattcggaatgggaagcaccgacccagaaagataaatttccaaagccttgcaattggaggaaaaacgaattcaaaaaatggaccaaattggcatcccaaggccgcggaattgtaaattttgaaagagacaaaattagtaaccattggatccaatactacagacgcatacctcacaggaaactcctcactgcactacaactcagggccaacgtttaccccacgagagaatttctagccaggggtagacaagaccaatacatcaaggcgtgtaggcactgcgatgcggacaacgaatcctgcgcccacatcatcggcaactgcccagtgacacaggacgcccgaatcaagaggcacaattacatctgcgaactgcttctcgaggaggcgaagaagaaggactgggtagtgttcaaggaaccgcacataagggattccaacaaggaactgtacaaacctgacctgatatttgtgaaggatgggcgtgcacttgtcgtggatgtgacagtacggtatgaagcagccaaatcatcgctggaggaagccgctgcagagaaagtgagaaagtacaaacacctggaaacggaagtaagacatctcacgaatgcaaaggacgttacttttgtgggctttcccctaggagcgcgggggaaatggcaccaagataactttaaacttttgactgagcttggcctctccaaatcgaggcaagtgaaaatggcagagactttttccacagtagcgctcttttcatctgtggacattgtacatatgtttgccagtagggccagaaaatctatggttatgtgataataggctgccttctgcggggcttgccttctggccatgcccttcttctctcccttgcacctgtacctcttggtctttgaataaagcctgagtaggaaggaccggtaaaaaaaaaaaaaaaaaaaaaaaaaaaaaaacgttgactaaaaaaaaaaaaaaaaaaaaaaaaaaaaaaaaaaaaaaaaaaaaaaaaaaaaaaaaaaaaaaaaaaaaaa

SEQ ID NO: 10780 - DNA, 5570 bp, synthetic construct
  source 1..5570: mol_type = other DNA
gaaataagagagaaaagaagagtaagaagaaatataagagaattcgccaccatggccgacaagcagaggcagaagaggctgcaggagcagaggcaggcccaggaggccaagggcgagaagaaggacctgctggaggtgcccaaggccggcgccgtggccaagggcagccccaagcccagcccccagcccagccccaagcccagccccaagaacagccccaagaagggcggcgcccccgccgcccccccccccccccccccccccctggccccccccctgatcatggagaacctgaagaacagcctgagccccgccacccagaggaagatgggcgacaaggtgctgcccgcccaggagaagaaccctaagaaaaagcggaaggtgaatatcagcggctctagctgcggcagccccaacagcgccgacaccagcagcgacttcaaggacctgtggaccaagctgaaggaatgccacgaccgggaagtgcagggactccaggtgaaggtcaccaaactcaagcaagaaagaatcctggacgcccagagactggaagaattcttcaccaagaaccagcagctgagagagcagcagaaagtgctgcacgagacaatcaaggttctggaagatagactgcgggccggcctgtgcgacagatgcgccgtgaccgaggaacacatgcgcaaaaagcagcaggagttcgagaacattagacagcaaaatctgaaattgatcacagagctgatgaacgagagaaacacactgcaggaggagaacaagaagctgagcgagcagctgcaacagaagatcgagaatgatcagcaacaccaggccgctgagctggaatgtgaagaggacgtgatccccgacagcccaatcacagctttcagcttttctggcgtgaacagactgaggcggaaggaaaacccccacgtgcggtacatcgagcagacccataccaagctggaacacagcgtgtgtgccaacgagatgagaaaggtgtccaagtcctccacccatccccagcacaaccctaacgaaaatgagatcctggtggctgatacctacgaccagtctcagagccctatggccaaggcccacggcaccagctcttatacccctgataagagctccttcaacctggccaccgtggtggccgagacactgggcctgggcgtgcaggaggaaagcgagacacagggcccaatgagccctctgggagatgagctgtaccactgcctggaaggcaaccacaagaaacagccttttgagtccggctccgagactcctggaacaagcgagagcgctacacctgagggcagccctaagagaaaggtgtccagcgccgagggcgctgccaaggaagagcctaaacggagaagcgccagactgagcgccaagccccccgccaaggtggaagccaagcctaagaaggccgccgctaaggacaagagcagcgataagaaagtccagaccaagggcaagcggggcgccaaaggcaaacaggccgaggtggccaaccaggagacaaaggaagatctgcctgctgagaacggcgaaaccaagaccgaggaatctccagcttctgacgaggccggagagaaggaggccaaaagcgacagcggctctgagacacctggaacaagcgagagcgccaccccggaatcctatgaacaacttgcaccacaaccgtgtgtgggagaaactttacattctagcctcccacgagacagtgaactgtttgtgcctgaagaggggagcagcgagaaggagagcgaggacgcgccaaaaacatctcctccgacgcctgggaaacatggtttggaacagactggggaggaaaaagtgatggtgactgttcctgacaaaaatccaccttgtccttgctgtggtacccgggtaaactctgtgttgaatctgattgaacatctgaaagtgtcacacgggaaaaggggggtttgttttcggtgtgcaaaatgtggaaaggaaaatagtaactatcacagtgttgtttgtcattttaagaaatgcaggggtccagagacggagaaagccccagctggggagtggatttgtgaggtatgcaacagagattttacaaccaaaattggcctgggacaacacaagagattggcacacccagcagtgagaaatcaggaaaggatcgttgcttcccaaccgaaagaaacatcaaatagaggtgctcacaaaaggtgctggacaaaggaggaggaagaattactaataagactggaggctcagttcgagggaaacaaaaatattaataagcttattgcagaacacataaccaccaaaacagctaagcagatcagtgacaaaaggcgattgctgtccagaaagccagcagaggagccacgtgaggagcctggaacgtgtcatcacaccaggagagcagctgcgagcctgagaacggagcctgagatgagtcatcacgcccaggcagaggacagagataatggacctgggagacgccctctgccaggcagggcagctgccggagggagaacaatggacgagataagacgccaccctgataagggcaacggacagcagagacccaccaagcaaaaatcagaagaacagctgcaggcttactataaaaagacactagaggaacgactttcagctggggcacttaacaccttcccccgagcattcaagcaggtaatggaaggccgggatataaagctagtaatcaatcagacagcgcaggactgcttcggatgcctggaatccataagccaaataagaacggcaacccgagataaaaaggacacggtgacccgggagaaacacccaaagaaaccttttcagaagtggatgaagaagagagcaatcaaaaaaggtaattatcttcggttccagcgtttattttatcttgatagagggaaactggctaaaatcattttagatgatattgaatgcttgtcttgtgacataccactcagtgaaatttattcggtttttaaaacaagatgggaaacaactggtagctttaaaagccttggggactttaaaacttacgggaaggctgacaacactgccttcagagaattaattacggctaaagaaattgagaaaaatgtgcaggaaatgagcaaaggctcggctcccggtccagacgggattactcttggggacgtcgtaaagatggatcccgagttttcccggaccatggagattttcaatttatggttaacaactggtaaaatcccggacatggtgagggggtgcagaaccgttttgattccaaaatcatcaaagccggatcgtttgaaagacattaataactggagacctatcacgatcggttccatcttgctgagactgttctccaggattgtaacagctaggctgagcaaagcgtgccccctgaacccaaggcaaagaggctttatcagagcggcgggatgctctgaaaacttaaaactcctgcaaactataatttggtcggccaaaagagaacacagaccactgggtgttgtattcgtggacatcgccaaggcttttgacaccgtaagccaccagcacatcattcatgctttgcagcaaagagaggtggatccccacatcgtcggtctggtgagcaatatgtacgagaacatcagtacgtatatcaccacaaagaggaacacacacacagacaaaatccagatccgggttggagtaaagcagggtgacccgatgtcgccccttttatttaacctggcaatggaccctctattatgcaagctggaagagagtggcaaaggataccaccgaggacagagcagcatcacagcgatggcatttgcagacgatctggttttgctgagcgactcctgggaaaatatgaatacaaatattagcatactggagaccttctgcaatctgaccggactcaaaacacaggggcaaaagtgccacggcttttacatcaagccgacaaagaagtcttacaccatcaatgactgcgctgcctggactatcaacggcacacccctgaacatgatcgaccccggcgaatctgagaaatacctcggcctgcagtttgacccgtggattggaatagcaaggtccggtctctccacaaaactagatttttggcttcagcggatcgatcaagcaccacttaaacctctgcagaaaactgatattctcaaaacatacaccatccctcggctgatctacatagctgaccactcagaagtgaaaagcgcactactcgaaacccttgaccagaagatccggacagcggtcaaggaatggcttcacctacctccgtgcacctgcgatgccatcctgtactcgagcacgagagacggcggtttgggcatcaccaaattggcaggactgatccccagcgtgcaggcccgtagactgcatcggatcgcacagtcatctgacgatacgatgaaatgcttcatggaaaaagagaaaatggaacagctgcataagaaattgtggattcaagctggaggggacagagagaacataccctcgatttgggaagcaccaccgtcgagtgaaccaccaaacaacgtgagcacaaattcggaatgggaagcaccgacccagaaagataaatttccaaagccttgcaattggaggaaaaacgaattcaaaaaatggaccaaattggcatcccaaggccgcggaattgtaaattttgaaagagacaaaattagtaaccattggatccaatactacagacgcatacctcacaggaaactcctcactgcactacaactcagggccaacgtttaccccacgagagaatttctagccaggggtagacaagaccaatacatcaaggcgtgtaggcactgcgatgcggacaacgaatcctgcgcccacatcatcggcaactgcccagtgacacaggacgcccgaatcaagaggcacaattacatctgcgaactgcttctcgaggaggcgaagaagaaggactgggtagtgttcaaggaaccgcacataagggattccaacaaggaactgtacaaacctgacctgatatttgtgaaggatgggcgtgcacttgtcgtggatgtgacagtacggtatgaagcagccaaatcatcgctggaggaagccgctgcagagaaagtgagaaagtacaaacacctggaaacggaagtaagacatctcacgaatgcaaaggacgttacttttgtgggctttcccctaggagcgcgggggaaatggcaccaagataactttaaacttttgactgagcttggcctctccaaatcgaggcaagtgaaaatggcagagactttttccacagtagcgctcttttcatctgtggacattgtacatatgtttgccagtagggccagaaaatctatggttatgtgataataggctgccttctgcggggcttgccttctggccatgcccttcttctctcccttgcacctgtacctcttggtctttgaataaagcctgagtaggaaggaccggtaaaaaaaaaaaaaaaaaaaaaaaaaaaaaaacgttgactaaaaaaaaaaaaaaaaaaaaaaaaaaaaaaaaaaaaaaaaaaaaaaaaaaaaaaaaaaaaaaaaaaaaaa

SEQ ID NO: 10781 - DNA, 5750 bp, synthetic construct
  source 1..5750: mol_type = other DNA
gaaataagagagaaaagaagagtaagaagaaatataagagaattcgccaccatggccgacgtgggcggcgtgcagggcaagaggaaggccgccagcaaggccgccgcccagcagaggaagatcctgctggagggcagcgacggcgacagcgccaacgacaccgagcccgacttcgcccccggcgaggacagcgaggacgacagcgacttctgcgagagcgaggacaacgacgaggacttcagcatgaggaagagcaaggtgaaggagatcaagaagaaggaggtgaaggtgaagagccccgtggagaagaaggagaagaagagcaagagcaagtgcaacgccctggtgaccagcgtggacagcgcccccgccgccgtgaagagcgagagccagagcctgcccaagaaggtgagcctgagcagcgacaccaccaggaagcccctggagatcaggagccccagcgccgagagcaagaagcccaagtgggtgccccccgccgccagcggcggcagcaggagcagcagcagccccctggtggtggtgcctaagaaaaagcggaaggtgaatatcagcggctctagctgcggcagccccaacagcgccgacaccagcagcgacttcaaggacctgtggaccaagctgaaggaatgccacgaccgggaagtgcagggactccaggtgaaggtcaccaaactcaagcaagaaagaatcctggacgcccagagactggaagaattcttcaccaagaaccagcagctgagagagcagcagaaagtgctgcacgagacaatcaaggttctggaagatagactgcgggccggcctgtgcgacagatgcgccgtgaccgaggaacacatgcgcaaaaagcagcaggagttcgagaacattagacagcaaaatctgaaattgatcacagagctgatgaacgagagaaacacactgcaggaggagaacaagaagctgagcgagcagctgcaacagaagatcgagaatgatcagcaacaccaggccgctgagctggaatgtgaagaggacgtgatccccgacagcccaatcacagctttcagcttttctggcgtgaacagactgaggcggaaggaaaacccccacgtgcggtacatcgagcagacccataccaagctggaacacagcgtgtgtgccaacgagatgagaaaggtgtccaagtcctccacccatccccagcacaaccctaacgaaaatgagatcctggtggctgatacctacgaccagtctcagagccctatggccaaggcccacggcaccagctcttatacccctgataagagctccttcaacctggccaccgtggtggccgagacactgggcctgggcgtgcaggaggaaagcgagacacagggcccaatgagccctctgggagatgagctgtaccactgcctggaaggcaaccacaagaaacagccttttgagtccggctccgagactcctggaacaagcgagagcgctacacctgagggcagccctaagagaaaggtgtccagcgccgagggcgctgccaaggaagagcctaaacggagaagcgccagactgagcgccaagccccccgccaaggtggaagccaagcctaagaaggccgccgctaaggacaagagcagcgataagaaagtccagaccaagggcaagcggggcgccaaaggcaaacaggccgaggtggccaaccaggagacaaaggaagatctgcctgctgagaacggcgaaaccaagaccgaggaatctccagcttctgacgaggccggagagaaggaggccaaaagcgacagcggctctgagacacctggaacaagcgagagcgccaccccggaatcctatgaacaacttgcaccacaaccgtgtgtgggagaaactttacattctagcctcccacgagacagtgaactgtttgtgcctgaagaggggagcagcgagaaggagagcgaggacgcgccaaaaacatctcctccgacgcctgggaaacatggtttggaacagactggggaggaaaaagtgatggtgactgttcctgacaaaaatccaccttgtccttgctgtggtacccgggtaaactctgtgttgaatctgattgaacatctgaaagtgtcacacgggaaaaggggggtttgttttcggtgtgcaaaatgtggaaaggaaaatagtaactatcacagtgttgtttgtcattttaagaaatgcaggggtccagagacggagaaagccccagctggggagtggatttgtgaggtatgcaacagagattttacaaccaaaattggcctgggacaacacaagagattggcacacccagcagtgagaaatcaggaaaggatcgttgcttcccaaccgaaagaaacatcaaatagaggtgctcacaaaaggtgctggacaaaggaggaggaagaattactaataagactggaggctcagttcgagggaaacaaaaatattaataagcttattgcagaacacataaccaccaaaacagctaagcagatcagtgacaaaaggcgattgctgtccagaaagccagcagaggagccacgtgaggagcctggaacgtgtcatcacaccaggagagcagctgcgagcctgagaacggagcctgagatgagtcatcacgcccaggcagaggacagagataatggacctgggagacgccctctgccaggcagggcagctgccggagggagaacaatggacgagataagacgccaccctgataagggcaacggacagcagagacccaccaagcaaaaatcagaagaacagctgcaggcttactataaaaagacactagaggaacgactttcagctggggcacttaacaccttcccccgagcattcaagcaggtaatggaaggccgggatataaagctagtaatcaatcagacagcgcaggactgcttcggatgcctggaatccataagccaaataagaacggcaacccgagataaaaaggacacggtgacccgggagaaacacccaaagaaaccttttcagaagtggatgaagaagagagcaatcaaaaaaggtaattatcttcggttccagcgtttattttatcttgatagagggaaactggctaaaatcattttagatgatattgaatgcttgtcttgtgacataccactcagtgaaatttattcggtttttaaaacaagatgggaaacaactggtagctttaaaagccttggggactttaaaacttacgggaaggctgacaacactgccttcagagaattaattacggctaaagaaattgagaaaaatgtgcaggaaatgagcaaaggctcggctcccggtccagacgggattactcttggggacgtcgtaaagatggatcccgagttttcccggaccatggagattttcaatttatggttaacaactggtaaaatcccggacatggtgagggggtgcagaaccgttttgattccaaaatcatcaaagccggatcgtttgaaagacattaataactggagacctatcacgatcggttccatcttgctgagactgttctccaggattgtaacagctaggctgagcaaagcgtgccccctgaacccaaggcaaagaggctttatcagagcggcgggatgctctgaaaacttaaaactcctgcaaactataatttggtcggccaaaagagaacacagaccactgggtgttgtattcgtggacatcgccaaggcttttgacaccgtaagccaccagcacatcattcatgctttgcagcaaagagaggtggatccccacatcgtcggtctggtgagcaatatgtacgagaacatcagtacgtatatcaccacaaagaggaacacacacacagacaaaatccagatccgggttggagtaaagcagggtgacccgatgtcgccccttttatttaacctggcaatggaccctctattatgcaagctggaagagagtggcaaaggataccaccgaggacagagcagcatcacagcgatggcatttgcagacgatctggttttgctgagcgactcctgggaaaatatgaatacaaatattagcatactggagaccttctgcaatctgaccggactcaaaacacaggggcaaaagtgccacggcttttacatcaagccgacaaagaagtcttacaccatcaatgactgcgctgcctggactatcaacggcacacccctgaacatgatcgaccccggcgaatctgagaaatacctcggcctgcagtttgacccgtggattggaatagcaaggtccggtctctccacaaaactagatttttggcttcagcggatcgatcaagcaccacttaaacctctgcagaaaactgatattctcaaaacatacaccatccctcggctgatctacatagctgaccactcagaagtgaaaagcgcactactcgaaacccttgaccagaagatccggacagcggtcaaggaatggcttcacctacctccgtgcacctgcgatgccatcctgtactcgagcacgagagacggcggtttgggcatcaccaaattggcaggactgatccccagcgtgcaggcccgtagactgcatcggatcgcacagtcatctgacgatacgatgaaatgcttcatggaaaaagagaaaatggaacagctgcataagaaattgtggattcaagctggaggggacagagagaacataccctcgatttgggaagcaccaccgtcgagtgaaccaccaaacaacgtgagcacaaattcggaatgggaagcaccgacccagaaagataaatttccaaagccttgcaattggaggaaaaacgaattcaaaaaatggaccaaattggcatcccaaggccgcggaattgtaaattttgaaagagacaaaattagtaaccattggatccaatactacagacgcatacctcacaggaaactcctcactgcactacaactcagggccaacgtttaccccacgagagaatttctagccaggggtagacaagaccaatacatcaaggcgtgtaggcactgcgatgcggacaacgaatcctgcgcccacatcatcggcaactgcccagtgacacaggacgcccgaatcaagaggcacaattacatctgcgaactgcttctcgaggaggcgaagaagaaggactgggtagtgttcaaggaaccgcacataagggattccaacaaggaactgtacaaacctgacctgatatttgtgaaggatgggcgtgcacttgtcgtggatgtgacagtacggtatgaagcagccaaatcatcgctggaggaagccgctgcagagaaagtgagaaagtacaaacacctggaaacggaagtaagacatctcacgaatgcaaaggacgttacttttgtgggctttcccctaggagcgcgggggaaatggcaccaagataactttaaacttttgactgagcttggcctctccaaatcgaggcaagtgaaaatggcagagactttttccacagtagcgctcttttcatctgtggacattgtacatatgtttgccagtagggccagaaaatctatggttatgtgataataggctgccttctgcggggcttgccttctggccatgcccttcttctctcccttgcacctgtacctcttggtctttgaataaagcctgagtaggaaggaccggtaaaaaaaaaaaaaaaaaaaaaaaaaaaaaaacgttgactaaaaaaaaaaaaaaaaaaaaaaaaaaaaaaaaaaaaaaaaaaaaaaaaaaaaaaaaaaaaaaaaaaaaaa

SEQ ID NO: 10782 - DNA, 6182 bp, synthetic construct
  source 1..6182: mol_type = other DNA
gaaataagagagaaaagaagagtaagaagaaatataagagaattcgccaccatggcccctaagaaaaagcggaaggtggacagaaagacaagactgtctgagcctccaaccctggccctgagactgaagccctacaagaccgccatccagcagctgagaagcgtcatcagagccctgaaggaaaataccaccgttacattcctgcctacacccagcctgatcctgcagacagtgcgcagccactgcgtgtctaagatcacatttaattctagctgcctgtatatcaccgacaagtctttccagcctaagaccatcaacaacagcacccctctgctgggcaactttatgtacctgacctccagcaaggacctgactaaattctacgtgcaagacatctccgatctgagcgccaagatctctatgtgcgcccctgatttcaacatggaattcagcagcgcctgtgtgcatggccaggacatcgtcagagagagcgagaacagcgctgtgcacgtggacctggacttcggcgtggtggctgatctgctcaaatggatcggcccccacaccagagtgaagcggaacgtgaagaaagccccttgtcctacaggcacagtgcagatcctggtgcacgccggaccacctgctatcaagttcatccttacaaacggcagcgagctggaattcaccgccaacaaccgggtgtccttccacggcgtgaaaaacatgcggattaacgtgcaactgaaaaatttttaccagaccctgctgaactgcgccgtgaccaagctgccctgcaccctcaggattgtgaccgagcacgacaccctgctgtacgtcgccagcagaaacggcctgttcgccgtggagaacttcctgaccgaggaaccctttcagcggggtgatcctttcgacaagaactacgtgggaaatagcggcaagagcagatccggctccgagactcctggaacaagcgagagcgctacacctgagggcagcaatatcagcggctctagctgcggcagccccaacagcgccgacaccagcagcgacttcaaggacctgtggaccaagctgaaggaatgccacgaccgggaagtgcagggactccaggtgaaggtcaccaaactcaagcaagaaagaatcctggacgcccagagactggaagaattcttcaccaagaaccagcagctgagagagcagcagaaagtgctgcacgagacaatcaaggttctggaagatagactgcgggccggcctgtgcgacagatgcgccgtgaccgaggaacacatgcgcaaaaagcagcaggagttcgagaacattagacagcaaaatctgaaattgatcacagagctgatgaacgagagaaacacactgcaggaggagaacaagaagctgagcgagcagctgcaacagaagatcgagaatgatcagcaacaccaggccgctgagctggaatgtgaagaggacgtgatccccgacagcccaatcacagctttcagcttttctggcgtgaacagactgaggcggaaggaaaacccccacgtgcggtacatcgagcagacccataccaagctggaacacagcgtgtgtgccaacgagatgagaaaggtgtccaagtcctccacccatccccagcacaaccctaacgaaaatgagatcctggtggctgatacctacgaccagtctcagagccctatggccaaggcccacggcaccagctcttatacccctgataagagctccttcaacctggccaccgtggtggccgagacactgggcctgggcgtgcaggaggaaagcgagacacagggcccaatgagccctctgggagatgagctgtaccactgcctggaaggcaaccacaagaaacagccttttgagtccggctccgagactcctggaacaagcgagagcgctacacctgagggcagccctaagagaaaggtgtccagcgccgagggcgctgccaaggaagagcctaaacggagaagcgccagactgagcgccaagccccccgccaaggtggaagccaagcctaagaaggccgccgctaaggacaagagcagcgataagaaagtccagaccaagggcaagcggggcgccaaaggcaaacaggccgaggtggccaaccaggagacaaaggaagatctgcctgctgagaacggcgaaaccaagaccgaggaatctccagcttctgacgaggccggagagaaggaggccaaaagcgacagcggctctgagacacctggaacaagcgagagcgccaccccggaatcctatgaacaacttgcaccacaaccgtgtgtgggagaaactttacattctagcctcccacgagacagtgaactgtttgtgcctgaagaggggagcagcgagaaggagagcgaggacgcgccaaaaacatctcctccgacgcctgggaaacatggtttggaacagactggggaggaaaaagtgatggtgactgttcctgacaaaaatccaccttgtccttgctgtggtacccgggtaaactctgtgttgaatctgattgaacatctgaaagtgtcacacgggaaaaggggggtttgttttcggtgtgcaaaatgtggaaaggaaaatagtaactatcacagtgttgtttgtcattttaagaaatgcaggggtccagagacggagaaagccccagctggggagtggatttgtgaggtatgcaacagagattttacaaccaaaattggcctgggacaacacaagagattggcacacccagcagtgagaaatcaggaaaggatcgttgcttcccaaccgaaagaaacatcaaatagaggtgctcacaaaaggtgctggacaaaggaggaggaagaattactaataagactggaggctcagttcgagggaaacaaaaatattaataagcttattgcagaacacataaccaccaaaacagctaagcagatcagtgacaaaaggcgattgctgtccagaaagccagcagaggagccacgtgaggagcctggaacgtgtcatcacaccaggagagcagctgcgagcctgagaacggagcctgagatgagtcatcacgcccaggcagaggacagagataatggacctgggagacgccctctgccaggcagggcagctgccggagggagaacaatggacgagataagacgccaccctgataagggcaacggacagcagagacccaccaagcaaaaatcagaagaacagctgcaggcttactataaaaagacactagaggaacgactttcagctggggcacttaacaccttcccccgagcattcaagcaggtaatggaaggccgggatataaagctagtaatcaatcagacagcgcaggactgcttcggatgcctggaatccataagccaaataagaacggcaacccgagataaaaaggacacggtgacccgggagaaacacccaaagaaaccttttcagaagtggatgaagaagagagcaatcaaaaaaggtaattatcttcggttccagcgtttattttatcttgatagagggaaactggctaaaatcattttagatgatattgaatgcttgtcttgtgacataccactcagtgaaatttattcggtttttaaaacaagatgggaaacaactggtagctttaaaagccttggggactttaaaacttacgggaaggctgacaacactgccttcagagaattaattacggctaaagaaattgagaaaaatgtgcaggaaatgagcaaaggctcggctcccggtccagacgggattactcttggggacgtcgtaaagatggatcccgagttttcccggaccatggagattttcaatttatggttaacaactggtaaaatcccggacatggtgagggggtgcagaaccgttttgattccaaaatcatcaaagccggatcgtttgaaagacattaataactggagacctatcacgatcggttccatcttgctgagactgttctccaggattgtaacagctaggctgagcaaagcgtgccccctgaacccaaggcaaagaggctttatcagagcggcgggatgctctgaaaacttaaaactcctgcaaactataatttggtcggccaaaagagaacacagaccactgggtgttgtattcgtggacatcgccaaggcttttgacaccgtaagccaccagcacatcattcatgctttgcagcaaagagaggtggatccccacatcgtcggtctggtgagcaatatgtacgagaacatcagtacgtatatcaccacaaagaggaacacacacacagacaaaatccagatccgggttggagtaaagcagggtgacccgatgtcgccccttttatttaacctggcaatggaccctctattatgcaagctggaagagagtggcaaaggataccaccgaggacagagcagcatcacagcgatggcatttgcagacgatctggttttgctgagcgactcctgggaaaatatgaatacaaatattagcatactggagaccttctgcaatctgaccggactcaaaacacaggggcaaaagtgccacggcttttacatcaagccgacaaaggactcttacaccatcaatgactgcgctgcctggactatcaacggcacacccctgaacatgatcgaccccggcgaatctgagaaatacctcggcctgcagtttgacccgtggattggaatagcaaggtccggtctctccacaaaactagatttttggcttcagcggatcgatcaagcaccacttaaacctctgcagaaaactgatattctcaaaacatacaccatccctcggctgatctacatagctgaccactcagaagtgaaaagcgcactactcgaaacccttgaccagaagatccggacagcggtcaaggaatggcttcacctacctccgtgcacctgcgatgccatcctgtactcgagcacgagagacggcggtttgggcatcaccaaattggcaggactgatccccagcgtgcaggcccgtagactgcatcggatcgcacagtcatctgacgatacgatgaaatgcttcatggaaaaagagaaaatggaacagctgcataagaaattgtggattcaagctggaggggacagagagaacataccctcgatttgggaagcaccaccgtcgagtgaaccaccaaacaacgtgagcacaaattcggaatgggaagcaccgacccagaaagataaatttccaaagccttgcaattggaggaaaaacgaattcaaaaaatggaccaaattggcatcccaaggccgcggaattgtaaattttgaaagagacaaaattagtaaccattggatccaatactacagacgcatacctcacaggaaactcctcactgcactacaactcagggccaacgtttaccccacgagagaatttctagccaggggtagacaagaccaatacatcaaggcgtgtaggcactgcgatgcggacaacgaatcctgcgcccacatcatcggcaactgcccagtgacacaggacgcccgaatcaagaggcacaattacatctgcgaactgcttctcgaggaggcgaagaagaaggactgggtagtgttcaaggaaccgcacataagggattccaacaaggaactgtacaaacctgacctgatatttgtgaaggatgggcgtgcacttgtcgtggatgtgacagtacggtatgaagcagccaaatcatcgctggaggaagccgctgcagagaaagtgagaaagtacaaacacctggaaacggaagtaagacatctcacgaatgcaaaggacgttacttttgtgggctttcccctaggagcgcgggggaaatggcaccaagataactttaaacttttgactgagcttggcctctccaaatcgaggcaagtgaaaatggcagagactttttccacagtagcgctcttttcatctgtggacattgtacatatgtttgccagtagggccagaaaatctatggttatgtgataataggctgccttctgcggggcttgccttctggccatgcccttcttctctcccttgcacctgtacctcttggtctttgaataaagcctgagtaggaaggaccggtaaaaaaaaaaaaaaaaaaaaaaaaaaaaaaacgttgactaaaaaaaaaaaaaaaaaaaaaaaaaaaaaaaaaaaaaaaaaaaaaaaaaaaaaaaaaaaaaaaaaaaaaa

SEQ ID NO: 10783 - DNA, 6530 bp, synthetic construct
  source 1..6530: mol_type = other DNA
gaaataagagagaaaagaagagtaagaagaaatataagagaattcgccaccatggcccctaagaaaaagcggaaggtgagcgccagccaggacagcagaagccgggacaacggccctgacggaatggagcctgagggagtgatcgaatccaactggaacgagatcgtggacagcttcgacgacatgaacctgagcgagagcctgctgagaggcatctacgcttacggcttcgagaagcctagcgccatccagcaaagagcaatcctgccatgcatcaagggctacgacgtcatcgcccaggcccagagcggcaccggcaaaaccgccaccttcgccatctctatcctgcagcagatcgagctggatctgaaagccacacaagcgttggtgctggcccccacaagagagctggcccagcagatccagaaggtggtgatggctctgggcgactacatgggcgcctcttgtcatgcctgcatcggcggcaccaatgtgcgggctgaagtgcagaagctccagatggaagctccccacatcattgtgggaacaccaggcagggtgttcgatatgctgaatcgccggtacctgtctcctaagtatatcaagatgttcgtgctggacgaggccgacgaaatgctgtctagaggtttcaaggaccagatctacgacatttttcagaaactgaacagcaacacccaggttgtgctgctgtcagccaccatgcctagcgatgtgctcgaggtgaccaagaagttcatgcgggaccctatcagaatcctggtgaagaaagaggagctgactctggagggcatcagacagttctacatcaacgtggaaagagaggaatggaagctggacaccctgtgcgacctgtatgagacactgaccatcacccaggccgtgatctttatcaataccagaagaaaggtcgactggctgacagagaagatgcacgcccgggacttcaccgtgtccgccatgcacggcgatatggaccaaaaggaacgggatgtgattatgagagagttccggtccggcagcagccgggtgctgatcacaacagatctgctggctagaggaatcgatgtgcagcaggtgagcctggtcatcaactacgatctgcctaccaacagagaaaattacatccacagaatcggcagaggcggaagattcggcagaaagggcgtggccataaacatggtgacagaggaagataagcggacccttagagacatcgaaaccttttacaacaccagcatcgaggaaatgcccctgaacgtggccgacctgatctccggctccgagactcctggaacaagcgagagcgctacacctgagggcagcaatatcagcggctctagctgcggcagccccaacagcgccgacaccagcagcgacttcaaggacctgtggaccaagctgaaggaatgccacgaccgggaagtgcagggactccaggtgaaggtcaccaaactcaagcaagaaagaatcctggacgcccagagactggaagaattcttcaccaagaaccagcagctgagagagcagcagaaagtgctgcacgagacaatcaaggttctggaagatagactgcgggccggcctgtgcgacagatgcgccgtgaccgaggaacacatgcgcaaaaagcagcaggagttcgagaacattagacagcaaaatctgaaattgatcacagagctgatgaacgagagaaacacactgcaggaggagaacaagaagctgagcgagcagctgcaacagaagatcgagaatgatcagcaacaccaggccgctgagctggaatgtgaagaggacgtgatccccgacagcccaatcacagctttcagcttttctggcgtgaacagactgaggcggaaggaaaacccccacgtgcggtacatcgagcagacccataccaagctggaacacagcgtgtgtgccaacgagatgagaaaggtgtccaagtcctccacccatccccagcacaaccctaacgaaaatgagatcctggtggctgatacctacgaccagtctcagagccctatggccaaggcccacggcaccagctcttatacccctgataagagctccttcaacctggccaccgtggtggccgagacactgggcctgggcgtgcaggaggaaagcgagacacagggcccaatgagccctctgggagatgagctgtaccactgcctggaaggcaaccacaagaaacagccttttgagtccggctccgagactcctggaacaagcgagagcgctacacctgagggcagccctaagagaaaggtgtccagcgccgagggcgctgccaaggaagagcctaaacggagaagcgccagactgagcgccaagccccccgccaaggtggaagccaagcctaagaaggccgccgctaaggacaagagcagcgataagaaagtccagaccaagggcaagcggggcgccaaaggcaaacaggccgaggtggccaaccaggagacaaaggaagatctgcctgctgagaacggcgaaaccaagaccgaggaatctccagcttctgacgaggccggagagaaggaggccaaaagcgacagcggctctgagacacctggaacaagcgagagcgccaccccggaatcctatgaacaacttgcaccacaaccgtgtgtgggagaaactttacattctagcctcccacgagacagtgaactgtttgtgcctgaagaggggagcagcgagaaggagagcgaggacgcgccaaaaacatctcctccgacgcctgggaaacatggtttggaacagactggggaggaaaaagtgatggtgactgttcctgacaaaaatccaccttgtccttgctgtggtacccgggtaaactctgtgttgaatctgattgaacatctgaaagtgtcacacgggaaaaggggggtttgttttcggtgtgcaaaatgtggaaaggaaaatagtaactatcacagtgttgtttgtcattttaagaaatgcaggggtccagagacggagaaagccccagctggggagtggatttgtgaggtatgcaacagagattttacaaccaaaattggcctgggacaacacaagagattggcacacccagcagtgagaaatcaggaaaggatcgttgcttcccaaccgaaagaaacatcaaatagaggtgctcacaaaaggtgctggacaaaggaggaggaagaattactaataagactggaggctcagttcgagggaaacaaaaatattaataagcttattgcagaacacataaccaccaaaacagctaagcagatcagtgacaaaaggcgattgctgtccagaaagccagcagaggagccacgtgaggagcctggaacgtgtcatcacaccaggagagcagctgcgagcctgagaacggagcctgagatgagtcatcacgcccaggcagaggacagagataatggacctgggagacgccctctgccaggcagggcagctgccggagggagaacaatggacgagataagacgccaccctgataagggcaacggacagcagagacccaccaagcaaaaatcagaagaacagctgcaggcttactataaaaagacactagaggaacgactttcagctggggcacttaacaccttcccccgagcattcaagcaggtaatggaaggccgggatataaagctagtaatcaatcagacagcgcaggactgcttcggatgcctggaatccataagccaaataagaacggcaacccgagataaaaaggacacggtgacccgggagaaacacccaaagaaaccttttcagaagtggatgaagaagagagcaatcaaaaaaggtaattatcttcggttccagcgtttattttatcttgatagagggaaactggctaaaatcattttagatgatattgaatgcttgtcttgtgacataccactcagtgaaatttattcggtttttaaaacaagatgggaaacaactggtagctttaaaagccttggggactttaaaacttacgggaaggctgacaacactgccttcagagaattaattacggctaaagaaattgagaaaaatgtgcaggaaatgagcaaaggctcggctcccggtccagacgggattactcttggggacgtcgtaaagatggatcccgagttttcccggaccatggagattttcaatttatggttaacaactggtaaaatcccggacatggtgagggggtgcagaaccgttttgattccaaaatcatcaaagccggatcgtttgaaagacattaataactggagacctatcacgatcggttccatcttgctgagactgttctccaggattgtaacagctaggctgagcaaagcgtgccccctgaacccaaggcaaagaggctttatcagagcggcgggatgctctgaaaacttaaaactcctgcaaactataatttggtcggccaaaagagaacacagaccactgggtgttgtattcgtggacatcgccaaggcttttgacaccgtaagccaccagcacatcattcatgctttgcagcaaagagaggtggatccccacatcgtcggtctggtgagcaatatgtacgagaacatcagtacgtatatcaccacaaagaggaacacacacacagacaaaatccagatccgggttggagtaaagcagggtgacccgatgtcgccccttttatttaacctggcaatggaccctctattatgcaagctggaagagagtggcaaaggataccaccgaggacagagcagcatcacagcgatggcatttgcagacgatctggttttgctgagcgactcctgggaaaatatgaatacaaatattagcatactggagaccttctgcaatctgaccggactcaaaacacaggggcaaaagtgccacggcttttacatcaagccgacaaaggactcttacaccatcaatgactgcgctgcctggactatcaacggcacacccctgaacatgatcgaccccggcgaatctgagaaatacctcggcctgcagtttgacccgtggattggaatagcaaggtccggtctctccacaaaactagatttttggcttcagcggatcgatcaagcaccacttaaacctctgcagaaaactgatattctcaaaacatacaccatccctcggctgatctacatagctgaccactcagaagtgaaaagcgcactactcgaaacccttgaccagaagatccggacagcggtcaaggaatggcttcacctacctccgtgcacctgcgatgccatcctgtactcgagcacgagagacggcggtttgggcatcaccaaattggcaggactgatccccagcgtgcaggcccgtagactgcatcggatcgcacagtcatctgacgatacgatgaaatgcttcatggaaaaagagaaaatggaacagctgcataagaaattgtggattcaagctggaggggacagagagaacataccctcgatttgggaagcaccaccgtcgagtgaaccaccaaacaacgtgagcacaaattcggaatgggaagcaccgacccagaaagataaatttccaaagccttgcaattggaggaaaaacgaattcaaaaaatggaccaaattggcatcccaaggccgcggaattgtaaattttgaaagagacaaaattagtaaccattggatccaatactacagacgcatacctcacaggaaactcctcactgcactacaactcagggccaacgtttaccccacgagagaatttctagccaggggtagacaagaccaatacatcaaggcgtgtaggcactgcgatgcggacaacgaatcctgcgcccacatcatcggcaactgcccagtgacacaggacgcccgaatcaagaggcacaattacatctgcgaactgcttctcgaggaggcgaagaagaaggactgggtagtgttcaaggaaccgcacataagggattccaacaaggaactgtacaaacctgacctgatatttgtgaaggatgggcgtgcacttgtcgtggatgtgacagtacggtatgaagcagccaaatcatcgctggaggaagccgctgcagagaaagtgagaaagtacaaacacctggaaacggaagtaagacatctcacgaatgcaaaggacgttacttttgtgggctttcccctaggagcgcgggggaaatggcaccaagataactttaaacttttgactgagcttggcctctccaaatcgaggcaagtgaaaatggcagagactttttccacagtagcgctcttttcatctgtggacattgtacatatgtttgccagtagggccagaaaatctatggttatgtgataataggctgccttctgcggggcttgccttctggccatgcccttcttctctcccttgcacctgtacctcttggtctttgaataaagcctgagtaggaaggaccggtaaaaaaaaaaaaaaaaaaaaaaaaaaaaaaacgttgactaaaaaaaaaaaaaaaaaaaaaaaaaaaaaaaaaaaaaaaaaaaaaaaaaaaaaaaaaaaaaaaaaaaaaa

SEQ ID NO: 10784 - DNA, 5264 bp, synthetic construct
  source 1..5264: mol_type = other DNA
gaaataagagagaaaagaagagtaagaagaaatataagagaattcgccaccatggcccctaagaaaaagcggaaggtgaatatcagcggctctagctgcggcagccccaacagcgccgacaccagcagcgacttcaaggacctgtggaccaagctgaaggaatgccacgaccgggaagtgcagggactccaggtgaaggtcaccaaactcaagcaagaaagaatcctggacgcccagagactggaagaattcttcaccaagaaccagcagctgagagagcagcagaaagtgctgcacgagacaatcaaggttctggaagatagactgcgggccggcctgtgcgacagatgcgccgtgaccgaggaacacatgcgcaaaaagcagcaggagttcgagaacattagacagcaaaatctgaaattgatcacagagctgatgaacgagagaaacacactgcaggaggagaacaagaagctgagcgagcagctgcaacagaagatcgagaatgatcagcaacaccaggccgctgagctggaatgtgaagaggacgtgatccccgacagcccaatcacagctttcagcttttctggcgtgaacagactgaggcggaaggaaaacccccacgtgcggtacatcgagcagacccataccaagctggaacacagcgtgtgtgccaacgagatgagaaaggtgtccaagtcctccacccatccccagcacaaccctaacgaaaatgagatcctggtggctgatacctacgaccagtctcagagccctatggccaaggcccacggcaccagctcttatacccctgataagagctccttcaacctggccaccgtggtggccgagacactgggcctgggcgtgcaggaggaaagcgagacacagggcccaatgagccctctgggagatgagctgtaccactgcctggaaggcaaccacaagaaacagccttttgagtccggctccgagactcctggaacaagcgagagcgctacacctgagggcagccctaagagaaaggtgtccagcgccgagggcgctgccaaggaagagcctaaacggagaagcgccagactgagcgccaagccccccgccaaggtggaagccaagcctaagaaggccgccgctaaggacaagagcagcgataagaaagtccagaccaagggcaagcggggcgccaaaggcaaacaggccgaggtggccaaccaggagacaaaggaagatctgcctgctgagaacggcgaaaccaagaccgaggaatctccagcttctgacgaggccggagagaaggaggccaaaagcgacagcggctctgagacacctggaacaagcgagagcgccaccccggaatcctatgaacaacttgcaccacaaccgtgtgtgggagaaactttacattctagcctcccacgagacagtgaactgtttgtgcctgaagaggggagcagcgagaaggagagcgaggacgcgccaaaaacatctcctccgacgcctgggaaacatggtttggaacagactggggaggaaaaagtgatggtgactgttcctgacaaaaatccaccttgtccttgctgtggtacccgggtaaactctgtgttgaatctgattgaacatctgaaagtgtcacacgggaaaaggggggtttgttttcggtgtgcaaaatgtggaaaggaaaatagtaactatcacagtgttgtttgtcattttaagaaatgcaggggtccagagacggagaaagccccagctggggagtggatttgtgaggtatgcaacagagattttacaaccaaaattggcctgggacaacacaagagattggcacacccagcagtgagaaatcaggaaaggatcgttgcttcccaaccgaaagaaacatcaaatagaggtgctcacaaaaggtgctggacaaaggaggaggaagaattactaataagactggaggctcagttcgagggaaacaaaaatattaataagcttattgcagaacacataaccaccaaaacagctaagcagatcagtgacaaaaggcgattgctgtccagaaagccagcagaggagccacgtgaggagcctggaacgtgtcatcacaccaggagagcagctgcgagcctgagaacggagcctgagatgagtcatcacgcccaggcagaggacagagataatggacctgggagacgccctctgccaggcagggcagctgccggagggagaacaatggacgagataagacgccaccctgataagggcaacggacagcagagacccaccaagcaaaaatcagaagaacagctgcaggcttactataaaaagacactagaggaacgactttcagctggggcacttaacaccttcccccgagcattcaagcaggtaatggaaggccgggatataaagctagtaatcaatcagacagcgcaggactgcttcggatgcctggaatccataagccaaataagaacggcaacccgagataaaaaggacacggtgacccgggagaaacacccaaagaaaccttttcagaagtggatgaagaagagagcaatcaaaaaaggtaattatcttcggttccagcgtttatttcaccttgatagagggaaactggctaaaatcattttagatgatattgaatgcttgtcttgtgacataccactcagtgaaatttattcggtttttaaaacaagatgggaaacaactggtagctttaaaagccttggggactttaaaacttacgggaaggctgacaacactgccttcagagaattaattacggctaaagaaattgagaaaaatgtgcaggaaatgagcaaaggctcggctcccggtccagacgggattactcttggggacgtcgtaaagatggatcccgagttttcccggaccatggagattttcaatttatggttaacaactggtaaaatcccggacatggtgagggggtgcagaaccgttttgattccaaaatcatcaaagccggatcgtttgaaagacattaataactggagacctatcacgatcggttccatcttgctgagactgttctccaggattgtaacagctaggctgagcaaagcgtgccccctgaacccaaggcaaagaggctttatcagagcggcgggatgctctgaaaacttaaaactcctgcaaactataatttggtcggccaaaagagaacacagaccactgggtgttgtattcgtggacatcgccaaggcttttgacaccgtaagccaccagcacatcattcatgctttgcagcaaagagaggtggatccccacatcgtcggtctggtgagcaatatgtacgagaacatcagtacgtatatcaccacaaagaggaacacacacacagacaaaatccagatccgggttggagtaaagcagggtgacccgatgtcgccccttttatttaacctggcaatggaccctctattatgcaagctggaagagagtggcaaaggataccaccgaggacagagcagcatcacagcgatggcatttgcagacgatctggttttgctgagcgactcctgggaaaatatgaatacaaatattagcatactggagaccttctgcaatctgaccggactcaaaacacaggggcaaaagtgccacggcttttacatcaagccgacaaaggactcttacaccatcaatgactgcgctgcctggactatcaacggcacacccctgaacatgatcgaccccggcgaatctgagaaatacctcggcctgcagtttgacccgtggattggaatagcaaggtccggtctctccacaaaactagatttttggcttcagcggatcgatcaagcaccacttaaacctctgcagaaaactgatattctcaaaacatacaccatccctcggctgatctacatagctgaccactcagaagtgaaaagcgcactactcgaaacccttgaccagaagatccggacagcggtcaaggaatggcttcacctacctccgtgcacctgcgatgccatcctgtactcgagcacgagagacggcggtttgggcatcaccaaattggcaggactgatccccagcgtgcaggcccgtagactgcatcggatcgcacagtcatctgacgatacgatgaaatgcttcatggaaaaagagaaaatggaacagctgcataagaaattgtggattcaagctggaggggacagagagaacataccctcgatttgggaagcaccaccgtcgagtgaaccaccaaacaacgtgagcacaaattcggaatgggaagcaccgacccagaaagataaatttccaaagccttgcaattggaggaaaaacgaattcaaaaaatggaccaaattggcatcccaaggccgcggaattgtaaattttgaaagagacaaaattagtaaccattggatccaatactacagacgcatacctcacaggaaactcctcactgcactacaactcagggccaacgtttaccccacgagagaatttctagccaggggtagacaagaccaatacatcaaggcgtgtaggcactgcgatgcggacaacgaatcctgcgcccacatcatcggcaactgcccagtgacacaggacgcccgaatcaagaggcacaattacatctgcgaactgcttctcgaggaggcgaagaagaaggactgggtagtgttcaaggaaccgcacataagggattccaacaaggaactgtacaaacctgacctgatatttgtgaaggatgggcgtgcacttgtcgtggatgtgacagtacggtatgaagcagccaaatcatcgctggaggaagccgctgcagagaaagtgagaaagtacaaacacctggaaacggaagtaagacatctcacgaatgcaaaggacgttacttttgtgggctttcccctaggagcgcgggggaaatggcaccaagataactttaaacttttgactgagcttggcctctccaaatcgaggcaagtgaaaatggcagagactttttccacagtagcgctcttttcatctgtggacattgtacatatgtttgccagtagggccagaaaatctatggttatgtgataataggctgccttctgcggggcttgccttctggccatgcccttcttctctcccttgcacctgtacctcttggtctttgaataaagcctgagtaggaaggaccggtaaaaaaaaaaaaaaaaaaaaaaaaaaaaaaacgttgactaaaaaaaaaaaaaaaaaaaaaaaaaaaaaaaaaaaaaaaaaaaaaaaaaaaaaaaaaaaaaaaaaaaaaa

SEQ ID NO: 10785-10789 - skipped (5 entries)

SEQ ID NO: 10790 - DNA, 5389 bp, synthetic construct
  source 1..5389: mol_type = other DNA
ggtctagttacaactgggcatcgctgcagagatcgcacctcctcgtggtcccgctggtagcccttcgaagggtgactaagtcgatctctgccccaggtacggagccgttgggactcaccagtccaacgtaactcctgcctaaattcggtgaaacaaattcctcggtaaaaagccccatggcccctaagaaaaagcggaaggtgaatatcagcggctctagctgcggcagccccaacagcgccgacaccagcagcgacttcaaggacctgtggaccaagctgaaggaatgccacgaccgggaagtgcagggactccaggtgaaggtcaccaaactcaagcaagaaagaatcctggacgcccagagactggaagaattcttcaccaagaaccagcagctgagagagcagcagaaagtgctgcacgagacaatcaaggttctggaagatagactgcgggccggcctgtgcgacagatgcgccgtgaccgaggaacacatgcgcaaaaagcagcaggagttcgagaacattagacagcaaaatctgaaattgatcacagagctgatgaacgagagaaacacactgcaggaggagaacaagaagctgagcgagcagctgcaacagaagatcgagaatgatcagcaacaccaggccgctgagctggaatgtgaagaggacgtgatccccgacagcccaatcacagctttcagcttttctggcgtgaacagactgaggcggaaggaaaacccccacgtgcggtacatcgagcagacccataccaagctggaacacagcgtgtgtgccaacgagatgagaaaggtgtccaagtcctccacccatccccagcacaaccctaacgaaaatgagatcctggtggctgatacctacgaccagtctcagagccctatggccaaggcccacggcaccagctcttatacccctgataagagctccttcaacctggccaccgtggtggccgagacactgggcctgggcgtgcaggaggaaagcgagacacagggcccaatgagccctctgggagatgagctgtaccactgcctggaaggcaaccacaagaaacagccttttgagtccggctccgagactcctggaacaagcgagagcgctacacctgagggcagccctaagagaaaggtgtccagcgccgagggcgctgccaaggaagagcctaaacggagaagcgccagactgagcgccaagccccccgccaaggtggaagccaagcctaagaaggccgccgctaaggacaagagcagcgataagaaagtccagaccaagggcaagcggggcgccaaaggcaaacaggccgaggtggccaaccaggagacaaaggaagatctgcctgctgagaacggcgaaaccaagaccgaggaatctccagcttctgacgaggccggagagaaggaggccaaaagcgacagcggctctgagacacctggaacaagcgagagcgccaccccggaatcctacgaacagctggctccccagccctgtgtaggcgagacattacacagcagcctgcccagagacagcgagctgttcgttccggaagagggctctagcgagaaggagagcgaggacgctcctaagaccagccctcctacccctggcaaacacggcctggagcaaacaggcgaggagaaggtcatggtgaccgtgcccgacaagaaccctccctgtccttgctgtggcacaagagtcaacagcgtgctgaacctcatcgagcacctgaaggtgtcccacggcaagagaggcgtgtgcttcagatgcgccaagtgcggcaaggagaacagcaactaccacagcgtcgtgtgccacttcaagaagtgcagaggccctgagaccgagaaggctcccgctggcgaatggatttgcgaggtgtgcaacagagacttcaccaccaagatcggcctgggccagcacaagcggttagctcaccctgctgtgagaaaccaggagagaatcgtggccagccagcccaaggagacaagcaacaggggcgctcacaagagatgctggaccaaggaggaagaggagctgctcatcagactggaggctcagttcgagggcaacaagaacatcaataagcttatcgccgagcacatcaccacaaagaccgccaagcagatcagcgacaagaggagactgctgtccagaaagcccgccgaggagcctagaatggaacctggtacatgtcaccacaccagaagagccgccgctagcctgagaaccgagcccgaaatgtctcaccacgctcaggccgaggacagagacaacggccctggcaggagacctcttcccggcagagctgctgctggaggcagaaccatggacgagatcaggagacaccccgataagggcaacggccagcagagacccacaaagcagaagtccgaggaacagctccaggcctactacaagaaaaccctggaggagagactgtccgcgggagctctgaacaccttccctagagccttcaaacaagtcatggagggcagagacatcaagctggtgatcaaccagaccgcccaggactgcttcggctgccttgagtctatcagccagatcaggaccgccacacgggataagaaggacaccgtcaccagagagaagcaccccaagaagcccttccagaaatggatgaagaagagggccatcaagaagggcaattacctgagattccagaggctgttctacctggacagaggcaagctggccaagatcatcctggacgacatcgagtgcctgagctgcgacatccctctgagcgagatctacagcgtgttcaagaccagatgggagaccaccggcagcttcaagtctctgggcgacttcaagacatacggcaaggccgacaacaccgccttcagagagctcatcaccgctaaggagatcgagaagaacgtgcaggagatgagcaagggcagcgctcctggccccgatggaattacactgggcgatgtggtgaagatggaccccgagttcagcagaacaatggagatcttcaacctgtggctcaccacaggcaagatccccgacatggtgagaggctgcagaaccgtgcttatccccaagagcagcaagcccgacagactgaaggatatcaacaactggagacccatcaccatcggcagcatcctgctgcggctgttcagccggattgtgaccgctagactgagcaaagcctgtcccctgaaccccagacagagaggcttcatcagagccgctggctgcagcgagaacctgaagctgctccagacaatcatctggagcgccaagagagagcacagacccctgggcgttgttttcgtggacatcgccaaggccttcgacaccgtgtcccatcagcacattatccacgccctgcagcagagggaggtcgaccctcatattgtgggcctggtgtccaacatgtacgagaacatctccacctatattacgaccaagagaaacacccacacagacaagatccagatccgggtcggcgtcaagcagggcgatcctatgtctcctctgctgttcaacctcgccatggaccctctgctctgcaagctcgaggagtctggaaagggctaccatagaggccaatcatcgatcaccgccatggccttcgccgacgacctggtgcttttaagcgacagctgggagaacatgaacaccaacatctctatcctggagacattctgcaaccttaccggcctgaaaacccagggccagaagtgtcatggcttctacatcaaacccaccaagaagagctacaccatcaacgactgcgccgcctggacaatcaacggcacccctctcaacatgatcgaccccggcgagtctgagaagtacctgggcctgcagttcgatccctggatcggcatcgctagaagcggcttgagcaccaagctggacttttggctccaacgcatagaccaggcccccctgaagcctcttcagaaaaccgacattttgaaaacttatacgatccccagactcatctacatcgccgaccactccgaggtcaagagcgctctgctggaaaccctggaccagaaaatcagaaccgccgtcaaggaatggctgcacctgcccccttgcacatgcgacgctatcctgtacagcagcaccagggacggcggcttaggaatcaccaagttagccggcctcatccccagcgtgcaggctaggagactccacagaatcgcccagagcagcgacgacaccatgaagtgcttcatggagaaggaaaagatggagcagctgcacaagaagctgtggatccaagcgggcggagatcgtgagaacattcccagcatctgggaggcccctcccagctcagaacctcccaataacgtgtccaccaattctgaatgggaggctcccacccagaaggataagtttcccaagccctgcaactggcggaagaacgagttcaaaaaatggacaaagctggctagccagggcaggggcatcgtgaacttcgaaagggacaagattagcaaccactggatccagtactacagaagaatcccccacagaaagctcctcaccgccctccagttacgtgcaaacgtgtacccaaccagagaattcctggccagaggcagacaggaccagtacatcaaggcctgccggcactgcgatgccgataacgagagctgtgctcacatcatcggcaactgccccgtcacccaggacgccagaatcaagagacacaactacatctgcgagttacttctggaggaagccaagaagaaggattgggttgtgttcaaggagccccacatcagagactccaacaaggagctgtacaagccagacctcatcttcgtgaaggacggcagagccctggtggtggacgtcaccgtcagatacgaggctgctaagtccagccttgaggaggctgccgccgagaaagtgcggaagtacaagcacctggaaacagaggtcagacacctcaccaacgccaaggacgttaccttcgtgggcttccccctaggtgctagaggcaaatggcaccaggacaacttcaagctgcttaccgagctgggcctctccaagagccgacaggttaagatggccgagaccttcagcaccgtcgccctgttctcttctgtggacattgtgcacatgttcgcctccagagccagaaagagcatggtgatgtgataataggctgccttctgcggggcttgccttctggccatgcccttcttctctcccttgcacctgtacctcttggtctttgaataaagcctgagtaggaaggaccggtaaaaaaaaaaaaaaaaaaaaaaaaaaaaaaacgttgactaaaaaaaaaaaaaaaaaaaaaaaaaaaaaaaaaaaaaaaaaaaaaaaaaaaaaaaaaaaaaaaaaaaaaa

SEQ ID NO: 10791 - DNA, 4603 bp, synthetic construct
  source 1..4603: mol_type = other DNA
ggtctagttacaactgggcatcgctgcagagatcgcacctcctcgtggtcccgctggtagcccttcgaagggtgactaagtcgatctctgccccaggtacggagccgttgggactcaccagtccaacgtaactcctgcctaaattcggtgaaacaaattcctcggtaaaaagccccatggcttcttgcccgaaacctggccccccggtttcagcaggggcaatgagtttggaaagtggactgaccacccactccgttctcgccatcgaacgtggtcccaattcgttggcaaattccggatcagactttgggggggggggtctggggctaccgttacgcctattgagggtatcggtcggcactcagacctcccgctccgactgggtagacctggtgtcctggagccacccaggacccacgtctaagtcccagcaggttgacctggtgtctttatttcctaaacaccgggttgacctgttatccaaaaacgaccaggtagacctggtggctcaatttttaccatctaaatttccccccaatttggcagaaaatgatttggctttgctggtgaacttagagttctacagatcggatttgcatgtgtatgagtgtgttcattttgctgcacattgggagggattaagtggtttgcctgaggtgtatgaacaacttgcaccacaaccgtgtgtgggagaaactttacattctagcctcccacgagacagtgaactgtttgtgcctgaagaggggagcagcgagaaggagagcgaggacgcgccaaaaacatctcctccgacgcctgggaaacatggtttggaacagactggggaggaaaaagtgatggtgactgttcctgacaaaaatccaccttgtccttgctgtggtacccgggtaaactctgtgttgaatctgattgaacatctgaaagtgtcacacgggaaaaggggggtttgttttcggtgtgcaaaatgtggaaaggaaaatagtaactatcacagtgttgtttgtcattttccaaaatgcaggggtccagagacggagaaagccccagctggggagtggatttgtgaggtatgcaacagagattttacaaccaaaattggcctgggacaacacaagagattggcacacccagcagtgagaaatcaggaaaggatcgttgcttcccaaccgaaagaaacatcaaatagaggtgctcacaaaaggtgctggacaaaggaggaggaagaattactaataagactggaggctcagttcgagggaaacaaaaatattaataagcttattgcagaacacataaccaccaaaacagctaagcagatcagtgacaaaaggcgattgctgtccagaaagccagcagaggagccacgtgaggagcctggaacgtgtcatcacaccaggagagcagctgcgagcctgagaacggagcctgagatgagtcatcacgcccaggcagaggacagagataatggacctgggagacgccctctgccaggcagggcagctgccggagggagaacaatggacgagataagacgccaccctgataagggcaacggacagcagagacccaccaagcaaaaatcagaagaacagctgcaggcttactataaaaagacactagaggaacgactttcagctggggcacttaacaccttcccccgagcattcaagcaggtaatggaaggccgggatataaagctagtaatcaatcagacagcgcaggactgcttcggatgcctggaatccataagccaaataagaacggcaacccgagataaaaaggacacggtgacccgggagaaacacccaaagaaaccttttcagaagtggatgaaggacagagcaatcaaaaaaggtaattatcttcggttccagcgtttattttatcttgatagagggaaactggctaaaatcattttagatgatattgaatgcttgtcttgtgacataccactcagtgaaatttattcggtttttaaaacaagatgggaaacaactggtagctttaaaagccttggggactttaaaacttacgggaaggctgacaacactgccttcagagaattaattacggctaaagaaattgagaaaaatgtgcaggaaatgagcaaaggctcggctcccggtccagacgggattactcttggggacgtcgtaaagatggatcccgagttttcccggaccatggagattttcaatttatggttaacaactggtaaaatcccggacatggtgagggggtgcagaaccgttttgattccaaaatcatcaaagccggatcgtttgaaagacattaataactggagacctatcacgatcggttccatcttgctgagactgttctccaggattgtaacagctaggctgagcaaagcgtgccccctgaacccaaggcaaagaggctttatcagagcggcgggatgctctgaaaacttaaaactcctgcaaactataatttggtcggccaaaagagaacacagaccactgggtgttgtattcgtggacatcgccaaggcttttgacaccgtaagccaccagcacatcattcatgctttgcagcaaagagaggtggatccccacatcgtcggtctggtgagcaatatgtacgagaacatcagtacgtatatcaccacaaagaggaacacacacacagacaaaatccagatccgggttggagtaaagcagggtgacccgatgtcgccccttttatttaacctggcaatggaccctctattatgcaagctggaagagagtggcaaaggataccaccgaggacagagcagcatcacagcgatggcatttgcagacgatctggttttgctgagcgactcctgggaaaatatgaatacaaatattagcatactggagaccttctgcaatctgaccggactcaaaacacaggggcaaaagtgccacggcttttacatcaagccgacaaaggactcttacaccatcaatgactgcgctgcctggactatcaacggcacacccctgaacatgatcgaccccggcgaatctgagaaatacctcggcctgcagtttgacccgtggattggaatagcaaggtccggtctctccacaaaactagatttttggcttcagcggatcgatcaagcaccacttaaacctctgcagaaaactgatattctcaaaacatacaccatccctcggctgatctacatagctgaccactcagaagtgaaaactgcactactcgaaacccttgaccagaagatccggacagcggtcaaggaatggcttcacctacctccgtgcacctgcgatgccatcctgtactcgagcacgagagacggcggtttgggcatcaccaaattggcaggactgatccccagcgtgcaggcccgtagactgcatcggatcgcacagtcatctgacgatacgatgaaatgcttcatggaaaaagagaaaatggaacagctgcataagaaattgtggattcaagctggaggggacagagagaacataccctcgatttgggaagcaccaccgtcgagtgaaccaccaaacaacgtgagcacaaattcggaatgggaagcaccgacccagaaagataaatttccaaagccttgcaattggaggaaaaacgaattcaaaaaatggaccaaattggcatcccaaggccgcggaattgtaaattttgaaagagacaaaattagtaaccattggatccaatactacagacgcatacctcacaggaaactcctcactgcactacaactcagggccaacgtttaccccacgagagaatttctagccaggggtagacaagaccaatacatcaaggcgtgtaggcactgcgatgcggacattgaatcctgcgcccacatcatcggcaactgcccagtgacacaggacgcccgaatcaagagggccaattacatctgcgaactgcttctcgaggaggcgaagaagaaggactgggtagtgttcaaggaaccgcacataagggattccaacaaggaactgtacaaacctgacctgatatttgtgaaggatgcccgtgcacttgtcgtggatgtgacagtacggtatgaagcagccaaatcatcgctggaggaagccgctgcagagaaagtgagaaaggccaaacacctggaaacggaagtaagacatctcacgaatgcaaaggacgttacttttgtgggctttcccctaggagcggccgggaaatggcaccaagataactttaaacttttgactgagcttggcctctccaaatcgaggcaagtgaaaatggcagagactttttccacagtagcgctcttttcatctgtggacattgtacatatgtttgccagtagggccagaaaatctatggttatgtaaaccggtagacatgataagatacattgatgagtttggacaaaccacaactagaatgcagtgaaaaaaatgctttatttgtgaaatttgtgatgctattgctttatttgtaaccattataagctgcaataaacaagttaacaacaacaaaaaaaaaaaaaaaaaaaaaaaaaaaaaaacgttgactaaaaaaaaaaaaaaaaaaaaaaaaaaaaaaaaaaaaaaaaaaaaaaaaaaaaaaaaaaaaaaaaaaaaaa

SEQ ID NO: 10792 - DNA, 5264 bp, synthetic construct
  source 1..5264: mol_type = other DNA
gaaataagagagaaaagaagagtaagaagaaatataagagaattcgccaccatggcccctaagaaaaagcggaaggtgaatatcagcggctctagctgcggcagccccaacagcgccgacaccagcagcgacttcaaggacctgtggaccaagctgaaggaatgccacgaccgggaagtgcagggactccaggtgaaggtcaccaaactcaagcaagaaagaatcctggacgcccagagactggaagaattcttcaccaagaaccagcagctgagagagcagcagaaagtgctgcacgagacaatcaaggttctggaagatagactgcgggccggcctgtgcgacagatgcgccgtgaccgaggaacacatgcgcaaaaagcagcaggagttcgagaacattagacagcaaaatctgaaattgatcacagagctgatgaacgagagaaacacactgcaggaggagaacaagaagctgagcgagcagctgcaacagaagatcgagaatgatcagcaacaccaggccgctgagctggaatgtgaagaggacgtgatccccgacagcccaatcacagctttcagcttttctggcgtgaacagactgaggcggaaggaaaacccccacgtgcggtacatcgagcagacccataccaagctggaacacagcgtgtgtgccaacgagatgagaaaggtgtccaagtcctccacccatccccagcacaaccctaacgaaaatgagatcctggtggctgatacctacgaccagtctcagagccctatggccaaggcccacggcaccagctcttatacccctgataagagctccttcaacctggccaccgtggtggccgagacactgggcctgggcgtgcaggaggaaagcgagacacagggcccaatgagccctctgggagatgagctgtaccactgcctggaaggcaaccacaagaaacagccttttgagtccggctccgagactcctggaacaagcgagagcgctacacctgagggcagccctaagagaaaggtgtccagcgccgagggcgctgccaaggaagagcctaaacggagaagcgccagactgagcgccaagccccccgccaaggtggaagccaagcctaagaaggccgccgctaaggacaagagcagcgataagaaagtccagaccaagggcaagcggggcgccaaaggcaaacaggccgaggtggccaaccaggagacaaaggaagatctgcctgctgagaacggcgaaaccaagaccgaggaatctccagcttctgacgaggccggagagaaggaggccaaaagcgacagcggctctgagacacctggaacaagcgagagcgccaccccggaatcctatgaacaacttgcaccacaaccgtgtgtgggagaaactttacattctagcctcccacgagacagtgaactgtttgtgcctgaagaggggagcagcgagaaggagagcgaggacgcgccaaaaacatctcctccgacgcctgggaaacatggtttggaacagactggggaggaaaaagtgatggtgactgttcctgacaaaaatccaccttgtccttgctgtggtacccgggtaaactctgtgttgaatctgattgaacatctgaaagtgtcacacgggaaaaggggggtttgttttcggtgtgcaaaatgtggaaaggaaaatagtaactatcacagtgttgtttgtcattttaagaaatgcaggggtccagagacggagaaagccccagctggggagtggatttgtgaggtatgcaacagagattttacaaccaaaattggcctgggacaacacaagagattggcacacccagcagtgagaaatcaggaaaggatcgttgcttcccaaccgaaagaaacatcaaatagaggtgctcacaaaaggtgctggacaaaggaggaggaagaattactaataagactggaggctcagttcgagggaaacaaaaatattaataagcttattgcagaacacataaccaccaaaacagctaagcagatcagtgacaaaaggcgattgctgtccagaaagccagcagaggagccacgtgaggagcctggaacgtgtcatcacaccaggagagcagctgcgagcctgagaacggagcctgagatgagtcatcacgcccaggcagaggacagagataatggacctgggagacgccctctgccaggcagggcagctgccggagggagaacaatggacgagataagacgccaccctgataagggcaacggacagcagagacccaccaagcaaaaatcagaagaacagctgcaggcttactataaaaagacactagaggaacgactttcagctggggcacttaacaccttcccccgagcattcaagcaggtaatggaaggccgggatataaagctagtaatcaatcagacagcgcaggactgcttcggatgcctggaatccataagccaaataagaacggcaacccgagataaaaaggacacggtgacccgggagaaacacccaaagaaaccttttcagaagtggatgaagaagagagcaatcaaaaaaggtaattatcttcggttccagcgtttattttatcttgatagagggaaactggctaaaatcattttagatgatattgaatgcttgtcttgtgacataccactcagtgaaatttattcggtttttaaaacaagatgggaaacaactggtagctttaaaagccttggggactttaaaacttacgggaaggctgacaacactgccttcagagaattaattacggctaaagaaattgagaaaaatgtgcaggaaatgagcaaaggctcggctcccggtccagacgggattactcttggggacgtcgtaaagatggatcccgagttttcccggaccatggagattttcaatttatggttaacaactggtaaaatcccggacatggtgagggggtgcagaaccgttttgattccaaaatcatcaaagccggatcgtttgaaagacattaataactggagacctatcacgatcggttccatcttgctgagactgttctccaggattgtaacagctaggctgagcaaagcgtgccccctgaacccaaggcaaagaggctttatcagagcggcgggatgctctgaaaacttaaaactcctgcaaactataatttggtcggccaaaagagaacacagaccactgggtgttgtattcgtggacatcgccaaggcttttgacaccgtaagccaccagcacatcattcatgctttgcagcaaagagaggtggatccccacatcgtcggtctggtgagcaatatgtacgagaacatcagtacgtatatcaccacaaagaggaacacacacacagacaaaatccagatccgggttggagtaaagcagggtgacccgatgtcgccccttttatttaacctggcaatggaccctctattatgcaagctggaagagagtggcaaaggataccacctgggacagagcagcatcacagcgatggcatttgcagacgatctggttttgctgagcgactcctgggaaaatatgaatacaaatattagcatactggagaccttctgcaatctgaccggactcaaaacacaggggcaaaagtgccacggcttttacatcaagccgacaaaggactcttacaccatcaatgactgcgctgcctggactatcaacggcacacccctgaacatgatcgaccccggcgaatctgagaaatacctcggcctgcagtttgacccgtggattggaatagcaaggtccggtctctccacaaaactagatttttggcttcagcggatcgatcaagcaccacttaaacctctgcagaaaactgatattctcaaaacatacaccatccctcggctgatctacatagctgaccactcagaagtgaaaagcgcactactcgaaacccttgaccagaagatccggacagcggtcaaggaatggcttcacctacctccgtgcacctgcgatgccatcctgtactcgagcacgagagacggcggtttgggcatcaccaaattggcaggactgatccccagcgtgcaggcccgtagactgcatcggatcgcacagtcatctgacgatacgatgaaatgcttcatggaaaaagagaaaatggaacagctgcataagaaattgtggattcaagctggaggggacagagagaacataccctcgatttgggaagcaccaccgtcgagtgaaccaccaaacaacgtgagcacaaattcggaatgggaagcaccgacccagaaagataaatttccaaagccttgcaattggaggaaaaacgaattcaaaaaatggaccaaattggcatcccaaggccgcggaattgtaaattttgaaagagacaaaattagtaaccattggatccaatactacagacgcatacctcacaggaaactcctcactgcactacaactcagggccaacgtttaccccacgagagaatttctagccaggggtagacaagaccaatacatcaaggcgtgtaggcactgcgatgcggacaacgaatcctgcgcccacatcatcggcaactgcccagtgacacaggacgcccgaatcaagaggcacaattacatctgcgaactgcttctcgaggaggcgaagaagaaggactgggtagtgttcaaggaaccgcacataagggattccaacaaggaactgtacaaacctgacctgatatttgtgaaggatgggcgtgcacttgtcgtggatgtgacagtacggtatgaagcagccaaatcatcgctggaggaagccgctgcagagaaagtgagaaagtacaaacacctggaaacggaagtaagacatctcacgaatgcaaaggacgttacttttgtgggctttcccctaggagcgcgggggaaatggcaccaagataactttaaacttttgactgagcttggcctctccaaatcgaggcaagtgaaaatggcagagactttttccacagtagcgctcttttcatctgtggacattgtacatatgtttgccagtagggccagaaaatctatggttatgtgataataggctgccttctgcggggcttgccttctggccatgcccttcttctctcccttgcacctgtacctcttggtctttgaataaagcctgagtaggaaggaccggtaaaaaaaaaaaaaaaaaaaaaaaaaaaaaaacgttgactaaaaaaaaaaaaaaaaaaaaaaaaaaaaaaaaaaaaaaaaaaaaaaaaaaaaaaaaaaaaaaaaaaaaaa

SEQ ID NO: 10793 - DNA, 5264 bp, synthetic construct
  source 1..5264: mol_type = other DNA
gaaataagagagaaaagaagagtaagaagaaatataagagaattcgccaccatggcccctaagaaaaagcggaaggtgaatatcagcggctctagctgcggcagccccaacagcgccgacaccagcagcgacttcaaggacctgtggaccaagctgaaggaatgccacgaccgggaagtgcagggactccaggtgaaggtcaccaaactcaagcaagaaagaatcctggacgcccagagactggaagaattcttcaccaagaaccagcagctgagagagcagcagaaagtgctgcacgagacaatcaaggttctggaagatagactgcgggccggcctgtgcgacagatgcgccgtgaccgaggaacacatgcgcaaaaagcagcaggagttcgagaacattagacagcaaaatctgaaattgatcacagagctgatgaacgagagaaacacactgcaggaggagaacaagaagctgagcgagcagctgcaacagaagatcgagaatgatcagcaacaccaggccgctgagctggaatgtgaagaggacgtgatccccgacagcccaatcacagctttcagcttttctggcgtgaacagactgaggcggaaggaaaacccccacgtgcggtacatcgagcagacccataccaagctggaacacagcgtgtgtgccaacgagatgagaaaggtgtccaagtcctccacccatccccagcacaaccctaacgaaaatgagatcctggtggctgatacctacgaccagtctcagagccctatggccaaggcccacggcaccagctcttatacccctgataagagctccttcaacctggccaccgtggtggccgagacactgggcctgggcgtgcaggaggaaagcgagacacagggcccaatgagccctctgggagatgagctgtaccactgcctggaaggcaaccacaagaaacagccttttgagtccggctccgagactcctggaacaagcgagagcgctacacctgagggcagccctaagagaaaggtgtccagcgccgagggcgctgccaaggaagagcctaaacggagaagcgccagactgagcgccaagccccccgccaaggtggaagccaagcctaagaaggccgccgctaaggacaagagcagcgataagaaagtccagaccaagggcaagcggggcgccaaaggcaaacaggccgaggtggccaaccaggagacaaaggaagatctgcctgctgagaacggcgaaaccaagaccgaggaatctccagcttctgacgaggccggagagaaggaggccaaaagcgacagcggctctgagacacctggaacaagcgagagcgccaccccggaatcctatgaacaacttgcaccacaaccgtgtgtgggagaaactttacattctagcctcccacgagacagtgaactgtttgtgcctgaagaggggagcagcgagaaggagagcgaggacgcgccaaaaacatctcctccgacgcctgggaaacatggtttggaacagactggggaggaaaaagtgatggtgactgttcctgacaaaaatccaccttgtccttgctgtggtacccgggtaaactctgtgttgaatctgattgaacatctgaaagtgtcacacgggaaaaggggggtttgttttcggtgtgcaaaatgtggaaaggaaaatagtaactatcacagtgttgtttgtcattttaagaaatgcaggggtccagagacggagaaagccccagctggggagtggatttgtgaggtatgcaacagagattttacaaccaaaattggcctgggacaacacaagagattggcacacccagcagtgagaaatcaggaaaggatcgttgcttcccaaccgaaagaaacatcaaatagaggtgctcacaaaaggtgctggacaaaggaggaggaagaattactaataagactggaggctcagttcgagggaaacaaaaatattaataagcttattgcagaacacataaccaccaaaacagctaagcagatcagtgacaaaaggcgattgctgtccagaaagccagcagaggagccacgtgaggagcctggaacgtgtcatcacaccaggagagcagctgcgagcctgagaacggagcctgagatgagtcatcacgcccaggcagaggacagagataatggacctgggagacgccctctgccaggcagggcagctgccggagggagaacaatggacgagataagacgccaccctgataagggcaacggacagcagagacccaccaagcaaaaatcagaagaacagctgcaggcttactataaaaagacactagaggaacgactttcagctggggcacttaacaccttcccccgagcattcaagcaggtaatggaaggccgggatataaagctagtaatcaatcagacagcgcaggactgcttcggatgcctggaatccataagccaaataagaacggcaacccgagataaaaaggacacggtgacccgggagaaacacccaaagaaaccttttcagaagtggatgaagaagagagcaatcaaaaaaggtaattatcttcggttccagcgtttattttatcttgatagagggaaactggctaaaatcattttagatgatattgaatgcttgtcttgtgacataccactcagtgaaatttattcggtttttaaaacaagatgggaaacaactggtagctttaaaagccttggggactttaaaacttacgggaaggctgacaacactgccttcagagaattaattacggctaaagaaattgagaaaaatgtgcaggaaatgagcaaaggctcggctcccggtccagacgggattactcttggggacgtcgtaaagatggatcccgagttttcccggaccatggagattttcaatttatggttaacaactggtaaaatcccggacatggtgagggggtgcagaaccgttttgattccaaaatcatcaaagccggatcgtttgaaagacattaataactggagacctatcacgatcggttccatcttgctgagactgttctccaggattgtaacagctaggctgagcaaagcgtgccccctgaacccaaggcaaagaggctttatcagagcggcgggatgctctgaaaacttaaaactcctgcaaactataatttggtcggccaaaagagaacacagaccactgggtgttgtattcgtggacatcgccaaggcttttgacaccgtaagccaccagcacatcattcatgctttgcagcaaagagaggtggatccccacatcgtcggtctggtgagcaatatgtacgagaacatcagtacgtatatcaccacaaagaggaacacacacacagacaaaatccagatccgggttggagtaaagcagggtgacccgatgtcgccccttttatttaacctggcaatggaccctctattatgcaagctggaagagagtggcaaaggataccaccgaggacagagcagcatcacagcgatggcatttgcagacgatctggttttgctgagcgactcctgggaaaatatgaatacaaatattagcatactggagaccttctgcaatctgaccggactcaaaacacaggggcaaaagtgccacggcttttacatcaagccgacaaaggactcttacaccatcaatgactgcgctgcctggactatcaacggcacacccctgaacatgatcgaccccggcgaatctgagaaatacctcggcctgcagtttgacccgtggattggaatagcaaggtccggtctctccacaaaactagatcagtggcttcagcggatcgatcaagcaccacttaaacctctgcagaaaactgatattctcaaaacatacaccatccctcggctgatctacatagctgaccactcagaagtgaaaagcgcactactcgaaacccttgaccagaagatccggacagcggtcaaggaatggcttcacctacctccgtgcacctgcgatgccatcctgtactcgagcacgagagacggcggtttgggcatcaccaaattggcaggactgatccccagcgtgcaggcccgtagactgcatcggatcgcacagtcatctgacgatacgatgaaatgcttcatggaaaaagagaaaatggaacagctgcataagaaattgtggattcaagctggaggggacagagagaacataccctcgatttgggaagcaccaccgtcgagtgaaccaccaaacaacgtgagcacaaattcggaatgggaagcaccgacccagaaagataaatttccaaagccttgcaattggaggaaaaacgaattcaaaaaatggaccaaattggcatcccaaggccgcggaattgtaaattttgaaagagacaaaattagtaaccattggatccaatactacagacgcatacctcacaggaaactcctcactgcactacaactcagggccaacgtttaccccacgagagaatttctagccaggggtagacaagaccaatacatcaaggcgtgtaggcactgcgatgcggacaacgaatcctgcgcccacatcatcggcaactgcccagtgacacaggacgcccgaatcaagaggcacaattacatctgcgaactgcttctcgaggaggcgaagaagaaggactgggtagtgttcaaggaaccgcacataagggattccaacaaggaactgtacaaacctgacctgatatttgtgaaggatgggcgtgcacttgtcgtggatgtgacagtacggtatgaagcagccaaatcatcgctggaggaagccgctgcagagaaagtgagaaagtacaaacacctggaaacggaagtaagacatctcacgaatgcaaaggacgttacttttgtgggctttcccctaggagcgcgggggaaatggcaccaagataactttaaacttttgactgagcttggcctctccaaatcgaggcaagtgaaaatggcagagactttttccacagtagcgctcttttcatctgtggacattgtacatatgtttgccagtagggccagaaaatctatggttatgtgataataggctgccttctgcggggcttgccttctggccatgcccttcttctctcccttgcacctgtacctcttggtctttgaataaagcctgagtaggaaggaccggtaaaaaaaaaaaaaaaaaaaaaaaaaaaaaaacgttgactaaaaaaaaaaaaaaaaaaaaaaaaaaaaaaaaaaaaaaaaaaaaaaaaaaaaaaaaaaaaaaaaaaaaaa

SEQ ID NO: 10794 - DNA, 5264 bp, synthetic construct
  source 1..5264: mol_type = other DNA
gaaataagagagaaaagaagagtaagaagaaatataagagaattcgccaccatggcccctaagaaaaagcggaaggtgaatatcagcggctctagctgcggcagccccaacagcgccgacaccagcagcgacttcaaggacctgtggaccaagctgaaggaatgccacgaccgggaagtgcagggactccaggtgaaggtcaccaaactcaagcaagaaagaatcctggacgcccagagactggaagaattcttcaccaagaaccagcagctgagagagcagcagaaagtgctgcacgagacaatcaaggttctggaagatagactgcgggccggcctgtgcgacagatgcgccgtgaccgaggaacacatgcgcaaaaagcagcaggagttcgagaacattagacagcaaaatctgaaattgatcacagagctgatgaacgagagaaacacactgcaggaggagaacaagaagctgagcgagcagctgcaacagaagatcgagaatgatcagcaacaccaggccgctgagctggaatgtgaagaggacgtgatccccgacagcccaatcacagctttcagcttttctggcgtgaacagactgaggcggaaggaaaacccccacgtgcggtacatcgagcagacccataccaagctggaacacagcgtgtgtgccaacgagatgagaaaggtgtccaagtcctccacccatccccagcacaaccctaacgaaaatgagatcctggtggctgatacctacgaccagtctcagagccctatggccaaggcccacggcaccagctcttatacccctgataagagctccttcaacctggccaccgtggtggccgagacactgggcctgggcgtgcaggaggaaagcgagacacagggcccaatgagccctctgggagatgagctgtaccactgcctggaaggcaaccacaagaaacagccttttgagtccggctccgagactcctggaacaagcgagagcgctacacctgagggcagccctaagagaaaggtgtccagcgccgagggcgctgccaaggaagagcctaaacggagaagcgccagactgagcgccaagccccccgccaaggtggaagccaagcctaagaaggccgccgctaaggacaagagcagcgataagaaagtccagaccaagggcaagcggggcgccaaaggcaaacaggccgaggtggccaaccaggagacaaaggaagatctgcctgctgagaacggcgaaaccaagaccgaggaatctccagcttctgacgaggccggagagaaggaggccaaaagcgacagcggctctgagacacctggaacaagcgagagcgccaccccggaatcctatgaacaacttgcaccacaaccgtgtgtgggagaaactttacattctagcctcccacgagacagtgaactgtttgtgcctgaagaggggagcagcgagaaggagagcgaggacgcgccaaaaacatctcctccgacgcctgggaaacatggtttggaacagactggggaggaaaaagtgatggtgactgttcctgacaaaaatccaccttgtccttgctgtggtacccgggtaaactctgtgttgaatctgattgaacatctgaaagtgtcacacgggaaaaggggggtttgttttcggtgtgcaaaatgtggaaaggaaaatagtaactatcacagtgttgtttgtcattttaagaaatgcaggggtccagagacggagaaagccccagctggggagtggatttgtgaggtatgcaacagagattttacaaccaaaattggcctgggacaacacaagagattggcacacccagcagtgagaaatcaggaaaggatcgttgcttcccaaccgaaagaaacatcaaatagaggtgctcacaaaaggtgctggacaaaggaggaggaagaattactaataagactggaggctcagttcgagggaaacaaaaatattaataagcttattgcagaacacataaccaccaaaacagctaagcagatcagtgacaaaaggcgattgctgtccagaaagccagcagaggagccacgtgaggagcctggaacgtgtcatcacaccaggagagcagctgcgagcctgagaacggagcctgagatgagtcatcacgcccaggcagaggacagagataatggacctgggagacgccctctgccaggcagggcagctgccggagggagaacaatggacgagataagacgccaccctgataagggcaacggacagcagagacccaccaagcaaaaatcagaagaacagctgcaggcttactataaaaagacactagaggaacgactttcagctggggcacttaacaccttcccccgagcattcaagcaggtaatggaaggccgggatataaagctagtaatcaatcagacagcgcaggactgcttcggatgcctggaatccataagccaaataagaacggcaacccgagataaaaaggacacggtgacccgggagaaacagccaaagaaaccttttcagaagtggatgaagaagagagcaatcaaaaaaggtaattatcttcggttccagcgtttattttatcttgatagagggaaactggctaaaatcattttagatgatattgaatgcttgtcttgtgacataccactcagtgaaatttattcggtttttaaaacaagatgggaaacaactggtagctttaaaagccttggggactttaaaacttacgggaaggctgacaacactgccttcagagaattaattacggctaaagaaattgagaaaaatgtgcaggaaatgagcaaaggctcggctcccggtccagacgggattactcttggggacgtcgtaaagatggatcccgagttttcccggaccatggagattttcaatttatggttaacaactggtaaaatcccggacatggtgagggggtgcagaaccgttttgattccaaaatcatcaaagccggatcgtttgaaagacattaataactggagacctatcacgatcggttccatcttgctgagactgttctccaggattgtaacagctaggctgagcaaagcgtgccccctgaacccaaggcaaagaggctttatcagagcggcgggatgctctgaaaacttaaaactcctgcaaactataatttggtcggccaaaagagaacacagaccactgggtgttgtattcgtggacatcgccaaggcttttgacaccgtaagccaccagcacatcattcatgctttgcagcaaagagaggtggatccccacatcgtcggtctggtgagcaatatgtacgagaacatcagtacgtatatcaccacaaagaggaacacacacacagacaaaatccagatccgggttggagtaaagcagggtgacccgatgtcgccccttttatttaacctggcaatggaccctctattatgcaagctggaagagagtggcaaaggataccaccgaggacagagcagcatcacagcgatggcatttgcagacgatctggttttgctgagcgactcctgggaaaatatgaatacaaatattagcatactggagaccttctgcaatctgaccggactcaaaacacaggggcaaaagtgccacggcttttacatcaagccgacaaagaagtcttacaccatcaatgactgcgctgcctggactatcaacggcacacccctgaacatgatcgaccccggcgaatctgagaaatacctcggcctgcagtttgacccgtggattggaatagcaaggtccggtctctccacaaaactagatttttggcttcagcggatcgatcaagcaccacttaaacctctgcagaaaactgatattctcaaaacatacaccatccctcggctgatctacatagctgaccactcagaagtgaaaagcgcactactcgaaacccttgaccagaagatccggacagcggtcaaggaatggcttcacctacctccgtgcacctgcgatgccatcctgtactcgagcacgagagacggcggtttgggcatcaccaaattggcaggactgatccccagcgtgcaggcccgtagactgcatcggatcgcacagtcatctgacgatacgatgaaatgcttcatggaaaaagagaaaatggaacagctgcataagaaattgtggattcaagctggaggggacagagagaacataccctcgatttgggaagcaccaccgtcgagtgaaccaccaaacaacgtgagcacaaattcggaatgggaagcaccgacccagaaagataaatttccaaagccttgcaattggaggaaaaacgaattcaaaaaatggaccaaattggcatcccaaggccgcggaattgtaaattttgaaagagacaaaattagtaaccattggatccaatactacagacgcatacctcacaggaaactcctcactgcactacaactcagggccaacgtttaccccacgagagaatttctagccaggggtagacaagaccaatacatcaaggcgtgtaggcactgcgatgcggacaacgaatcctgcgcccacatcatcggcaactgcccagtgacacaggacgcccgaatcaagaggcacaattacatctgcgaactgcttctcgaggaggcgaagaagaaggactgggtagtgttcaaggaaccgcacataagggattccaacaaggaactgtacaaacctgacctgatatttgtgaaggatgggcgtgcacttgtcgtggatgtgacagtacggtatgaagcagccaaatcatcgctggaggaagccgctgcagagaaagtgagaaagtacaaacacctggaaacggaagtaagacatctcacgaatgcaaaggacgttacttttgtgggctttcccctaggagcgcgggggaaatggcaccaagataactttaaacttttgactgagcttggcctctccaaatcgaggcaagtgaaaatggcagagactttttccacagtagcgctcttttcatctgtggacattgtacatatgtttgccagtagggccagaaaatctatggttatgtgataataggctgccttctgcggggcttgccttctggccatgcccttcttctctcccttgcacctgtacctcttggtctttgaataaagcctgagtaggaaggaccggtaaaaaaaaaaaaaaaaaaaaaaaaaaaaaaacgttgactaaaaaaaaaaaaaaaaaaaaaaaaaaaaaaaaaaaaaaaaaaaaaaaaaaaaaaaaaaaaaaaaaaaaaa

SEQ ID NO: 10795 - DNA, 5264 bp, synthetic construct
  source 1..5264: mol_type = other DNA
gaaataagagagaaaagaagagtaagaagaaatataagagaattcgccaccatggcccctaagaaaaagcggaaggtgaatatcagcggctctagctgcggcagccccaacagcgccgacaccagcagcgacttcaaggacctgtggaccaagctgaaggaatgccacgaccgggaagtgcagggactccaggtgaaggtcaccaaactcaagcaagaaagaatcctggacgcccagagactggaagaattcttcaccaagaaccagcagctgagagagcagcagaaagtgctgcacgagacaatcaaggttctggaagatagactgcgggccggcctgtgcgacagatgcgccgtgaccgaggaacacatgcgcaaaaagcagcaggagttcgagaacattagacagcaaaatctgaaattgatcacagagctgatgaacgagagaaacacactgcaggaggagaacaagaagctgagcgagcagctgcaacagaagatcgagaatgatcagcaacaccaggccgctgagctggaatgtgaagaggacgtgatccccgacagcccaatcacagctttcagcttttctggcgtgaacagactgaggcggaaggaaaacccccacgtgcggtacatcgagcagacccataccaagctggaacacagcgtgtgtgccaacgagatgagaaaggtgtccaagtcctccacccatccccagcacaaccctaacgaaaatgagatcctggtggctgatacctacgaccagtctcagagccctatggccaaggcccacggcaccagctcttatacccctgataagagctccttcaacctggccaccgtggtggccgagacactgggcctgggcgtgcaggaggaaagcgagacacagggcccaatgagccctctgggagatgagctgtaccactgcctggaaggcaaccacaagaaacagccttttgagtccggctccgagactcctggaacaagcgagagcgctacacctgagggcagccctaagagaaaggtgtccagcgccgagggcgctgccaaggaagagcctaaacggagaagcgccagactgagcgccaagccccccgccaaggtggaagccaagcctaagaaggccgccgctaaggacaagagcagcgataagaaagtccagaccaagggcaagcggggcgccaaaggcaaacaggccgaggtggccaaccaggagacaaaggaagatctgcctgctgagaacggcgaaaccaagaccgaggaatctccagcttctgacgaggccggagagaaggaggccaaaagcgacagcggctctgagacacctggaacaagcgagagcgccaccccggaatcctatgaacaacttgcaccacaaccgtgtgtgggagaaactttacattctagcctcccacgagacagtgaactgtttgtgcctgaagaggggagcagcgagaaggagagcgaggacgcgccaaaaacatctcctccgacgcctgggaaacatggtttggaacagactggggaggaaaaagtgatggtgactgttcctgacaaaaatccaccttgtccttgctgtggtacccgggtaaactctgtgttgaatctgattgaacatctgaaagtgtcacacgggaaaaggggggtttgttttcggtgtgcaaaatgtggaaaggaaaatagtaactatcacagtgttgtttgtcattttaagaaatgcaggggtccagagacggagaaagccccagctggggagtggatttgtgaggtatgcaacagagattttacaaccaaaattggcctgggacaacacaagagattggcacacccagcagtgagaaatcaggaaaggatcgttgcttcccaaccgaaagaaacatcaaatagaggtgctcacaaaaggtgctggacaaaggaggaggaagaattactaataagactggaggctcagttcgagggaaacaaaaatattaataagcttattgcagaacacataaccaccaaaacagctaagcagatcagtgacaaaaggcgattgctgtccagaaagccagcagaggagccacgtgaggagcctggaacgtgtcatcacaccaggagagcagctgcgagcctgagaacggagcctgagatgagtcatcacgcccaggcagaggacagagataatggacctgggagacgccctctgccaggcagggcagctgccggagggagaacaatggacgagataagacgccaccctgataagggcaacggacagcagagacccaccaagcaaaaatcagaagaacagctgcaggcttactataaaaagacactagaggaacgactttcagctggggcacttaacaccttcccccgagcattcaagcaggtaatggaaggccgggatataaagctagtaatcaatcagacagcgcaggactgcttcggatgcctggaatccataagccaaataagaacggcaacccgagataaaaaggacacggtgacccgggagaaacacccaaagaaaccttttcagaagtggatgaagaagagagcaatcaaaaaaggtaattatcttcggttccagcgtttattttatcttgatagagggaaactggctaaaatcattttagatgatattgaatgcttgtcttgtgacataccactcagtgaaatttattcggtttttaaaacaagatgggaaacaactggtagctttaaaagccttggggactttaaaacttacgggaaggctgacaacactgccttcagagaattaattacggctaaagaaattgagaaaaatgtgcaggaaatgagcaaaggctcggctcccggtccagacgggattactcttggggacgtcgtaaagatggatcccgagttttcccggaccatggagattttcaatttatggttaacaagcggtaaaatcccggacatggtgagggggtgcagaaccgttttgattccaaaatcatcaaagccggatcgtttgaaagacattaataactggagacctatcacgatcggttccatcttgctgagactgttctccaggattgtaacagctaggctgagcaaagcgtgccccctgaacccaaggcaaagaggctttatcagagcggcgggatgctctgaaaacttaaaactcctgcaaactataatttggtcggccaaaagagaacacagaccactgggtgttgtattcgtggacatcgccaaggcttttgacaccgtaagccaccagcacatcattcatgctttgcagcaaagagaggtggatccccacatcgtcggtctggtgagcaatatgtacgagaacatcagtacgtatatcaccacaaagaggaacacacacacagacaaaatccagatccgggttggagtaaagcagggtgacccgatgtcgccccttttatttaacctggcaatggaccctctattatgcaagctggaagagagtggcaaaggataccaccgaggacagagcagcatcacagcgatggcatttgcagacgatctggttttgctgagcgactcctgggaaaatatgaatacaaatattagcatactggagaccttctgcaatctgaccggactcaaaacacaggggcaaaagtgccacggcttttacatcaagccgacaaagaagtcttacaccatcaatgactgcgctgcctggactatcaacggcacacccctgaacatgatcgaccccggcgaatctgagaaatacctcggcctgcagtttgacccgtggattggaatagcaaggtccggtctctccacaaaactagatttttggcttcagcggatcgatcaagcaccacttaaacctctgcagaaaactgatattctcaaaacatacaccatccctcggctgatctacatagctgaccactcagaagtgaaaagcgcactactcgaaacccttgaccagaagatccggacagcggtcaaggaatggcttcacctacctccgtgcacctgcgatgccatcctgtactcgagcacgagagacggcggtttgggcatcaccaaattggcaggactgatccccagcgtgcaggcccgtagactgcatcggatcgcacagtcatctgacgatacgatgaaatgcttcatggaaaaagagaaaatggaacagctgcataagaaattgtggattcaagctggaggggacagagagaacataccctcgatttgggaagcaccaccgtcgagtgaaccaccaaacaacgtgagcacaaattcggaatgggaagcaccgacccagaaagataaatttccaaagccttgcaattggaggaaaaacgaattcaaaaaatggaccaaattggcatcccaaggccgcggaattgtaaattttgaaagagacaaaattagtaaccattggatccaatactacagacgcatacctcacaggaaactcctcactgcactacaactcagggccaacgtttaccccacgagagaatttctagccaggggtagacaagaccaatacatcaaggcgtgtaggcactgcgatgcggacaacgaatcctgcgcccacatcatcggcaactgcccagtgacacaggacgcccgaatcaagaggcacaattacatctgcgaactgcttctcgaggaggcgaagaagaaggactgggtagtgttcaaggaaccgcacataagggattccaacaaggaactgtacaaacctgacctgatatttgtgaaggatgggcgtgcacttgtcgtggatgtgacagtacggtatgaagcagccaaatcatcgctggaggaagccgctgcagagaaagtgagaaagtacaaacacctggaaacggaagtaagacatctcacgaatgcaaaggacgttacttttgtgggctttcccctaggagcgcgggggaaatggcaccaagataactttaaacttttgactgagcttggcctctccaaatcgaggcaagtgaaaatggcagagactttttccacagtagcgctcttttcatctgtggacattgtacatatgtttgccagtagggccagaaaatctatggttatgtgataataggctgccttctgcggggcttgccttctggccatgcccttcttctctcccttgcacctgtacctcttggtctttgaataaagcctgagtaggaaggaccggtaaaaaaaaaaaaaaaaaaaaaaaaaaaaaaacgttgactaaaaaaaaaaaaaaaaaaaaaaaaaaaaaaaaaaaaaaaaaaaaaaaaaaaaaaaaaaaaaaaaaaaaaa

SEQ ID NO: 10796 - DNA, 5264 bp, synthetic construct
  source 1..5264: mol_type = other DNA
gaaataagagagaaaagaagagtaagaagaaatataagagaattcgccaccatggcccctaagaaaaagcggaaggtgaatatcagcggctctagctgcggcagccccaacagcgccgacaccagcagcgacttcaaggacctgtggaccaagctgaaggaatgccacgaccgggaagtgcagggactccaggtgaaggtcaccaaactcaagcaagaaagaatcctggacgcccagagactggaagaattcttcaccaagaaccagcagctgagagagcagcagaaagtgctgcacgagacaatcaaggttctggaagatagactgcgggccggcctgtgcgacagatgcgccgtgaccgaggaacacatgcgcaaaaagcagcaggagttcgagaacattagacagcaaaatctgaaattgatcacagagctgatgaacgagagaaacacactgcaggaggagaacaagaagctgagcgagcagctgcaacagaagatcgagaatgatcagcaacaccaggccgctgagctggaatgtgaagaggacgtgatccccgacagcccaatcacagctttcagcttttctggcgtgaacagactgaggcggaaggaaaacccccacgtgcggtacatcgagcagacccataccaagctggaacacagcgtgtgtgccaacgagatgagaaaggtgtccaagtcctccacccatccccagcacaaccctaacgaaaatgagatcctggtggctgatacctacgaccagtctcagagccctatggccaaggcccacggcaccagctcttatacccctgataagagctccttcaacctggccaccgtggtggccgagacactgggcctgggcgtgcaggaggaaagcgagacacagggcccaatgagccctctgggagatgagctgtaccactgcctggaaggcaaccacaagaaacagccttttgagtccggctccgagactcctggaacaagcgagagcgctacacctgagggcagccctaagagaaaggtgtccagcgccgagggcgctgccaaggaagagcctaaacggagaagcgccagactgagcgccaagccccccgccaaggtggaagccaagcctaagaaggccgccgctaaggacaagagcagcgataagaaagtccagaccaagggcaagcggggcgccaaaggcaaacaggccgaggtggccaaccaggagacaaaggaagatctgcctgctgagaacggcgaaaccaagaccgaggaatctccagcttctgacgaggccggagagaaggaggccaaaagcgacagcggctctgagacacctggaacaagcgagagcgccaccccggaatcctatgaacaacttgcaccacaaccgtgtgtgggagaaactttacattctagcctcccacgagacagtgaactgtttgtgcctgaagaggggagcagcgagaaggagagcgaggacgcgccaaaaacatctcctccgacgcctgggaaacatggtttggaacagactggggaggaaaaagtgatggtgactgttcctgacaaaaatccaccttgtccttgctgtggtacccgggtaaactctgtgttgaatctgattgaacatctgaaagtgtcacacgggaaaaggggggtttgttttcggtgtgcaaaatgtggaaaggaaaatagtaactatcacagtgttgtttgtcattttaagaaatgcaggggtccagagacggagaaagccccagctggggagtggatttgtgaggtatgcaacagagattttacaaccaaaattggcctgggacaacacaagagattggcacacccagcagtgagaaatcaggaaaggatcgttgcttcccaaccgaaagaaacatcaaatagaggtgctcacaaaaggtgctggacaaaggaggaggaagaattactaataagactggaggctcagttcgagggaaacaaaaatattaataagcttattgcagaacacataaccaccaaaacagctaagcagatcagtgacaaaaggcgattgctgtccagaaagccagcagaggagccacgtgaggagcctggaacgtgtcatcacaccaggagagcagctgcgagcctgagaacggagcctgagatgagtcatcacgcccaggcagaggacagagataatggacctgggagacgccctctgccaggcagggcagctgccggagggagaacaatggacgagataagacgccaccctgataagggcaacggacagcagagacccaccaagcaaaaatcagaagaacagctgcaggcttactataaaaagacactagaggaacgactttcagctggggcacttaacaccttcccccgagcattcaagcaggtaatggaaggccgggatataaagctagtaatcaatcagacagcgcaggactgcttcggatgcctggaatccataagccaaataagaacggcaacccgagataaaaaggacacggtgacccgggagaaacacccaaagaaaccttttcagaagtggatgaagaagagagcaatcaaaaaaggtaattatcttcggttccagcgtttattttatcttgatagagggaaactggctaaaatcattttagatgatattgaatgcttgtcttgtgacataccactcagtgaaatttattcggtttttaaagccagatgggaaacaactggtagctttaaaagccttggggactttaaaacttacgggaaggctgacaacactgccttcagagaattaattacggctaaagaaattgagaaaaatgtgcaggaaatgagcaaaggctcggctcccggtccagacgggattactcttggggacgtcgtaaagatggatcccgagttttcccggaccatggagattttcaatttatggttaacaactggtaaaatcccggacatggtgagggggtgcagaaccgttttgattccaaaatcatcaaagccggatcgtttgaaagacattaataactggagacctatcacgatcggttccatcttgctgagactgttctccaggattgtaacagctaggctgagcaaagcgtgccccctgaacccaaggcaaagaggctttatcagagcggcgggatgctctgaaaacttaaaactcctgcaaactataatttggtcggccaaaagagaacacagaccactgggtgttgtattcgtggacatcgccaaggcttttgacaccgtaagccaccagcacatcattcatgctttgcagcaaagagaggtggatccccacatcgtcggtctggtgagcaatatgtacgagaacatcagtacgtatatcaccacaaagaggaacacacacacagacaaaatccagatccgggttggagtaaagcagggtgacccgatgtcgccccttttatttaacctggcaatggaccctctattatgcaagctggaagagagtggcaaaggataccaccgaggacagagcagcatcacagcgatggcatttgcagacgatctggttttgctgagcgactcctgggaaaatatgaatacaaatattagcatactggagaccttctgcaatctgaccggactcaaaacacaggggcaaaagtgccacggcttttacatcaagccgacaaagaagtcttacaccatcaatgactgcgctgcctggactatcaacggcacacccctgaacatgatcgaccccggcgaatctgagaaatacctcggcctgcagtttgacccgtggattggaatagcaaggtccggtctctccacaaaactagatttttggcttcagcggatcgatcaagcaccacttaaacctctgcagaaaactgatattctcaaaacatacaccatccctcggctgatctacatagctgaccactcagaagtgaaaagcgcactactcgaaacccttgaccagaagatccggacagcggtcaaggaatggcttcacctacctccgtgcacctgcgatgccatcctgtactcgagcacgagagacggcggtttgggcatcaccaaattggcaggactgatccccagcgtgcaggcccgtagactgcatcggatcgcacagtcatctgacgatacgatgaaatgcttcatggaaaaagagaaaatggaacagctgcataagaaattgtggattcaagctggaggggacagagagaacataccctcgatttgggaagcaccaccgtcgagtgaaccaccaaacaacgtgagcacaaattcggaatgggaagcaccgacccagaaagataaatttccaaagccttgcaattggaggaaaaacgaattcaaaaaatggaccaaattggcatcccaaggccgcggaattgtaaattttgaaagagacaaaattagtaaccattggatccaatactacagacgcatacctcacaggaaactcctcactgcactacaactcagggccaacgtttaccccacgagagaatttctagccaggggtagacaagaccaatacatcaaggcgtgtaggcactgcgatgcggacaacgaatcctgcgcccacatcatcggcaactgcccagtgacacaggacgcccgaatcaagaggcacaattacatctgcgaactgcttctcgaggaggcgaagaagaaggactgggtagtgttcaaggaaccgcacataagggattccaacaaggaactgtacaaacctgacctgatatttgtgaaggatgggcgtgcacttgtcgtggatgtgacagtacggtatgaagcagccaaatcatcgctggaggaagccgctgcagagaaagtgagaaagtacaaacacctggaaacggaagtaagacatctcacgaatgcaaaggacgttacttttgtgggctttcccctaggagcgcgggggaaatggcaccaagataactttaaacttttgactgagcttggcctctccaaatcgaggcaagtgaaaatggcagagactttttccacagtagcgctcttttcatctgtggacattgtacatatgtttgccagtagggccagaaaatctatggttatgtgataataggctgccttctgcggggcttgccttctggccatgcccttcttctctcccttgcacctgtacctcttggtctttgaataaagcctgagtaggaaggaccggtaaaaaaaaaaaaaaaaaaaaaaaaaaaaaaacgttgactaaaaaaaaaaaaaaaaaaaaaaaaaaaaaaaaaaaaaaaaaaaaaaaaaaaaaaaaaaaaaaaaaaaaaa

SEQ ID NO: 10797 - DNA, 5264 bp, synthetic construct
  source 1..5264: mol_type = other DNA
gaaataagagagaaaagaagagtaagaagaaatataagagaattcgccaccatggcccctaagaaaaagcggaaggtgaatatcagcggctctagctgcggcagccccaacagcgccgacaccagcagcgacttcaaggacctgtggaccaagctgaaggaatgccacgaccgggaagtgcagggactccaggtgaaggtcaccaaactcaagcaagaaagaatcctggacgcccagagactggaagaattcttcaccaagaaccagcagctgagagagcagcagaaagtgctgcacgagacaatcaaggttctggaagatagactgcgggccggcctgtgcgacagatgcgccgtgaccgaggaacacatgcgcaaaaagcagcaggagttcgagaacattagacagcaaaatctgaaattgatcacagagctgatgaacgagagaaacacactgcaggaggagaacaagaagctgagcgagcagctgcaacagaagatcgagaatgatcagcaacaccaggccgctgagctggaatgtgaagaggacgtgatccccgacagcccaatcacagctttcagcttttctggcgtgaacagactgaggcggaaggaaaacccccacgtgcggtacatcgagcagacccataccaagctggaacacagcgtgtgtgccaacgagatgagaaaggtgtccaagtcctccacccatccccagcacaaccctaacgaaaatgagatcctggtggctgatacctacgaccagtctcagagccctatggccaaggcccacggcaccagctcttatacccctgataagagctccttcaacctggccaccgtggtggccgagacactgggcctgggcgtgcaggaggaaagcgagacacagggcccaatgagccctctgggagatgagctgtaccactgcctggaaggcaaccacaagaaacagccttttgagtccggctccgagactcctggaacaagcgagagcgctacacctgagggcagccctaagagaaaggtgtccagcgccgagggcgctgccaaggaagagcctaaacggagaagcgccagactgagcgccaagccccccgccaaggtggaagccaagcctaagaaggccgccgctaaggacaagagcagcgataagaaagtccagaccaagggcaagcggggcgccaaaggcaaacaggccgaggtggccaaccaggagacaaaggaagatctgcctgctgagaacggcgaaaccaagaccgaggaatctccagcttctgacgaggccggagagaaggaggccaaaagcgacagcggctctgagacacctggaacaagcgagagcgccaccccggaatcctatgaacaacttgcaccacaaccgtgtgtgggagaaactttacattctagcctcccacgagacagtgaactgtttgtgcctgaagaggggagcagcgagaaggagagcgaggacgcgccaaaaacatctcctccgacgcctgggaaacatggtttggaacagactggggaggaaaaagtgatggtgactgttcctgacaaaaatccaccttgtccttgctgtggtacccgggtaaactctgtgttgaatctgattgaacatctgaaagtgtcacacgggaaaaggggggtttgttttcggtgtgcaaaatgtggaaaggaaaatagtaactatcacagtgttgtttgtcattttaagaaatgcaggggtccagagacggagaaagccccagctggggagtggatttgtgaggtatgcaacagagattttacaaccaaaattggcctgggacaacacaagagattggcacacccagcagtgagaaatcaggaaaggatcgttgcttcccaaccgaaagaaacatcaaatagaggtgctcacaaaaggtgctggacaaaggaggaggaagaattactaataagactggaggctcagttcgagggaaacaaaaatattaataagcttattgcagaacacataaccaccaaaacagctaagcagatcagtgacaaaaggcgattgctgtccagaaagccagcagaggagccacgtgaggagcctggaacgtgtcatcacaccaggagagcagctgcgagcctgagaacggagcctgagatgagtcatcacgcccaggcagaggacagagataatggacctgggagacgccctctgccaggcagggcagctgccggagggagaacaatggacgagataagacgccaccctgataagggcaacggacagcagagacccaccaagcaaaaatcagaagaacagctgcaggctcactataaaaagacactagaggaacgactttcagctggggcacttaacaccttcccccgagcattcaagcaggtaatggaaggccgggatataaagctagtaatcaatcagacagcgcaggactgcttcggatgcctggaatccataagccaaataagaacggcaacccgagataaaaaggacacggtgacccgggagaaacacccaaagaaaccttttcagaagtggatgaagaagagagcaatcaaaaaaggtaattatcttcggttccagcgtttattttatcttgatagagggaaactggctaaaatcattttagatgatattgaatgcttgtcttgtgacataccactcagtgaaatttattcggtttttaaaacaagatgggaaacaactggtagctttaaaagccttggggactttaaaacttacgggaaggctgacaacactgccttcagagaattaattacggctaaagaaattgagaaaaatgtgcaggaaatgagcaaaggctcggctcccggtccagacgggattactcttggggacgtcgtaaagatggatcccgagttttcccggaccatggagattttcaatttatggttaacaactggtaaaatcccggacatggtgagggggtgcagaaccgttttgattccaaaatcatcaaagccggatcgtttgaaagacattaataactggagacctatcacgatcggttccatcttgctgagactgttctccaggattgtaacagctaggctgagcaaagcgtgccccctgaacccaaggcaaagaggctttatcagagcggcgggatgctctgaaaacttaaaactcctgcaaactataatttggtcggccaaaagagaacacagaccactgggtgttgtattcgtggacatcgccaaggcttttgacaccgtaagccaccagcacatcattcatgctttgcagcaaagagaggtggatccccacatcgtcggtctggtgagcaatatgtacgagaacatcagtacgtatatcaccacaaagaggaacacacacacagacaaaatccagatccgggttggagtaaagcagggtgacccgatgtcgccccttttatttaacctggcaatggaccctctattatgcaagctggaagagagtggcaaaggataccaccgaggacagagcagcatcacagcgatggcatttgcagacgatctggttttgctgagcgactcctgggaaaatatgaatacaaatattagcatactggagaccttctgcaatctgaccggactcaaaacacaggggcaaaagtgccacggcttttacatcaagccgacaaagaagtcttacaccatcaatgactgcgctgcctggactatcaacggcacacccctgaacatgatcgaccccggcgaatctgagaaatacctcggcctgcagtttgacccgtggattggaatagcaaggtccggtctctccacaaaactagatttttggcttcagcggatcgatcaagcaccacttaaacctctgcagaaaactgatattctcaaaacatacaccatccctcggctgatctacatagctgaccactcagaagtgaaaagcgcactactcgaaacccttgaccagaagatccggacagcggtcaaggaatggcttcacctacctccgtgcacctgcgatgccatcctgtactcgagcacgagagacggcggtttgggcatcaccaaattggcaggactgatccccagcgtgcaggcccgtagactgcatcggatcgcacagtcatctgacgatacgatgaaatgcttcatggaaaaagagaaaatggaacagctgcataagaaattgtggattcaagctggaggggacagagagaacataccctcgatttgggaagcaccaccgtcgagtgaaccaccaaacaacgtgagcacaaattcggaatgggaagcaccgacccagaaagataaatttccaaagccttgcaattggaggaaaaacgaattcaaaaaatggaccaaattggcatcccaaggccgcggaattgtaaattttgaaagagacaaaattagtaaccattggatccaatactacagacgcatacctcacaggaaactcctcactgcactacaactcagggccaacgtttaccccacgagagaatttctagccaggggtagacaagaccaatacatcaaggcgtgtaggcactgcgatgcggacaacgaatcctgcgcccacatcatcggcaactgcccagtgacacaggacgcccgaatcaagaggcacaattacatctgcgaactgcttctcgaggaggcgaagaagaaggactgggtagtgttcaaggaaccgcacataagggattccaacaaggaactgtacaaacctgacctgatatttgtgaaggatgggcgtgcacttgtcgtggatgtgacagtacggtatgaagcagccaaatcatcgctggaggaagccgctgcagagaaagtgagaaagtacaaacacctggaaacggaagtaagacatctcacgaatgcaaaggacgttacttttgtgggctttcccctaggagcgcgggggaaatggcaccaagataactttaaacttttgactgagcttggcctctccaaatcgaggcaagtgaaaatggcagagactttttccacagtagcgctcttttcatctgtggacattgtacatatgtttgccagtagggccagaaaatctatggttatgtgataataggctgccttctgcggggcttgccttctggccatgcccttcttctctcccttgcacctgtacctcttggtctttgaataaagcctgagtaggaaggaccggtaaaaaaaaaaaaaaaaaaaaaaaaaaaaaaacgttgactaaaaaaaaaaaaaaaaaaaaaaaaaaaaaaaaaaaaaaaaaaaaaaaaaaaaaaaaaaaaaaaaaaaaaa

SEQ ID NO: 10798 - DNA, 5264 bp, synthetic construct
  source 1..5264: mol_type = other DNA
gaaataagagagaaaagaagagtaagaagaaatataagagaattcgccaccatggcccctaagaaaaagcggaaggtgaatatcagcggctctagctgcggcagccccaacagcgccgacaccagcagcgacttcaaggacctgtggaccaagctgaaggaatgccacgaccgggaagtgcagggactccaggtgaaggtcaccaaactcaagcaagaaagaatcctggacgcccagagactggaagaattcttcaccaagaaccagcagctgagagagcagcagaaagtgctgcacgagacaatcaaggttctggaagatagactgcgggccggcctgtgcgacagatgcgccgtgaccgaggaacacatgcgcaaaaagcagcaggagttcgagaacattagacagcaaaatctgaaattgatcacagagctgatgaacgagagaaacacactgcaggaggagaacaagaagctgagcgagcagctgcaacagaagatcgagaatgatcagcaacaccaggccgctgagctggaatgtgaagaggacgtgatccccgacagcccaatcacagctttcagcttttctggcgtgaacagactgaggcggaaggaaaacccccacgtgcggtacatcgagcagacccataccaagctggaacacagcgtgtgtgccaacgagatgagaaaggtgtccaagtcctccacccatccccagcacaaccctaacgaaaatgagatcctggtggctgatacctacgaccagtctcagagccctatggccaaggcccacggcaccagctcttatacccctgataagagctccttcaacctggccaccgtggtggccgagacactgggcctgggcgtgcaggaggaaagcgagacacagggcccaatgagccctctgggagatgagctgtaccactgcctggaaggcaaccacaagaaacagccttttgagtccggctccgagactcctggaacaagcgagagcgctacacctgagggcagccctaagagaaaggtgtccagcgccgagggcgctgccaaggaagagcctaaacggagaagcgccagactgagcgccaagccccccgccaaggtggaagccaagcctaagaaggccgccgctaaggacaagagcagcgataagaaagtccagaccaagggcaagcggggcgccaaaggcaaacaggccgaggtggccaaccaggagacaaaggaagatctgcctgctgagaacggcgaaaccaagaccgaggaatctccagcttctgacgaggccggagagaaggaggccaaaagcgacagcggctctgagacacctggaacaagcgagagcgccaccccggaatcctatgaacaacttgcaccacaaccgtgtgtgggagaaactttacattctagcctcccacgagacagtgaactgtttgtgcctgaagaggggagcagcgagaaggagagcgaggacgcgccaaaaacatctcctccgacgcctgggaaacatggtttggaacagactggggaggaaaaagtgatggtgactgttcctgacaaaaatccaccttgtccttgctgtggtacccgggtaaactctgtgttgaatctgattgaacatctgaaagtgtcacacgggaaaaggggggtttgttttcggtgtgcaaaatgtggaaaggaaaatagtaactatcacagtgttgtttgtcattttaagaaatgcaggggtccagagacggagaaagccccagctggggagtggatttgtgaggtatgcaacagagattttacaaccaaaattggcctgggacaacacaagagattggcacacccagcagtgagaaatcaggaaaggatcgttgcttcccaaccgaaagaaacatcaaatagaggtgctcacaaaaggtgctggacaaaggaggaggaagaattactaataagactggaggctcagttcgagggaaacaaaaatattaataagcttattgcagaacacataaccaccaaaacagctaagcagatcagtgacaaaaggcgattgctgtccagaaagccagcagaggagccacgtgaggagcctggaacgtgtcatcacaccaggagagcagctgcgagcctgagaacggagcctgagatgagtcatcacgcccaggcagaggacagagataatggacctgggagacgccctctgccaggcagggcagctgccggagggagaacaatggacgagataagacgccaccctgataagggcaacggacagcagagacccaccaagcaaaaatcagaagaacagctgcaggcttactataaaaagacactagaggaacgactttcagctggggcacttaacaccttcccccgagcattcaagcaggtaatggaaggccgggatataaagctagtaatcaatcagacagcgcaggactgcttcggatgcctggaatccataagccaaataagaacggcaacccgagataaaaaggacacggtgacccgggagaaacacccaaagaaaccttttcagaagtggatgaagaagagagcaatcaaaaaaggtaattatcttcggttccagcgtttattttatcttgatagagggaaactggctaaaatcattttagatgatattgaatgcttgtcttgtgacataccactcagtgaaatttattcggtttttaaaacaagatgggaaacaactggtagctttaaaagccttggggactttaaaacttacgggaaggctgacaacactgccttcagagaattaattacggctaaagaaattgagaaaaatgtgcaggaaatgagcaaaggctcggctcccggtccagacgggattactcttggggacgtcgtaaagatggatcccgagttttcccggaccatggagattttcaatttatggttaacaactggtaaaatcccggacatggtgagggggtgcagaaccgttttgattccaaaatcatcaaagccggatcgtttgaaagacattaataactggagacctatcacgatcggttccatcttgctgagactgttctccaggattgtaacagctaggctgagcaaagcgtgccccctgaacccaaggcaaagaggctttatcagagcggcgggatgctctgaaaacttaaaactcctgcaaactataatttggtcggccaaaagagaacacagaccactgggtgttgtattcgtggacatcgccaaggcttttgacaccgtaagccaccagcacatcattcatgctttgcagcaaagagaggtggatccccacatcgtcggtctggtgagcaatatgtacgagaacatcagtacgtatatcaccacaaagaggaacacacacacagacaaaatccagatccgggttggagtaaagcagggtgacccgatgtcgccccttttatttaacctggcaatggaccctctattatgcaagctggaagagagtggcaaaggataccaccgaggacagagcagcatcacagcgatggcatttgcagacgatctggttttgctgagcgactcctgggaaaatatgaatacaaatattagcatactggagaccttctgcaatctgaccggactcaaaacacaggggcaaaagtgccacggcttttacatcaagccgacaaagaagtcttacaccatcaatgactgcgctgcctggactatcaacggcacacccctgaacatgatcgaccccggcgaatctgagaaatacctcggcctgcagtttgacccgtggattggaatagcaaggtccggtctctccacaaaactagatttttggcttcagcggatcgatcaagcaccacttaaacctctgcagaaaactgatattctcaaaacatacaccatccctcggctgatctacctggctgaccactcagaagtgaaaagcgcactactcgaaacccttgaccagaagatccggacagcggtcaaggaatggcttcacctacctccgtgcacctgcgatgccatcctgtactcgagcacgagagacggcggtttgggcatcaccaaattggcaggactgatccccagcgtgcaggcccgtagactgcatcggatcgcacagtcatctgacgatacgatgaaatgcttcatggaaaaagagaaaatggaacagctgcataagaaattgtggattcaagctggaggggacagagagaacataccctcgatttgggaagcaccaccgtcgagtgaaccaccaaacaacgtgagcacaaattcggaatgggaagcaccgacccagaaagataaatttccaaagccttgcaattggaggaaaaacgaattcaaaaaatggaccaaattggcatcccaaggccgcggaattgtaaattttgaaagagacaaaattagtaaccattggatccaatactacagacgcatacctcacaggaaactcctcactgcactacaactcagggccaacgtttaccccacgagagaatttctagccaggggtagacaagaccaatacatcaaggcgtgtaggcactgcgatgcggacaacgaatcctgcgcccacatcatcggcaactgcccagtgacacaggacgcccgaatcaagaggcacaattacatctgcgaactgcttctcgaggaggcgaagaagaaggactgggtagtgttcaaggaaccgcacataagggattccaacaaggaactgtacaaacctgacctgatatttgtgaaggatgggcgtgcacttgtcgtggatgtgacagtacggtatgaagcagccaaatcatcgctggaggaagccgctgcagagaaagtgagaaagtacaaacacctggaaacggaagtaagacatctcacgaatgcaaaggacgttacttttgtgggctttcccctaggagcgcgggggaaatggcaccaagataactttaaacttttgactgagcttggcctctccaaatcgaggcaagtgaaaatggcagagactttttccacagtagcgctcttttcatctgtggacattgtacatatgtttgccagtagggccagaaaatctatggttatgtgataataggctgccttctgcggggcttgccttctggccatgcccttcttctctcccttgcacctgtacctcttggtctttgaataaagcctgagtaggaaggaccggtaaaaaaaaaaaaaaaaaaaaaaaaaaaaaaacgttgactaaaaaaaaaaaaaaaaaaaaaaaaaaaaaaaaaaaaaaaaaaaaaaaaaaaaaaaaaaaaaaaaaaaaaa

SEQ ID NO: 10799 - DNA, 5264 bp, synthetic construct
  source 1..5264: mol_type = other DNA
gaaataagagagaaaagaagagtaagaagaaatataagagaattcgccaccatggcccctaagaaaaagcggaaggtgaatatcagcggctctagctgcggcagccccaacagcgccgacaccagcagcgacttcaaggacctgtggaccaagctgaaggaatgccacgaccgggaagtgcagggactccaggtgaaggtcaccaaactcaagcaagaaagaatcctggacgcccagagactggaagaattcttcaccaagaaccagcagctgagagagcagcagaaagtgctgcacgagacaatcaaggttctggaagatagactgcgggccggcctgtgcgacagatgcgccgtgaccgaggaacacatgcgcaaaaagcagcaggagttcgagaacattagacagcaaaatctgaaattgatcacagagctgatgaacgagagaaacacactgcaggaggagaacaagaagctgagcgagcagctgcaacagaagatcgagaatgatcagcaacaccaggccgctgagctggaatgtgaagaggacgtgatccccgacagcccaatcacagctttcagcttttctggcgtgaacagactgaggcggaaggaaaacccccacgtgcggtacatcgagcagacccataccaagctggaacacagcgtgtgtgccaacgagatgagaaaggtgtccaagtcctccacccatccccagcacaaccctaacgaaaatgagatcctggtggctgatacctacgaccagtctcagagccctatggccaaggcccacggcaccagctcttatacccctgataagagctccttcaacctggccaccgtggtggccgagacactgggcctgggcgtgcaggaggaaagcgagacacagggcccaatgagccctctgggagatgagctgtaccactgcctggaaggcaaccacaagaaacagccttttgagtccggctccgagactcctggaacaagcgagagcgctacacctgagggcagccctaagagaaaggtgtccagcgccgagggcgctgccaaggaagagcctaaacggagaagcgccagactgagcgccaagccccccgccaaggtggaagccaagcctaagaaggccgccgctaaggacaagagcagcgataagaaagtccagaccaagggcaagcggggcgccaaaggcaaacaggccgaggtggccaaccaggagacaaaggaagatctgcctgctgagaacggcgaaaccaagaccgaggaatctccagcttctgacgaggccggagagaaggaggccaaaagcgacagcggctctgagacacctggaacaagcgagagcgccaccccggaatcctatgaacaacttgcaccacaaccgtgtgtgggagaaactttacattctagcctcccacgagacagtgaactgtttgtgcctgaagaggggagcagcgagaaggagagcgaggacgcgccaaaaacatctcctccgacgcctgggaaacatggtttggaacagactggggaggaaaaagtgatggtgactgttcctgacaaaaatccaccttgtccttgctgtggtacccgggtaaactctgtgttgaatctgattgaacatctgaaagtgtcacacgggaaaaggggggtttgttttcggtgtgcaaaatgtggaaaggaaaatagtaactatcacagtgttgtttgtcattttaagaaatgcaggggtccagagacggagaaagccccagctggggagtggatttgtgaggtatgcaacagagattttacaaccaaaattggcctgggacaacacaagagattggcacacccagcagtgagaaatcaggaaaggatcgttgcttcccaaccgaaagaaacatcaaatagaggtgctcacaaaaggtgctggacaaaggaggaggaagaattactaataaagctggaggctcagttcgagggaaacaaaaatattaataagcttattgcagaacacataaccaccaaaacagctaagcagatcagtgacaaaaggcgattgctgtccagaaagccagcagaggagccacgtgaggagcctggaacgtgtcatcacaccaggagagcagctgcgagcctgagaacggagcctgagatgagtcatcacgcccaggcagaggacagagataatggacctgggagacgccctctgccaggcagggcagctgccggagggagaacaatggacgagataagacgccaccctgataagggcaacggacagcagagacccaccaagcaaaaatcagaagaacagctgcaggcttactataaaaagacactagaggaacgactttcagctggggcacttaacaccttcccccgagcattcaagcaggtaatggaaggccgggatataaagctagtaatcaatcagacagcgcaggactgcttcggatgcctggaatccataagccaaataagaacggcaacccgagataaaaaggacacggtgacccgggagaaacacccaaagaaaccttttcagaagtggatgaagaagagagcaatcaaaaaaggtaattatcttcggttccagcgtttattttatcttgatagagggaaactggctaaaatcattttagatgatattgaatgcttgtcttgtgacataccactcagtgaaatttattcggtttttaaaacaagatgggaaacaactggtagctttaaaagccttggggactttaaaacttacgggaaggctgacaacactgccttcagagaattaattacggctaaagaaattgagaaaaatgtgcaggaaatgagcaaaggctcggctcccggtccagacgggattactcttggggacgtcgtaaagatggatcccgagttttcccggaccatggagattttcaatttatggttaacaactggtaaaatcccggacatggtgagggggtgcagaaccgttttgattccaaaatcatcaaagccggatcgtttgaaagacattaataactggagacctatcacgatcggttccatcttgctgagactgttctccaggattgtaacagctaggctgagcaaagcgtgccccctgaacccaaggcaaagaggctttatcagagcggcgggatgctctgaaaacttaaaactcctgcaaactataatttggtcggccaaaagagaacacagaccactgggtgttgtattcgtggacatcgccaaggcttttgacaccgtaagccaccagcacatcattcatgctttgcagcaaagagaggtggatccccacatcgtcggtctggtgagcaatatgtacgagaacatcagtacgtatatcaccacaaagaggaacacacacacagacaaaatccagatccgggttggagtaaagcagggtgacccgatgtcgccccttttatttaacctggcaatggaccctctattatgcaagctggaagagagtggcaaaggataccaccgaggacagagcagcatcacagcgatggcatttgcagacgatctggttttgctgagcgactcctgggaaaatatgaatacaaatattagcatactggagaccttctgcaatctgaccggactcaaaacacaggggcaaaagtgccacggcttttacatcaagccgacaaagaagtcttacaccatcaatgactgcgctgcctggactatcaacggcacacccctgaacatgatcgaccccggcgaatctgagaaatacctcggcctgcagtttgacccgtggattggaatagcaaggtccggtctctccacaaaactagatttttggcttcagcggatcgatcaagcaccacttaaacctctgcagaaaactgatattctcaaaacatacaccatccctcggctgatctacatagctgaccactcagaagtgaaaagcgcactactcgaaacccttgaccagaagatccggacagcggtcaaggaatggcttcacctacctccgtgcacctgcgatgccatcctgtactcgagcacgagagacggcggtttgggcatcaccaaattggcaggactgatccccagcgtgcaggcccgtagactgcatcggatcgcacagtcatctgacgatacgatgaaatgcttcatggaaaaagagaaaatggaacagctgcataagaaattgtggattcaagctggaggggacagagagaacataccctcgatttgggaagcaccaccgtcgagtgaaccaccaaacaacgtgagcacaaattcggaatgggaagcaccgacccagaaagataaatttccaaagccttgcaattggaggaaaaacgaattcaaaaaatggaccaaattggcatcccaaggccgcggaattgtaaattttgaaagagacaaaattagtaaccattggatccaatactacagacgcatacctcacaggaaactcctcactgcactacaactcagggccaacgtttaccccacgagagaatttctagccaggggtagacaagaccaatacatcaaggcgtgtaggcactgcgatgcggacaacgaatcctgcgcccacatcatcggcaactgcccagtgacacaggacgcccgaatcaagaggcacaattacatctgcgaactgcttctcgaggaggcgaagaagaaggactgggtagtgttcaaggaaccgcacataagggattccaacaaggaactgtacaaacctgacctgatatttgtgaaggatgggcgtgcacttgtcgtggatgtgacagtacggtatgaagcagccaaatcatcgctggaggaagccgctgcagagaaagtgagaaagtacaaacacctggaaacggaagtaagacatctcacgaatgcaaaggacgttacttttgtgggctttcccctaggagcgcgggggaaatggcaccaagataactttaaacttttgactgagcttggcctctccaaatcgaggcaagtgaaaatggcagagactttttccacagtagcgctcttttcatctgtggacattgtacatatgtttgccagtagggccagaaaatctatggttatgtgataataggctgccttctgcggggcttgccttctggccatgcccttcttctctcccttgcacctgtacctcttggtctttgaataaagcctgagtaggaaggaccggtaaaaaaaaaaaaaaaaaaaaaaaaaaaaaaacgttgactaaaaaaaaaaaaaaaaaaaaaaaaaaaaaaaaaaaaaaaaaaaaaaaaaaaaaaaaaaaaaaaaaaaaaa

SEQ ID NO: 10800 - DNA, 5264 bp, synthetic construct
  source 1..5264: mol_type = other DNA
gaaataagagagaaaagaagagtaagaagaaatataagagaattcgccaccatggcccctaagaaaaagcggaaggtgaatatcagcggctctagctgcggcagccccaacagcgccgacaccagcagcgacttcaaggacctgtggaccaagctgaaggaatgccacgaccgggaagtgcagggactccaggtgaaggtcaccaaactcaagcaagaaagaatcctggacgcccagagactggaagaattcttcaccaagaaccagcagctgagagagcagcagaaagtgctgcacgagacaatcaaggttctggaagatagactgcgggccggcctgtgcgacagatgcgccgtgaccgaggaacacatgcgcaaaaagcagcaggagttcgagaacattagacagcaaaatctgaaattgatcacagagctgatgaacgagagaaacacactgcaggaggagaacaagaagctgagcgagcagctgcaacagaagatcgagaatgatcagcaacaccaggccgctgagctggaatgtgaagaggacgtgatccccgacagcccaatcacagctttcagcttttctggcgtgaacagactgaggcggaaggaaaacccccacgtgcggtacatcgagcagacccataccaagctggaacacagcgtgtgtgccaacgagatgagaaaggtgtccaagtcctccacccatccccagcacaaccctaacgaaaatgagatcctggtggctgatacctacgaccagtctcagagccctatggccaaggcccacggcaccagctcttatacccctgataagagctccttcaacctggccaccgtggtggccgagacactgggcctgggcgtgcaggaggaaagcgagacacagggcccaatgagccctctgggagatgagctgtaccactgcctggaaggcaaccacaagaaacagccttttgagtccggctccgagactcctggaacaagcgagagcgctacacctgagggcagccctaagagaaaggtgtccagcgccgagggcgctgccaaggaagagcctaaacggagaagcgccagactgagcgccaagccccccgccaaggtggaagccaagcctaagaaggccgccgctaaggacaagagcagcgataagaaagtccagaccaagggcaagcggggcgccaaaggcaaacaggccgaggtggccaaccaggagacaaaggaagatctgcctgctgagaacggcgaaaccaagaccgaggaatctccagcttctgacgaggccggagagaaggaggccaaaagcgacagcggctctgagacacctggaacaagcgagagcgccaccccggaatcctatgaacaacttgcaccacaaccgtgtgtgggagaaactttacattctagcctcccacgagacagtgaactgtttgtgcctgaagaggggagcagcgagaaggagagcgaggacgcgccaaaaacatctcctccgacgcctgggaaacatggtttggaacagactggggaggaaaaagtgatggtgactgttcctgacaaaaatccaccttgtccttgctgtggtacccgggtaaactctgtgttgaatctgattgaacatctgaaagtgtcacacgggaaaaggggggtttgttttcggtgtgcaaaatgtggaaaggaaaatagtaactatcacagtgttgtttgtcattttaagaaatgcaggggtccagagacggagaaagccccagctggggagtggatttgtgaggtatgcggcagagattttacaaccaaaattggcctgggacaacacaagagattggcacacccagcagtgagaaatcaggaaaggatcgttgcttcccaaccgaaagaaacatcaaatagaggtgctcacaaaaggtgctggacaaaggaggaggaagaattactaataagactggaggctcagttcgagggaaacaaaaatattaataagcttattgcagaacacataaccaccaaaacagctaagcagatcagtgacaaaaggcgattgctgtccagaaagccagcagaggagccacgtgaggagcctggaacgtgtcatcacaccaggagagcagctgcgagcctgagaacggagcctgagatgagtcatcacgcccaggcagaggacagagataatggacctgggagacgccctctgccaggcagggcagctgccggagggagaacaatggacgagataagacgccaccctgataagggcaacggacagcagagacccaccaagcaaaaatcagaagaacagctgcaggcttactataaaaagacactagaggaacgactttcagctggggcacttaacaccttcccccgagcattcaagcaggtaatggaaggccgggatataaagctagtaatcaatcagacagcgcaggactgcttcggatgcctggaatccataagccaaataagaacggcaacccgagataaaaaggacacggtgacccgggagaaacacccaaagaaaccttttcagaagtggatgaagaagagagcaatcaaaaaaggtaattatcttcggttccagcgtttattttatcttgatagagggaaactggctaaaatcattttagatgatattgaatgcttgtcttgtgacataccactcagtgaaatttattcggtttttaaaacaagatgggaaacaactggtagctttaaaagccttggggactttaaaacttacgggaaggctgacaacactgccttcagagaattaattacggctaaagaaattgagaaaaatgtgcaggaaatgagcaaaggctcggctcccggtccagacgggattactcttggggacgtcgtaaagatggatcccgagttttcccggaccatggagattttcaatttatggttaacaactggtaaaatcccggacatggtgagggggtgcagaaccgttttgattccaaaatcatcaaagccggatcgtttgaaagacattaataactggagacctatcacgatcggttccatcttgctgagactgttctccaggattgtaacagctaggctgagcaaagcgtgccccctgaacccaaggcaaagaggctttatcagagcggcgggatgctctgaaaacttaaaactcctgcaaactataatttggtcggccaaaagagaacacagaccactgggtgttgtattcgtggacatcgccaaggcttttgacaccgtaagccaccagcacatcattcatgctttgcagcaaagagaggtggatccccacatcgtcggtctggtgagcaatatgtacgagaacatcagtacgtatatcaccacaaagaggaacacacacacagacaaaatccagatccgggttggagtaaagcagggtgacccgatgtcgccccttttatttaacctggcaatggaccctctattatgcaagctggaagagagtggcaaaggataccaccgaggacagagcagcatcacagcgatggcatttgcagacgatctggttttgctgagcgactcctgggaaaatatgaatacaaatattagcatactggagaccttctgcaatctgaccggactcaaaacacaggggcaaaagtgccacggcttttacatcaagccgacaaagaagtcttacaccatcaatgactgcgctgcctggactatcaacggcacacccctgaacatgatcgaccccggcgaatctgagaaatacctcggcctgcagtttgacccgtggattggaatagcaaggtccggtctctccacaaaactagatttttggcttcagcggatcgatcaagcaccacttaaacctctgcagaaaactgatattctcaaaacatacaccatccctcggctgatctacatagctgaccactcagaagtgaaaagcgcactactcgaaacccttgaccagaagatccggacagcggtcaaggaatggcttcacctacctccgtgcacctgcgatgccatcctgtactcgagcacgagagacggcggtttgggcatcaccaaattggcaggactgatccccagcgtgcaggcccgtagactgcatcggatcgcacagtcatctgacgatacgatgaaatgcttcatggaaaaagagaaaatggaacagctgcataagaaattgtggattcaagctggaggggacagagagaacataccctcgatttgggaagcaccaccgtcgagtgaaccaccaaacaacgtgagcacaaattcggaatgggaagcaccgacccagaaagataaatttccaaagccttgcaattggaggaaaaacgaattcaaaaaatggaccaaattggcatcccaaggccgcggaattgtaaattttgaaagagacaaaattagtaaccattggatccaatactacagacgcatacctcacaggaaactcctcactgcactacaactcagggccaacgtttaccccacgagagaatttctagccaggggtagacaagaccaatacatcaaggcgtgtaggcactgcgatgcggacaacgaatcctgcgcccacatcatcggcaactgcccagtgacacaggacgcccgaatcaagaggcacaattacatctgcgaactgcttctcgaggaggcgaagaagaaggactgggtagtgttcaaggaaccgcacataagggattccaacaaggaactgtacaaacctgacctgatatttgtgaaggatgggcgtgcacttgtcgtggatgtgacagtacggtatgaagcagccaaatcatcgctggaggaagccgctgcagagaaagtgagaaagtacaaacacctggaaacggaagtaagacatctcacgaatgcaaaggacgttacttttgtgggctttcccctaggagcgcgggggaaatggcaccaagataactttaaacttttgactgagcttggcctctccaaatcgaggcaagtgaaaatggcagagactttttccacagtagcgctcttttcatctgtggacattgtacatatgtttgccagtagggccagaaaatctatggttatgtgataataggctgccttctgcggggcttgccttctggccatgcccttcttctctcccttgcacctgtacctcttggtctttgaataaagcctgagtaggaaggaccggtaaaaaaaaaaaaaaaaaaaaaaaaaaaaaaacgttgactaaaaaaaaaaaaaaaaaaaaaaaaaaaaaaaaaaaaaaaaaaaaaaaaaaaaaaaaaaaaaaaaaaaaaa

SEQ ID NO: 10801 - DNA, 5264 bp, synthetic construct
  source 1..5264: mol_type = other DNA
gaaataagagagaaaagaagagtaagaagaaatataagagaattcgccaccatggcccctaagaaaaagcggaaggtgaatatcagcggctctagctgcggcagccccaacagcgccgacaccagcagcgacttcaaggacctgtggaccaagctgaaggaatgccacgaccgggaagtgcagggactccaggtgaaggtcaccaaactcaagcaagaaagaatcctggacgcccagagactggaagaattcttcaccaagaaccagcagctgagagagcagcagaaagtgctgcacgagacaatcaaggttctggaagatagactgcgggccggcctgtgcgacagatgcgccgtgaccgaggaacacatgcgcaaaaagcagcaggagttcgagaacattagacagcaaaatctgaaattgatcacagagctgatgaacgagagaaacacactgcaggaggagaacaagaagctgagcgagcagctgcaacagaagatcgagaatgatcagcaacaccaggccgctgagctggaatgtgaagaggacgtgatccccgacagcccaatcacagctttcagcttttctggcgtgaacagactgaggcggaaggaaaacccccacgtgcggtacatcgagcagacccataccaagctggaacacagcgtgtgtgccaacgagatgagaaaggtgtccaagtcctccacccatccccagcacaaccctaacgaaaatgagatcctggtggctgatacctacgaccagtctcagagccctatggccaaggcccacggcaccagctcttatacccctgataagagctccttcaacctggccaccgtggtggccgagacactgggcctgggcgtgcaggaggaaagcgagacacagggcccaatgagccctctgggagatgagctgtaccactgcctggaaggcaaccacaagaaacagccttttgagtccggctccgagactcctggaacaagcgagagcgctacacctgagggcagccctaagagaaaggtgtccagcgccgagggcgctgccaaggaagagcctaaacggagaagcgccagactgagcgccaagccccccgccaaggtggaagccaagcctaagaaggccgccgctaaggacaagagcagcgataagaaagtccagaccaagggcaagcggggcgccaaaggcaaacaggccgaggtggccaaccaggagacaaaggaagatctgcctgctgagaacggcgaaaccaagaccgaggaatctccagcttctgacgaggccggagagaaggaggccaaaagcgacagcggctctgagacacctggaacaagcgagagcgccaccccggaatcctatgaacaacttgcaccacaaccgtgtgtgggagaaactttacattctagcctcccacgagacagtgaactgtttgtgcctgaagaggggagcagcgagaaggagagcgaggacgcgccaaaaacatctcctccgacgcctgggaaacatggtttggaacagactggggaggaaaaagtgatggtgactgttcctgacaaaaatccaccttgtccttgctgtggtacccgggtaaactctgtgttgaatctgattgaacatctgaaagtgtcacacgggaaaaggggggtttgttttcggtgtgcaaaatgtggaaaggaaaatagtaactatcacagtgttgtttgtcattttaagaaatgcaggggtccagagacggagaaagccccagctggggagtggatttgtgaggtatgcaacagagattttacaaccaaaattggcctgggacaacacaagagattggcacacccagcagtgagaaatcaggaaaggatcgttgcttcccaaccgaaagaaacatcaaatagaggtgctcacaaaaggtgctggacaaaggaggaggaagaattactaataagactggaggctcagttcgagggaaacaaaaatattaataagcttattgcagaacacataaccaccaaaacagctaagcagatcagtgacaaaaggcgattgctgtccagaaagccagcagaggagccacgtgaggagcctggaacgtgtcatcacaccaggagagcagctgcgagcctgagaacggagcctgagatgagtcatcacgcccaggcagaggacagagataatggacctgggagacgccctctgccaggcagggcagctgccggagggagaacaatggacgagataagacgccaccctgataagggcaacggacagcagagacccaccaagcaaaaatcagaagaacagctgcaggcttactataaaaagacactagaggaacgactttcagctggggcacttaacaccttcccccgagcattcaagcaggtaatggaaggccgggatatacagctagtaatcaatcagacagcgcaggactgcttcggatgcctggaatccataagccaaataagaacggcaacccgagataaaaaggacacggtgacccgggagaaacacccaaagaaaccttttcagaagtggatgaagaagagagcaatcaaaaaaggtaattatcttcggttccagcgtttattttatcttgatagagggaaactggctaaaatcattttagatgatattgaatgcttgtcttgtgacataccactcagtgaaatttattcggtttttaaaacaagatgggaaacaactggtagctttaaaagccttggggactttaaaacttacgggaaggctgacaacactgccttcagagaattaattacggctaaagaaattgagaaaaatgtgcaggaaatgagcaaaggctcggctcccggtccagacgggattactcttggggacgtcgtaaagatggatcccgagttttcccggaccatggagattttcaatttatggttaacaactggtaaaatcccggacatggtgagggggtgcagaaccgttttgattccaaaatcatcaaagccggatcgtttgaaagacattaataactggagacctatcacgatcggttccatcttgctgagactgttctccaggattgtaacagctaggctgagcaaagcgtgccccctgaacccaaggcaaagaggctttatcagagcggcgggatgctctgaaaacttaaaactcctgcaaactataatttggtcggccaaaagagaacacagaccactgggtgttgtattcgtggacatcgccaaggcttttgacaccgtaagccaccagcacatcattcatgctttgcagcaaagagaggtggatccccacatcgtcggtctggtgagcaatatgtacgagaacatcagtacgtatatcaccacaaagaggaacacacacacagacaaaatccagatccgggttggagtaaagcagggtgacccgatgtcgccccttttatttaacctggcaatggaccctctattatgcaagctggaagagagtggcaaaggataccaccgaggacagagcagcatcacagcgatggcatttgcagacgatctggttttgctgagcgactcctgggaaaatatgaatacaaatattagcatactggagaccttctgcaatctgaccggactcaaaacacaggggcaaaagtgccacggcttttacatcaagccgacaaagaagtcttacaccatcaatgactgcgctgcctggactatcaacggcacacccctgaacatgatcgaccccggcgaatctgagaaatacctcggcctgcagtttgacccgtggattggaatagcaaggtccggtctctccacaaaactagatttttggcttcagcggatcgatcaagcaccacttaaacctctgcagaaaactgatattctcaaaacatacaccatccctcggctgatctacatagctgaccactcagaagtgaaaagcgcactactcgaaacccttgaccagaagatccggacagcggtcaaggaatggcttcacctacctccgtgcacctgcgatgccatcctgtactcgagcacgagagacggcggtttgggcatcaccaaattggcaggactgatccccagcgtgcaggcccgtagactgcatcggatcgcacagtcatctgacgatacgatgaaatgcttcatggaaaaagagaaaatggaacagctgcataagaaattgtggattcaagctggaggggacagagagaacataccctcgatttgggaagcaccaccgtcgagtgaaccaccaaacaacgtgagcacaaattcggaatgggaagcaccgacccagaaagataaatttccaaagccttgcaattggaggaaaaacgaattcaaaaaatggaccaaattggcatcccaaggccgcggaattgtaaattttgaaagagacaaaattagtaaccattggatccaatactacagacgcatacctcacaggaaactcctcactgcactacaactcagggccaacgtttaccccacgagagaatttctagccaggggtagacaagaccaatacatcaaggcgtgtaggcactgcgatgcggacaacgaatcctgcgcccacatcatcggcaactgcccagtgacacaggacgcccgaatcaagaggcacaattacatctgcgaactgcttctcgaggaggcgaagaagaaggactgggtagtgttcaaggaaccgcacataagggattccaacaaggaactgtacaaacctgacctgatatttgtgaaggatgggcgtgcacttgtcgtggatgtgacagtacggtatgaagcagccaaatcatcgctggaggaagccgctgcagagaaagtgagaaagtacaaacacctggaaacggaagtaagacatctcacgaatgcaaaggacgttacttttgtgggctttcccctaggagcgcgggggaaatggcaccaagataactttaaacttttgactgagcttggcctctccaaatcgaggcaagtgaaaatggcagagactttttccacagtagcgctcttttcatctgtggacattgtacatatgtttgccagtagggccagaaaatctatggttatgtgataataggctgccttctgcggggcttgccttctggccatgcccttcttctctcccttgcacctgtacctcttggtctttgaataaagcctgagtaggaaggaccggtaaaaaaaaaaaaaaaaaaaaaaaaaaaaaaacgttgactaaaaaaaaaaaaaaaaaaaaaaaaaaaaaaaaaaaaaaaaaaaaaaaaaaaaaaaaaaaaaaaaaaaaaa

SEQ ID NO: 10802 - DNA, 5264 bp, synthetic construct
  source 1..5264: mol_type = other DNA
gaaataagagagaaaagaagagtaagaagaaatataagagaattcgccaccatggcccctaagaaaaagcggaaggtgaatatcagcggctctagctgcggcagccccaacagcgccgacaccagcagcgacttcaaggacctgtggaccaagctgaaggaatgccacgaccgggaagtgcagggactccaggtgaaggtcaccaaactcaagcaagaaagaatcctggacgcccagagactggaagaattcttcaccaagaaccagcagctgagagagcagcagaaagtgctgcacgagacaatcaaggttctggaagatagactgcgggccggcctgtgcgacagatgcgccgtgaccgaggaacacatgcgcaaaaagcagcaggagttcgagaacattagacagcaaaatctgaaattgatcacagagctgatgaacgagagaaacacactgcaggaggagaacaagaagctgagcgagcagctgcaacagaagatcgagaatgatcagcaacaccaggccgctgagctggaatgtgaagaggacgtgatccccgacagcccaatcacagctttcagcttttctggcgtgaacagactgaggcggaaggaaaacccccacgtgcggtacatcgagcagacccataccaagctggaacacagcgtgtgtgccaacgagatgagaaaggtgtccaagtcctccacccatccccagcacaaccctaacgaaaatgagatcctggtggctgatacctacgaccagtctcagagccctatggccaaggcccacggcaccagctcttatacccctgataagagctccttcaacctggccaccgtggtggccgagacactgggcctgggcgtgcaggaggaaagcgagacacagggcccaatgagccctctgggagatgagctgtaccactgcctggaaggcaaccacaagaaacagccttttgagtccggctccgagactcctggaacaagcgagagcgctacacctgagggcagccctaagagaaaggtgtccagcgccgagggcgctgccaaggaagagcctaaacggagaagcgccagactgagcgccaagccccccgccaaggtggaagccaagcctaagaaggccgccgctaaggacaagagcagcgataagaaagtccagaccaagggcaagcggggcgccaaaggcaaacaggccgaggtggccaaccaggagacaaaggaagatctgcctgctgagaacggcgaaaccaagaccgaggaatctccagcttctgacgaggccggagagaaggaggccaaaagcgacagcggctctgagacacctggaacaagcgagagcgccaccccggaatcctatgaacaacttgcaccacaaccgtgtgtgggagaaactttacattctagcctcccacgagacagtgaactgtttgtgcctgaagaggggagcagcgagaaggagagcgaggacgcgccaaaaacatctcctccgacgcctgggaaacatggtttggaacagactcccgaggaaaaagtgatggtgactgttcctgacaaaaatccaccttgtccttgctgtggtacccgggtaaactctgtgttgaatctgattgaacatctgaaagtgtcacacgggaaaaggggggtttgttttcggtgtgcaaaatgtggaaaggaaaatagtaactatcacagtgttgtttgtcattttaagaaatgcaggggtccagagacggagaaagccccagctggggagtggatttgtgaggtatgcaacagagattttacaaccaaaattggcctgggacaacacaagagattggcacacccagcagtgagaaatcaggaaaggatcgttgcttcccaaccgaaagaaacatcaaatagaggtgctcacaaaaggtgctggacaaaggaggaggaagaattactaataagactggaggctcagttcgagggaaacaaaaatattaataagcttattgcagaacacataaccaccaaaacagctaagcagatcagtgacaaaaggcgattgctgtccagaaagccagcagaggagccacgtgaggagcctggaacgtgtcatcacaccaggagagcagctgcgagcctgagaacggagcctgagatgagtcatcacgcccaggcagaggacagagataatggacctgggagacgccctctgccaggcagggcagctgccggagggagaacaatggacgagataagacgccaccctgataagggcaacggacagcagagacccaccaagcaaaaatcagaagaacagctgcaggcttactataaaaagacactagaggaacgactttcagctggggcacttaacaccttcccccgagcattcaagcaggtaatggaaggccgggatataaagctagtaatcaatcagacagcgcaggactgcttcggatgcctggaatccataagccaaataagaacggcaacccgagataaaaaggacacggtgacccgggagaaacacccaaagaaaccttttcagaagtggatgaagaagagagcaatcaaaaaaggtaattatcttcggttccagcgtttattttatcttgatagagggaaactggctaaaatcattttagatgatattgaatgcttgtcttgtgacataccactcagtgaaatttattcggtttttaaaacaagatgggaaacaactggtagctttaaaagccttggggactttaaaacttacgggaaggctgacaacactgccttcagagaattaattacggctaaagaaattgagaaaaatgtgcaggaaatgagcaaaggctcggctcccggtccagacgggattactcttggggacgtcgtaaagatggatcccgagttttcccggaccatggagattttcaatttatggttaacaactggtaaaatcccggacatggtgagggggtgcagaaccgttttgattccaaaatcatcaaagccggatcgtttgaaagacattaataactggagacctatcacgatcggttccatcttgctgagactgttctccaggattgtaacagctaggctgagcaaagcgtgccccctgaacccaaggcaaagaggctttatcagagcggcgggatgctctgaaaacttaaaactcctgcaaactataatttggtcggccaaaagagaacacagaccactgggtgttgtattcgtggacatcgccaaggcttttgacaccgtaagccaccagcacatcattcatgctttgcagcaaagagaggtggatccccacatcgtcggtctggtgagcaatatgtacgagaacatcagtacgtatatcaccacaaagaggaacacacacacagacaaaatccagatccgggttggagtaaagcagggtgacccgatgtcgccccttttatttaacctggcaatggaccctctattatgcaagctggaagagagtggcaaaggataccaccgaggacagagcagcatcacagcgatggcatttgcagacgatctggttttgctgagcgactcctgggaaaatatgaatacaaatattagcatactggagaccttctgcaatctgaccggactcaaaacacaggggcaaaagtgccacggcttttacatcaagccgacaaagaagtcttacaccatcaatgactgcgctgcctggactatcaacggcacacccctgaacatgatcgaccccggcgaatctgagaaatacctcggcctgcagtttgacccgtggattggaatagcaaggtccggtctctccacaaaactagatttttggcttcagcggatcgatcaagcaccacttaaacctctgcagaaaactgatattctcaaaacatacaccatccctcggctgatctacatagctgaccactcagaagtgaaaagcgcactactcgaaacccttgaccagaagatccggacagcggtcaaggaatggcttcacctacctccgtgcacctgcgatgccatcctgtactcgagcacgagagacggcggtttgggcatcaccaaattggcaggactgatccccagcgtgcaggcccgtagactgcatcggatcgcacagtcatctgacgatacgatgaaatgcttcatggaaaaagagaaaatggaacagctgcataagaaattgtggattcaagctggaggggacagagagaacataccctcgatttgggaagcaccaccgtcgagtgaaccaccaaacaacgtgagcacaaattcggaatgggaagcaccgacccagaaagataaatttccaaagccttgcaattggaggaaaaacgaattcaaaaaatggaccaaattggcatcccaaggccgcggaattgtaaattttgaaagagacaaaattagtaaccattggatccaatactacagacgcatacctcacaggaaactcctcactgcactacaactcagggccaacgtttaccccacgagagaatttctagccaggggtagacaagaccaatacatcaaggcgtgtaggcactgcgatgcggacaacgaatcctgcgcccacatcatcggcaactgcccagtgacacaggacgcccgaatcaagaggcacaattacatctgcgaactgcttctcgaggaggcgaagaagaaggactgggtagtgttcaaggaaccgcacataagggattccaacaaggaactgtacaaacctgacctgatatttgtgaaggatgggcgtgcacttgtcgtggatgtgacagtacggtatgaagcagccaaatcatcgctggaggaagccgctgcagagaaagtgagaaagtacaaacacctggaaacggaagtaagacatctcacgaatgcaaaggacgttacttttgtgggctttcccctaggagcgcgggggaaatggcaccaagataactttaaacttttgactgagcttggcctctccaaatcgaggcaagtgaaaatggcagagactttttccacagtagcgctcttttcatctgtggacattgtacatatgtttgccagtagggccagaaaatctatggttatgtgataataggctgccttctgcggggcttgccttctggccatgcccttcttctctcccttgcacctgtacctcttggtctttgaataaagcctgagtaggaaggaccggtaaaaaaaaaaaaaaaaaaaaaaaaaaaaaaacgttgactaaaaaaaaaaaaaaaaaaaaaaaaaaaaaaaaaaaaaaaaaaaaaaaaaaaaaaaaaaaaaaaaaaaaaa

SEQ ID NO: 10803 - DNA, 5264 bp, synthetic construct
  source 1..5264: mol_type = other DNA
gaaataagagagaaaagaagagtaagaagaaatataagagaattcgccaccatggcccctaagaaaaagcggaaggtgaatatcagcggctctagctgcggcagccccaacagcgccgacaccagcagcgacttcaaggacctgtggaccaagctgaaggaatgccacgaccgggaagtgcagggactccaggtgaaggtcaccaaactcaagcaagaaagaatcctggacgcccagagactggaagaattcttcaccaagaaccagcagctgagagagcagcagaaagtgctgcacgagacaatcaaggttctggaagatagactgcgggccggcctgtgcgacagatgcgccgtgaccgaggaacacatgcgcaaaaagcagcaggagttcgagaacattagacagcaaaatctgaaattgatcacagagctgatgaacgagagaaacacactgcaggaggagaacaagaagctgagcgagcagctgcaacagaagatcgagaatgatcagcaacaccaggccgctgagctggaatgtgaagaggacgtgatccccgacagcccaatcacagctttcagcttttctggcgtgaacagactgaggcggaaggaaaacccccacgtgcggtacatcgagcagacccataccaagctggaacacagcgtgtgtgccaacgagatgagaaaggtgtccaagtcctccacccatccccagcacaaccctaacgaaaatgagatcctggtggctgatacctacgaccagtctcagagccctatggccaaggcccacggcaccagctcttatacccctgataagagctccttcaacctggccaccgtggtggccgagacactgggcctgggcgtgcaggaggaaagcgagacacagggcccaatgagccctctgggagatgagctgtaccactgcctggaaggcaaccacaagaaacagccttttgagtccggctccgagactcctggaacaagcgagagcgctacacctgagggcagccctaagagaaaggtgtccagcgccgagggcgctgccaaggaagagcctaaacggagaagcgccagactgagcgccaagccccccgccaaggtggaagccaagcctaagaaggccgccgctaaggacaagagcagcgataagaaagtccagaccaagggcaagcggggcgccaaaggcaaacaggccgaggtggccaaccaggagacaaaggaagatctgcctgctgagaacggcgaaaccaagaccgaggaatctccagcttctgacgaggccggagagaaggaggccaaaagcgacagcggctctgagacacctggaacaagcgagagcgccaccccggaatcctatgaacaacttgcaccacaaccgtgtgtgggagaaactttacattctagcctcccacgagacagtgaactgtttgtgcctgaagaggggagcagcgagaaggagagcgaggacgcgccaaaaacatctcctccgacgcctgggaaacatggtttggaacagactggggaggaaaaagtgatggtgactgttcctgacaaaaatccaccttgtccttgctgtggtacccgggtaaactctgtgttgaatctgattgaacatctgaaagtgtcacacgggaaaaggggggtttgttttcggtgtgcaaaatgtggaaaggaaaatagtaactatcacagtgttgtttgtcattttaagaaatgcaggggtccagagacggagaaagccccagctggggagtggatttgtgaggtatgcaacagagattttacaaccaaaattggcctgggacaacacaagagattggcacacccagcagtgagaaatcaggaaaggatcgttgcttcccaaccgaaagaaacatcaaatagaggtgctcacaaaaggtgctggacaaaggaggaggaagaattactaataagactggaggctcagttcgagggaaacaaaaatattaataagcttattgcagaacacataaccaccaaaacagctaagcagatcagtgacaaaaggcgattgctgtccagaaagccagcagaggagccacgtgaggagcctggaacgtgtcatcacaccaggagagcagctgcgagcctgagaacggagcctgagatgagtcatcacgcccaggcagaggacagagataatggacctgggagacgccctctgccaggcagggcagctgccggagggagaacaatggacgagataagacgccaccctgataagggcaacggacagcagagacccaccaagcaaaaatcagaagaacagctgcaggcttactataaaaagacactagaggaacgactttcagctggggcacttaacaccttcccccgagcattcaagcaggtaatggaaggccgggatataaagctagtaatcaatcagacagcgcaggactgcttcggatgcctggaatccataagccaaataagaacggcaacccgagataaaaaggacacggtgacccgggagaaacacccaaagaaaccttttcagaagtggatgaagaagagagcaatcaaaaaaggtaattatcttcggttccagcgtttattttatcttgatagagggaaactggctaaaatcattttagatgatattgaatgcttgtcttgtgacataccactcagtgaaatttattcggtttttaaaacaagatgggaaacaactggtagctttaaaagccttggggactttaaaacttacgggaaggctgacaacactgccttcagagaattaattacggctaaagaaattgagaaaaatgtgcaggaaatgagcaaaggctcggctcccggtccagacgggattactcttggggacgtcgtaaagatggatcccgagttttcccggaccatggagattttcaatttatggttaacaactggtaaaatcccggacatggtgagggggtgcagaaccgttttgattccaaaatcatcaaagccggatcgtttgaaagacattaataactggagacctatcacgatcggttccatcttgctgagactgttctccaggattgtaacagctaggctgagcaaagcgtgccccctgaacccaaggcaaagaggctttatcagagcggcgggatgctctgaaaacttaaaactcctgcaaactataatttggtcggccaaaagagaacacagaccactgggtgttgtattcgtggacatcgccaaggcttttgacaccgtaagccaccagcacatcattcatgctttgcagcaaagagaggtggatccccacatcgtcggtctggtgagcaatatgtacaagaacatcagtacgtatatcaccacaaagaggaacacacacacagacaaaatccagatccgggttggagtaaagcagggtgacccgatgtcgccccttttatttaacctggcaatggaccctctattatgcaagctggaagagagtggcaaaggataccaccgaggacagagcagcatcacagcgatggcatttgcagacgatctggttttgctgagcgactcctgggaaaatatgaatacaaatattagcatactggagaccttctgcaatctgaccggactcaaaacacaggggcaaaagtgccacggcttttacatcaagccgacaaagaagtcttacaccatcaatgactgcgctgcctggactatcaacggcacacccctgaacatgatcgaccccggcgaatctgagaaatacctcggcctgcagtttgacccgtggattggaatagcaaggtccggtctctccacaaaactagatttttggcttcagcggatcgatcaagcaccacttaaacctctgcagaaaactgatattctcaaaacatacaccatccctcggctgatctacatagctgaccactcagaagtgaaaagcgcactactcgaaacccttgaccagaagatccggacagcggtcaaggaatggcttcacctacctccgtgcacctgcgatgccatcctgtactcgagcacgagagacggcggtttgggcatcaccaaattggcaggactgatccccagcgtgcaggcccgtagactgcatcggatcgcacagtcatctgacgatacgatgaaatgcttcatggaaaaagagaaaatggaacagctgcataagaaattgtggattcaagctggaggggacagagagaacataccctcgatttgggaagcaccaccgtcgagtgaaccaccaaacaacgtgagcacaaattcggaatgggaagcaccgacccagaaagataaatttccaaagccttgcaattggaggaaaaacgaattcaaaaaatggaccaaattggcatcccaaggccgcggaattgtaaattttgaaagagacaaaattagtaaccattggatccaatactacagacgcatacctcacaggaaactcctcactgcactacaactcagggccaacgtttaccccacgagagaatttctagccaggggtagacaagaccaatacatcaaggcgtgtaggcactgcgatgcggacaacgaatcctgcgcccacatcatcggcaactgcccagtgacacaggacgcccgaatcaagaggcacaattacatctgcgaactgcttctcgaggaggcgaagaagaaggactgggtagtgttcaaggaaccgcacataagggattccaacaaggaactgtacaaacctgacctgatatttgtgaaggatgggcgtgcacttgtcgtggatgtgacagtacggtatgaagcagccaaatcatcgctggaggaagccgctgcagagaaagtgagaaagtacaaacacctggaaacggaagtaagacatctcacgaatgcaaaggacgttacttttgtgggctttcccctaggagcgcgggggaaatggcaccaagataactttaaacttttgactgagcttggcctctccaaatcgaggcaagtgaaaatggcagagactttttccacagtagcgctcttttcatctgtggacattgtacatatgtttgccagtagggccagaaaatctatggttatgtgataataggctgccttctgcggggcttgccttctggccatgcccttcttctctcccttgcacctgtacctcttggtctttgaataaagcctgagtaggaaggaccggtaaaaaaaaaaaaaaaaaaaaaaaaaaaaaaacgttgactaaaaaaaaaaaaaaaaaaaaaaaaaaaaaaaaaaaaaaaaaaaaaaaaaaaaaaaaaaaaaaaaaaaaaa

SEQ ID NO: 10804 - DNA, 5264 bp, synthetic construct
  source 1..5264: mol_type = other DNA
gaaataagagagaaaagaagagtaagaagaaatataagagaattcgccaccatggcccctaagaaaaagcggaaggtgaatatcagcggctctagctgcggcagccccaacagcgccgacaccagcagcgacttcaaggacctgtggaccaagctgaaggaatgccacgaccgggaagtgcagggactccaggtgaaggtcaccaaactcaagcaagaaagaatcctggacgcccagagactggaagaattcttcaccaagaaccagcagctgagagagcagcagaaagtgctgcacgagacaatcaaggttctggaagatagactgcgggccggcctgtgcgacagatgcgccgtgaccgaggaacacatgcgcaaaaagcagcaggagttcgagaacattagacagcaaaatctgaaattgatcacagagctgatgaacgagagaaacacactgcaggaggagaacaagaagctgagcgagcagctgcaacagaagatcgagaatgatcagcaacaccaggccgctgagctggaatgtgaagaggacgtgatccccgacagcccaatcacagctttcagcttttctggcgtgaacagactgaggcggaaggaaaacccccacgtgcggtacatcgagcagacccataccaagctggaacacagcgtgtgtgccaacgagatgagaaaggtgtccaagtcctccacccatccccagcacaaccctaacgaaaatgagatcctggtggctgatacctacgaccagtctcagagccctatggccaaggcccacggcaccagctcttatacccctgataagagctccttcaacctggccaccgtggtggccgagacactgggcctgggcgtgcaggaggaaagcgagacacagggcccaatgagccctctgggagatgagctgtaccactgcctggaaggcaaccacaagaaacagccttttgagtccggctccgagactcctggaacaagcgagagcgctacacctgagggcagccctaagagaaaggtgtccagcgccgagggcgctgccaaggaagagcctaaacggagaagcgccagactgagcgccaagccccccgccaaggtggaagccaagcctaagaaggccgccgctaaggacaagagcagcgataagaaagtccagaccaagggcaagcggggcgccaaaggcaaacaggccgaggtggccaaccaggagacaaaggaagatctgcctgctgagaacggcgaaaccaagaccgaggaatctccagcttctgacgaggccggagagaaggaggccaaaagcgacagcggctctgagacacctggaacaagcgagagcgccaccccggaatcctatgaacaacttgcaccacaaccgtgtgtgggagaaactttacattctagcctcccacgagacagtgaactgtttgtgcctgaagaggggagcagcgagaaggagagcgaggacgcgccaaaaacatctcctccgacgcctgggaaacatggtttggaacagactggggaggaaaaagtgatggtgactgttcctgacaaaaatccaccttgtccttgctgtggtacccgggtaaactctgtgttgaatctgattgaacatctgaaagtgtcacacgggaaaaggggggtttgttttcggtgtgcaaaatgtggaaaggaaaatagtaactatcacagtgttgtttgtcattttaagaaatgcaggggtccagagacggagaaagccccagctggggagtggatttgtgaggtatgcaacagagattttacaaccaaaattggcctgggacaacacaagagattggcacacccagcagtgagaaatcaggaaaggatcgttgcttcccaaccgaaagaaacatcaaatagaggtgctcacaaaaggtgctggacaaaggaggaggaagaattactaataagactggaggctcagttcgagggaaacaaaaatattaataagcttattgcagaacacataaccaccaaaacagctaagcagatcagtgacaaaaggcgattgctgtccagaaagccagcagaggagccacgtgaggagcctggaacgtgtcatcacaccaggagagcagctgcgagcctgagaacggagcctgagatgagtcatcacgcccaggcagaggacagagataatggacctgggagacgccctctgccaggcagggcagctgccggagggagaacaatggacgagataagacgccaccctgataagggcaacggacagcagagacccaccaagcaaaaatcagaagaacagctgcaggcttactataaaaagacactagaggaacgactttcagctggggcacttaacaccttcccccgagcattcaagcaggtaatggaaggccgggatataaagctagtaatcaatcagacagcgcaggactgcttcggatgcctggaatccataagccaaataagaacggcaacccgagataaaaaggacacggtgacccgggagaaacacccaaagaaaccttttcagaagtggatgaagaagagagcaatcaaaaaaggtaattatcttcggttccagcgtttattttatcttgatagagggaaactggctaaaatcattttagatgatattgaatgcttgtcttgtgacataccactcagtgaaatttattcggtttttaaaacaagatgggaaacaactggtagctttaaaagccttggggactttaaaacttacgggaaggctgacaacactgccttcagagaattaattacggctaaagaaattgagaaaaatgtgcaggaaatgagcaaaggctcggctcccggtccagacgggattactcttggggacgtcgtaaagatggatcccgagttttcccggaccatggagattttcaatttatggttaacaactggtaaaatcccggacatggtgagggggtgcagaaccgttttgattccaaaatcatcaaagccggatcgtttgaaagacattaataactggagacctatcacgatcggttccatcttgctgagactgttctccaggattgtaacagctaggctgagcaaagcgtgccccctgaacccaaggcaaagaggctttatcagagcggcgggatgctctgaaaacttaaaactcctgcaaactataatttggtcggccaaaagagaacacagaccactgggtgttgtattcgtggacatcgccaaggcttttgacaccgtaagccaccagcacatcattcatgctttgcagcaaagagaggtggatccccacatcgtcggtctggtgagcaatatgtacgagaacatcagtacgtatatcaccacaaagaggaacacacacacagacaaaatccagatccgggttggagtaaagcagggtgacccgatgtcgccccttttatttaacctggcaatggaccctctattatgcaagctggaagagagtggcaaaggataccaccgaggacagagcagcatcacagcgatggcatttgcagacgatctggttttgctgagcgactcctgggaaaatatgaatacaaatattagcatactggagaccttctgcaatctgaccggactcaaaacacaggggcaaaagtgccacggcttttacatcaagccgacaaagaagtcttacaccatcaatgactgcgctgcctggactatcaacggcacacccctgaacatgatcgaccccggcgaatctgagaaatacctcggcctgcagatcgacccgtggattggaatagcaaggtccggtctctccacaaaactagatttttggcttcagcggatcgatcaagcaccacttaaacctctgcagaaaactgatattctcaaaacatacaccatccctcggctgatctacatagctgaccactcagaagtgaaaagcgcactactcgaaacccttgaccagaagatccggacagcggtcaaggaatggcttcacctacctccgtgcacctgcgatgccatcctgtactcgagcacgagagacggcggtttgggcatcaccaaattggcaggactgatccccagcgtgcaggcccgtagactgcatcggatcgcacagtcatctgacgatacgatgaaatgcttcatggaaaaagagaaaatggaacagctgcataagaaattgtggattcaagctggaggggacagagagaacataccctcgatttgggaagcaccaccgtcgagtgaaccaccaaacaacgtgagcacaaattcggaatgggaagcaccgacccagaaagataaatttccaaagccttgcaattggaggaaaaacgaattcaaaaaatggaccaaattggcatcccaaggccgcggaattgtaaattttgaaagagacaaaattagtaaccattggatccaatactacagacgcatacctcacaggaaactcctcactgcactacaactcagggccaacgtttaccccacgagagaatttctagccaggggtagacaagaccaatacatcaaggcgtgtaggcactgcgatgcggacaacgaatcctgcgcccacatcatcggcaactgcccagtgacacaggacgcccgaatcaagaggcacaattacatctgcgaactgcttctcgaggaggcgaagaagaaggactgggtagtgttcaaggaaccgcacataagggattccaacaaggaactgtacaaacctgacctgatatttgtgaaggatgggcgtgcacttgtcgtggatgtgacagtacggtatgaagcagccaaatcatcgctggaggaagccgctgcagagaaagtgagaaagtacaaacacctggaaacggaagtaagacatctcacgaatgcaaaggacgttacttttgtgggctttcccctaggagcgcgggggaaatggcaccaagataactttaaacttttgactgagcttggcctctccaaatcgaggcaagtgaaaatggcagagactttttccacagtagcgctcttttcatctgtggacattgtacatatgtttgccagtagggccagaaaatctatggttatgtgataataggctgccttctgcggggcttgccttctggccatgcccttcttctctcccttgcacctgtacctcttggtctttgaataaagcctgagtaggaaggaccggtaaaaaaaaaaaaaaaaaaaaaaaaaaaaaaacgttgactaaaaaaaaaaaaaaaaaaaaaaaaaaaaaaaaaaaaaaaaaaaaaaaaaaaaaaaaaaaaaaaaaaaaaa

SEQ ID NO: 10805 - DNA, 5264 bp, synthetic construct
  source 1..5264: mol_type = other DNA
gaaataagagagaaaagaagagtaagaagaaatataagagaattcgccaccatggcccctaagaaaaagcggaaggtgaatatcagcggctctagctgcggcagccccaacagcgccgacaccagcagcgacttcaaggacctgtggaccaagctgaaggaatgccacgaccgggaagtgcagggactccaggtgaaggtcaccaaactcaagcaagaaagaatcctggacgcccagagactggaagaattcttcaccaagaaccagcagctgagagagcagcagaaagtgctgcacgagacaatcaaggttctggaagatagactgcgggccggcctgtgcgacagatgcgccgtgaccgaggaacacatgcgcaaaaagcagcaggagttcgagaacattagacagcaaaatctgaaattgatcacagagctgatgaacgagagaaacacactgcaggaggagaacaagaagctgagcgagcagctgcaacagaagatcgagaatgatcagcaacaccaggccgctgagctggaatgtgaagaggacgtgatccccgacagcccaatcacagctttcagcttttctggcgtgaacagactgaggcggaaggaaaacccccacgtgcggtacatcgagcagacccataccaagctggaacacagcgtgtgtgccaacgagatgagaaaggtgtccaagtcctccacccatccccagcacaaccctaacgaaaatgagatcctggtggctgatacctacgaccagtctcagagccctatggccaaggcccacggcaccagctcttatacccctgataagagctccttcaacctggccaccgtggtggccgagacactgggcctgggcgtgcaggaggaaagcgagacacagggcccaatgagccctctgggagatgagctgtaccactgcctggaaggcaaccacaagaaacagccttttgagtccggctccgagactcctggaacaagcgagagcgctacacctgagggcagccctaagagaaaggtgtccagcgccgagggcgctgccaaggaagagcctaaacggagaagcgccagactgagcgccaagccccccgccaaggtggaagccaagcctaagaaggccgccgctaaggacaagagcagcgataagaaagtccagaccaagggcaagcggggcgccaaaggcaaacaggccgaggtggccaaccaggagacaaaggaagatctgcctgctgagaacggcgaaaccaagaccgaggaatctccagcttctgacgaggccggagagaaggaggccaaaagcgacagcggctctgagacacctggaacaagcgagagcgccaccccggaatcctatgaacaacttgcaccacaaccgtgtgtgggagaaactttacattctagcctcccacgagacagtgaactgtttgtgcctgaagaggggagcagcgagaaggagagcgaggacgcgccaaaaacatctcctccgacgcctgggaaacatggtttggaacagactggggaggaaaaagtgatggtgactgttcctgacaaaaatccaccttgtccttgctgtggtacccgggtaaactctgtgttgaatctgattgaacatctgaaagtgtcacacgggaaaaggggggtttgttttcggtgtgcaaaatgtggaaaggaaaatagtaactatcacagtgttgtttgtcattttaagaaatgcaggggtccagagacggagaaagccccagctggggagtggatttgtgaggtatgcaacagagattttacaaccaaaattggcctgggacaacacaagagattggcacacccagcagtgagaaatcaggaaaggatcgttgcttcccaaccgaaagaaacatcaaatagaggtgctcacaaaaggtgctggacaaaggaggaggaagaattactaataagactggaggctcagttcgagggaaacaaaaatattaataagcttattgcagaacacataaccaccaaaacagctaagcagatcagtgacaaaaggcgattgctgtccagaaagccagcagaggagccacgtgaggagcctggaacgtgtcatcacaccaggagagcagctgcgagcctgagaacggagcctgagatgagtcatcacgcccaggcagaggacagagataatggacctgggagacgccctctgccaggcagggcagctgccggagggagaacaatggacgagataagacgccaccctgataagggcaacggacagcagagacccaccaagcaaaaatcagaagaacagctgcaggcttactataaaaagacactagaggaacgactttcagctggggcacttaacaccttcccccgagcattcaagcaggtaatggaaggccgggatataaagctagtaatcaatcagacagcgcaggactgcttcggatgcctggaatccataagccaaataagaacggcaacccgagataaaaaggacacggtgacccgggagaaacacccaaagaaaccttttcagaagtggatgaagaagagagcaatcaaaaaaggtaattatcttcggttccagcgtttattttatcttgatagagggaaactggctaaaatcattttagatgatattgaatgcttgtcttgtgacataccactcagtgaaatttattcggtttttaaaacaagatgggaaacaactggtagctttaaaagccttggggactttaaaacttacgggaaggctgacaacactgccttcagagaattaattacggctaaagaaattgagaaaaatgtgcaggaaatgagcaaaggctcggctcccggtccagacgggattactcttggggacgtcgtaaagatggatcccgagttttcccggaccatggagattttcaatttatggttaacaactggtaaaatcccggacatggtgagggggtgcagaaccgttttgattccaaaatcatcaaagccggatcgtttgaaagacattaataactggagacctatcacgatcggttccatcttgctgagactgttctccaggattgtaacagctaggctgagcaaagcgtgccccctgaacccaaggcaaagaggctttatcagagcggcgggatgctctgaaaacttaaaactcctgcaaactataatttggtcggccaaaagagaacacagaccactgggtgttgtattcgtggacatcgccaaggcttttgacaccgtaagccaccagcacatcattcatgctttgcagcaaagagaggtggatccccacatcgtcggtctggtgagcaatatgtacgagaacatcagtacgtatatcaccacaaagaggaacacacacacagacaaaatccagatccgggttggagtaaagcagggtgacccgatgtcgccccttttatttaacctggcaatggaccctctattatgcaagctggaagagagtggcaaaggataccaccgaggacagagcagcatcacagcgatggcatttgcagacgatctggttttgctgagcgactcctgggaaaatatgaatacaaatattagcatactggagaccttctgcaatctgaccggactcaaaacacaggggcaaaagtgccacggcttttacatcaagccgacaaagaagtcttacaccatcaatgactgcgctgcctggactatcaacggcacacccctgaacatgatcgaccccggcgaatctgagaaatacctcggcctgcagtttgacccgtggattggaatagcaaggtccggtctctccacaaaactagatttttggcttcagcggatcgatcaagcaccacttaaacctctgcagaaaactgatattctcaaaacatacaccatccctcggctgatctacatagctgaccactcagaagtgaaaagcgcactactcgaaacccttgaccagaagatccggacagcggtcaaggaatggcttcacctacctccgtgcacctgcgatgccatcctgtactcgagcacgagagacggcggtttgggcatcaccaaattggcaggactgatccccagcgtgcaggcccgtagactgcatcggatcgcacagtcatctgacgatacgatgaaatgcttcatggaaaaagagaaaatggaacagctgcataagaaattgtggattcaagctggaggggacagagagaacataccctcgatttgggaagcaccaccgtcgagtgaaccaccaaacaacgtgagcacaaattcggaatgggaagcaccgacccagaaagataaatttccaaagccttgcaattggaggaaaaacgaattcaaaaaatggaccaaattggcatcccaaggccgcggaattgtaaattttgaaagagacaaaattagtaaccattggatccaatactacagacgcatacctcacaggaaactcctcactgcactacaactcagggccaacgtttaccccacgagagaatttctagccaggggtagacaagaccaatacatcaaggcgtgtaggcactgcgatgcggacaacgaatcctgcgcccacatcatcggcaactgcccagtgacacaggacgcccgaatcaagaggcacaattacatctgcgaactgcttctcgaggaggcgaagaagaagggctgggtagtgttcaaggaaccgcacataagggattccaacaaggaactgtacaaacctgacctgatatttgtgaaggatgggcgtgcacttgtcgtggatgtgacagtacggtatgaagcagccaaatcatcgctggaggaagccgctgcagagaaagtgagaaagtacaaacacctggaaacggaagtaagacatctcacgaatgcaaaggacgttacttttgtgggctttcccctaggagcgcgggggaaatggcaccaagataactttaaacttttgactgagcttggcctctccaaatcgaggcaagtgaaaatggcagagactttttccacagtagcgctcttttcatctgtggacattgtacatatgtttgccagtagggccagaaaatctatggttatgtgataataggctgccttctgcggggcttgccttctggccatgcccttcttctctcccttgcacctgtacctcttggtctttgaataaagcctgagtaggaaggaccggtaaaaaaaaaaaaaaaaaaaaaaaaaaaaaaacgttgactaaaaaaaaaaaaaaaaaaaaaaaaaaaaaaaaaaaaaaaaaaaaaaaaaaaaaaaaaaaaaaaaaaaaaa

SEQ ID NO: 10806 - DNA, 5264 bp, synthetic construct
  source 1..5264: mol_type = other DNA
gaaataagagagaaaagaagagtaagaagaaatataagagaattcgccaccatggcccctaagaaaaagcggaaggtgaatatcagcggctctagctgcggcagccccaacagcgccgacaccagcagcgacttcaaggacctgtggaccaagctgaaggaatgccacgaccgggaagtgcagggactccaggtgaaggtcaccaaactcaagcaagaaagaatcctggacgcccagagactggaagaattcttcaccaagaaccagcagctgagagagcagcagaaagtgctgcacgagacaatcaaggttctggaagatagactgcgggccggcctgtgcgacagatgcgccgtgaccgaggaacacatgcgcaaaaagcagcaggagttcgagaacattagacagcaaaatctgaaattgatcacagagctgatgaacgagagaaacacactgcaggaggagaacaagaagctgagcgagcagctgcaacagaagatcgagaatgatcagcaacaccaggccgctgagctggaatgtgaagaggacgtgatccccgacagcccaatcacagctttcagcttttctggcgtgaacagactgaggcggaaggaaaacccccacgtgcggtacatcgagcagacccataccaagctggaacacagcgtgtgtgccaacgagatgagaaaggtgtccaagtcctccacccatccccagcacaaccctaacgaaaatgagatcctggtggctgatacctacgaccagtctcagagccctatggccaaggcccacggcaccagctcttatacccctgataagagctccttcaacctggccaccgtggtggccgagacactgggcctgggcgtgcaggaggaaagcgagacacagggcccaatgagccctctgggagatgagctgtaccactgcctggaaggcaaccacaagaaacagccttttgagtccggctccgagactcctggaacaagcgagagcgctacacctgagggcagccctaagagaaaggtgtccagcgccgagggcgctgccaaggaagagcctaaacggagaagcgccagactgagcgccaagccccccgccaaggtggaagccaagcctaagaaggccgccgctaaggacaagagcagcgataagaaagtccagaccaagggcaagcggggcgccaaaggcaaacaggccgaggtggccaaccaggagacaaaggaagatctgcctgctgagaacggcgaaaccaagaccgaggaatctccagcttctgacgaggccggagagaaggaggccaaaagcgacagcggctctgagacacctggaacaagcgagagcgccaccccggaatcctatgaacaacttgcaccacaaccgtgtgtgggagaaactttacattctagcctcccacgagacagtgaactgtttgtgcctgaagaggggagcagcgagaaggagagcgaggacgcgccaaaaacatctcctccgacgcctgggaaacatggtttggaacagactggggaggaaaaagtgatggtgactgttcctgacaaaaatccaccttgtccttgctgtggtacccgggtaaactctgtgttgaatctgattgaacatctgaaagtgtcacacgggaaaaggggggtttgttttcggtgtgcaaaatgtggaaaggaaaatagtaactatcacagtgttgtttgtcattttaagaaatgcaggggtccagagacggagaaagccccagctggggagtggatttgtgaggtatgcaacagagattttacaaccaaaattggcctgggacaacacaagagattggcacacccagcagtgagaaatcaggaaaggatcgttgcttcccaaccgaaagaaacatcaaatagaggtgctcacaaaaggtgctggacaaaggaggaggaagaattactaataagactggaggctcagttcgagggaaacaaaaatattaataagcttattgcagaacacataaccaccaaaacagctaagcagatcagtgacaaaaggcgattgctgtccagaaagccagcagaggagccacgtgaggagcctggaacgtgtcatcacaccaggagagcagctgcgagcctgagaacggagcctgagatgagtcatcacgcccaggcagaggacagagataatggacctgggagacgccctctgccaggcagggcagctgccggagggagaacaatggacgagataagacgccaccctgataagggcaacggacagcagagacccaccaagcaaaaatcagaagaacagctgcaggcttactataaaaagacactagaggaacgactttcagctggggcacttaacaccttcccccgagcattcaagcaggtaatggaaggccgggatataaagctagtaatcaatcagacagcgcaggactgcttcggatgcctggaatccataagccaaataagaacggcaacccgagataaaaaggacacggtgacccgggagaaacacccaaagaaaccttttcagaagtggatgaagaagagagcaatcaaaaaaggtaattatcttcggttccagcgtttattttatcttgatagagggaaactggctaaaatcattttagatgatattgaatgcttgtcttgtgacataccactcagtgaaatttattcggtttttaaaacaagatgggaaacaactggtagctttaaaagccttggggactttaaaacttacgggaaggctgacaacactgccttcagagaattaattacggctaaagaaattgagaaaaatgtgcaggaaatgagcaaaggctcggctcccggtccagacgggattactcttggggacgtcgtaaagatggatcccgagttttcccggaccatggagattttcaatttatggttaacaactggtaaaatcccggacatggtgagggggtgcagaaccgttttgattccaaaatcatcaaagccggatcgtttgaaagacattaataactggagacctatcacgatcggttccatcttgctgagactgttctccaggattgtaacagctaggctgagcaaagcgtgccccctgaacccaaggcaaagaggctttatcagagcggcgggatgctctgaaaacttaaaactcctgcaaactataatttggtcggccaaaagagaacacagaccactgggtgttgtattcgtggacatcgccaaggcttttgacaccgtaagccaccagcacatcattcatgctttgcagcaaagagaggtggatccccacatcgtcggtctggtgagcaatatgtacgagaacatcagtacgtatatcaccacaaagaggaacacacacacagacaaaatccagatccgggttggagtaaagcagggtgacccgatgtcgccccttttatttaacctggcaatggaccctctattatgcaagctggaagagagtggcaaaggataccaccgaggacagagcagcatcacagcgatggcatttgcagacgatctggttttgctgagcgactcctgggaaaatatgaatacaaatattagcatactggagaccttctgcaatctgaccggactcaaaacacaggggcaaaagtgccacggcttttacatcaagccgacaaagaagtcttacaccatcaatgactgcgctgcctggactatcaacggcacacccctgaacatgatcgaccccggcgaatctgagaaatacctcggcctgcagtttgacccgtggattggaatagcaaggtccggtctctccacaaaactagatttttggcttcagcggatcgatcaagcaccacttaaacctctgcagaaaactgatattctcaaaacatacaccatccctcggctgatctacatagctgaccactcagaagtgaaaagcgcactactcgaaacccttgaccagaagatccggacagcggtcaaggaatggcttcacctacctccgtgcacctgcgatgccatcctgtactcgagcacgagagacggcggtttgggcatcaccaaattggcaggactgatccccagcgtgcaggcccgtagactgcatcggatcgcacagtcatctgacgatacgatgaaatgcttcatggaaaaagagaaaatggaacagctgcataagaaattgtggattcaagctggaggggacagagagaacataccctcgatttgggaagcaccaccgtcgagtgaaccaccaaacaacgtgagcacaaattcggaatgggaagcaccgacccagaaagataaatttccaaagccttgcaattggaggaaaaacgaattcaaaaaatggaccaaattggcatcccaaggccgcggaattgtaaattttgaaagagacaaaattagtaaccattggatccaatactacagacgcatacctcagaggaaactcctcactgcactacaactcagggccaacgtttaccccacgagagaatttctagccaggggtagacaagaccaatacatcaaggcgtgtaggcactgcgatgcggacaacgaatcctgcgcccacatcatcggcaactgcccagtgacacaggacgcccgaatcaagaggcacaattacatctgcgaactgcttctcgaggaggcgaagaagaaggactgggtagtgttcaaggaaccgcacataagggattccaacaaggaactgtacaaacctgacctgatatttgtgaaggatgggcgtgcacttgtcgtggatgtgacagtacggtatgaagcagccaaatcatcgctggaggaagccgctgcagagaaagtgagaaagtacaaacacctggaaacggaagtaagacatctcacgaatgcaaaggacgttacttttgtgggctttcccctaggagcgcgggggaaatggcaccaagataactttaaacttttgactgagcttggcctctccaaatcgaggcaagtgaaaatggcagagactttttccacagtagcgctcttttcatctgtggacattgtacatatgtttgccagtagggccagaaaatctatggttatgtgataataggctgccttctgcggggcttgccttctggccatgcccttcttctctcccttgcacctgtacctcttggtctttgaataaagcctgagtaggaaggaccggtaaaaaaaaaaaaaaaaaaaaaaaaaaaaaaacgttgactaaaaaaaaaaaaaaaaaaaaaaaaaaaaaaaaaaaaaaaaaaaaaaaaaaaaaaaaaaaaaaaaaaaaaa

SEQ ID NO: 10807 - DNA, 5264 bp, synthetic construct
  source 1..5264: mol_type = other DNA
gaaataagagagaaaagaagagtaagaagaaatataagagaattcgccaccatggcccctaagaaaaagcggaaggtgaatatcagcggctctagctgcggcagccccaacagcgccgacaccagcagcgacttcaaggacctgtggaccaagctgaaggaatgccacgaccgggaagtgcagggactccaggtgaaggtcaccaaactcaagcaagaaagaatcctggacgcccagagactggaagaattcttcaccaagaaccagcagctgagagagcagcagaaagtgctgcacgagacaatcaaggttctggaagatagactgcgggccggcctgtgcgacagatgcgccgtgaccgaggaacacatgcgcaaaaagcagcaggagttcgagaacattagacagcaaaatctgaaattgatcacagagctgatgaacgagagaaacacactgcaggaggagaacaagaagctgagcgagcagctgcaacagaagatcgagaatgatcagcaacaccaggccgctgagctggaatgtgaagaggacgtgatccccgacagcccaatcacagctttcagcttttctggcgtgaacagactgaggcggaaggaaaacccccacgtgcggtacatcgagcagacccataccaagctggaacacagcgtgtgtgccaacgagatgagaaaggtgtccaagtcctccacccatccccagcacaaccctaacgaaaatgagatcctggtggctgatacctacgaccagtctcagagccctatggccaaggcccacggcaccagctcttatacccctgataagagctccttcaacctggccaccgtggtggccgagacactgggcctgggcgtgcaggaggaaagcgagacacagggcccaatgagccctctgggagatgagctgtaccactgcctggaaggcaaccacaagaaacagccttttgagtccggctccgagactcctggaacaagcgagagcgctacacctgagggcagccctaagagaaaggtgtccagcgccgagggcgctgccaaggaagagcctaaacggagaagcgccagactgagcgccaagccccccgccaaggtggaagccaagcctaagaaggccgccgctaaggacaagagcagcgataagaaagtccagaccaagggcaagcggggcgccaaaggcaaacaggccgaggtggccaaccaggagacaaaggaagatctgcctgctgagaacggcgaaaccaagaccgaggaatctccagcttctgacgaggccggagagaaggaggccaaaagcgacagcggctctgagacacctggaacaagcgagagcgccaccccggaatcctatgaacaacttgcaccacaaccgtgtgtgggagaaactttacattctagcctcccacgagacagtgaactgtttgtgcctgaagaggggagcagcgagaaggagagcgaggacgcgccaaaaacatctcctccgacgcctgggaaacatggtttggaacagactggggaggaaaaagtgatggtgactgttcctgacaaaaatccaccttgtccttgctgtggtacccgggtaaactctgtgttgaatctgattgaacatctgaaagtgtcacacgggaaaaggggggtttgttttcggtgtgcaaaatgtggaaaggaaaatagtaactatcacagtgttgtttgtcattttaagaaatgcaggggtccagagacggagaaagccccagctggggagtggatttgtgaggtatgcaacagagattttacaaccaaaattggcctgggacaacacaagagattggcacacccagcagtgagaaatcaggaaaggatcgttgcttcccaaccgaaagaaacatcaaatagaggtgctcacaaaaggtgctggacaaaggaggaggaagaattactaataagactggaggctcagttcgagggaaacaaaaatattaataagcttattgcagaacacataaccaccaaaacagctaagcagatcagtgacaaaaggcgattgctgtccagaaagccagcagaggagccacgtgaggagcctggaacgtgtcatcacaccaggagagcagctgcgagcctgagaacggagcctgagatgagtcatcacgcccaggcagaggacagagataatggacctgggagacgccctctgccaggcagggcagctgccggagggagaacaatggacgagataagacgccaccctgataagggcaacggacagcagagacccaccaagcaaaaatcagaagaacagctgcaggcttactataaaaagacactagaggaacgactttcagctggggcacttaacaccttcccccgagcattcaagcaggtaatggaaggccgggatataaagctagtaatcaatcagacagcgcaggactgcttcggatgcctggaatccataagccaaataagaacggcaacccgagataaaaaggacacggtgacccgggagaaacacccaaagaaaccttttcagaagtggatgaagaagagagcaatcaaaaaaggtaattatcttcggttccagcgtttattttatcttgatagagggaaactggctaaaatcattttagatgatattgaatgcttgtcttgtgacataccactcagtgaaatttattcggtttttaaaacaagatgggaaacaactggtagctttaaaagccttggggactttaaaacttacgggaaggctgacaacactgccttcagagaattaattacggctaaagaaattgagaaaaatgtgcaggaaatgagcaaaggctcggctcccggtccagacgggattactcttggggacgtcgtaaagatggatcccgagttttcccggaccatggagattttcaatttatggttaacaactggtaaaatcccggacatggtgagggggtgcagaaccgttttgattccaaaatcatcaaagccggatcgtttgaaagacattaataactggagacctatcacgatcggttccatcttgctgagactgttctccaggattgtaacagctaggctgagcaaagcgtgccccctgaacccaaggcaaagaggctttatcagagcggcgggatgctctgaaaacttaaaactcctgcaaactataatttggtcggccaaaagagaacacagaccactgggtgttgtattcgtggacatcgccaaggcttttgacaccgtaagccaccagcacatcattcatgctttgcagcaaagagaggtggatccccacatcgtcggtctggtgagcaatatgtacgagaacatcagtacgtatatcaccacaaagaggaacacacacacagacaaaatccagatccgggttggagtaaagcagggtgacccgatgtcgccccttttatttaacctggcaatggaccctctattatgcaagctggaagagagtggcaaaggataccaccgaggacagagcagcatcacagcgatggcatttgcagacgatctggttttgctgagcgactcctgggaaaatatgaatacaaatattagcatactggagaccttctgcaatctgaccggactcaaaacacaggggcaaaagtgccacggcttttacatcaagccgacaaagaagtcttacaccatcaatgactgcgctgcctggactatcaacggcacacccctgaacatgatcgaccccggcgaatctgagaaatacctcggcctgcagtttgacccgtggattggaatagcaaggtccggtctctccacaaaactagatttttggcttcagcggatcgatcaagcaccacttaaacctctgcagaaaactgatattctcaaaacatacgccatccctcggctgatctacatagctgaccactcagaagtgaaaagcgcactactcgaaacccttgaccagaagatccggacagcggtcaaggaatggcttcacctacctccgtgcacctgcgatgccatcctgtactcgagcacgagagacggcggtttgggcatcaccaaattggcaggactgatccccagcgtgcaggcccgtagactgcatcggatcgcacagtcatctgacgatacgatgaaatgcttcatggaaaaagagaaaatggaacagctgcataagaaattgtggattcaagctggaggggacagagagaacataccctcgatttgggaagcaccaccgtcgagtgaaccaccaaacaacgtgagcacaaattcggaatgggaagcaccgacccagaaagataaatttccaaagccttgcaattggaggaaaaacgaattcaaaaaatggaccaaattggcatcccaaggccgcggaattgtaaattttgaaagagacaaaattagtaaccattggatccaatactacagacgcatacctcacaggaaactcctcactgcactacaactcagggccaacgtttaccccacgagagaatttctagccaggggtagacaagaccaatacatcaaggcgtgtaggcactgcgatgcggacaacgaatcctgcgcccacatcatcggcaactgcccagtgacacaggacgcccgaatcaagaggcacaattacatctgcgaactgcttctcgaggaggcgaagaagaaggactgggtagtgttcaaggaaccgcacataagggattccaacaaggaactgtacaaacctgacctgatatttgtgaaggatgggcgtgcacttgtcgtggatgtgacagtacggtatgaagcagccaaatcatcgctggaggaagccgctgcagagaaagtgagaaagtacaaacacctggaaacggaagtaagacatctcacgaatgcaaaggacgttacttttgtgggctttcccctaggagcgcgggggaaatggcaccaagataactttaaacttttgactgagcttggcctctccaaatcgaggcaagtgaaaatggcagagactttttccacagtagcgctcttttcatctgtggacattgtacatatgtttgccagtagggccagaaaatctatggttatgtgataataggctgccttctgcggggcttgccttctggccatgcccttcttctctcccttgcacctgtacctcttggtctttgaataaagcctgagtaggaaggaccggtaaaaaaaaaaaaaaaaaaaaaaaaaaaaaaacgttgactaaaaaaaaaaaaaaaaaaaaaaaaaaaaaaaaaaaaaaaaaaaaaaaaaaaaaaaaaaaaaaaaaaaaaa

SEQ ID NO: 10808 - DNA, 5264 bp, synthetic construct
  source 1..5264: mol_type = other DNA
gaaataagagagaaaagaagagtaagaagaaatataagagaattcgccaccatggcccctaagaaaaagcggaaggtgaatatcagcggctctagctgcggcagccccaacagcgccgacaccagcagcgacttcaaggacctgtggaccaagctgaaggaatgccacgaccgggaagtgcagggactccaggtgaaggtcaccaaactcaagcaagaaagaatcctggacgcccagagactggaagaattcttcaccaagaaccagcagctgagagagcagcagaaagtgctgcacgagacaatcaaggttctggaagatagactgcgggccggcctgtgcgacagatgcgccgtgaccgaggaacacatgcgcaaaaagcagcaggagttcgagaacattagacagcaaaatctgaaattgatcacagagctgatgaacgagagaaacacactgcaggaggagaacaagaagctgagcgagcagctgcaacagaagatcgagaatgatcagcaacaccaggccgctgagctggaatgtgaagaggacgtgatccccgacagcccaatcacagctttcagcttttctggcgtgaacagactgaggcggaaggaaaacccccacgtgcggtacatcgagcagacccataccaagctggaacacagcgtgtgtgccaacgagatgagaaaggtgtccaagtcctccacccatccccagcacaaccctaacgaaaatgagatcctggtggctgatacctacgaccagtctcagagccctatggccaaggcccacggcaccagctcttatacccctgataagagctccttcaacctggccaccgtggtggccgagacactgggcctgggcgtgcaggaggaaagcgagacacagggcccaatgagccctctgggagatgagctgtaccactgcctggaaggcaaccacaagaaacagccttttgagtccggctccgagactcctggaacaagcgagagcgctacacctgagggcagccctaagagaaaggtgtccagcgccgagggcgctgccaaggaagagcctaaacggagaagcgccagactgagcgccaagccccccgccaaggtggaagccaagcctaagaaggccgccgctaaggacaagagcagcgataagaaagtccagaccaagggcaagcggggcgccaaaggcaaacaggccgaggtggccaaccaggagacaaaggaagatctgcctgctgagaacggcgaaaccaagaccgaggaatctccagcttctgacgaggccggagagaaggaggccaaaagcgacagcggctctgagacacctggaacaagcgagagcgccaccccggaatcctatgaacaacttgcaccacaaccgtgtgtgggagaaactttacattctagcctcccacgagacagtgaactgtttgtgcctgaagaggggagcagcgagaaggagagcgaggacgcgccaaaaacatctcctccgacgcctgggaaacatggtttggaacagactggggaggaaaaagtgatggtgactgttcctgacaaaaatccaccttgtccttgctgtggtacccgggtaaactctgtgttgaatctgattgaacatctgaaagtgtcacacgggaaaaggggggtttgttttcggtgtgcaaaatgtggaaaggaaaatagtaactatcacagtgttgtttgtcattttaagaaatgcaggggtccagagacggagaaagccccagctggggagtggatttgtgaggtatgcaacagagattttacaaccaaaattggcctgggacaacacaagagacacgcacacccagcagtgagaaatcaggaaaggatcgttgcttcccaaccgaaagaaacatcaaatagaggtgctcacaaaaggtgctggacaaaggaggaggaagaattactaataagactggaggctcagttcgagggaaacaaaaatattaataagcttattgcagaacacataaccaccaaaacagctaagcagatcagtgacaaaaggcgattgctgtccagaaagccagcagaggagccacgtgaggagcctggaacgtgtcatcacaccaggagagcagctgcgagcctgagaacggagcctgagatgagtcatcacgcccaggcagaggacagagataatggacctgggagacgccctctgccaggcagggcagctgccggagggagaacaatggacgagataagacgccaccctgataagggcaacggacagcagagacccaccaagcaaaaatcagaagaacagctgcaggcttactataaaaagacactagaggaacgactttcagctggggcacttaacaccttcccccgagcattcaagcaggtaatggaaggccgggatataaagctagtaatcaatcagacagcgcaggactgcttcggatgcctggaatccataagccaaataagaacggcaacccgagataaaaaggacacggtgacccgggagaaacacccaaagaaaccttttcagaagtggatgaagaagagagcaatcaaaaaaggtaattatcttcggttccagcgtttattttatcttgatagagggaaactggctaaaatcattttagatgatattgaatgcttgtcttgtgacataccactcagtgaaatttattcggtttttaaaacaagatgggaaacaactggtagctttaaaagccttggggactttaaaacttacgggaaggctgacaacactgccttcagagaattaattacggctaaagaaattgagaaaaatgtgcaggaaatgagcaaaggctcggctcccggtccagacgggattactcttggggacgtcgtaaagatggatcccgagttttcccggaccatggagattttcaatttatggttaacaactggtaaaatcccggacatggtgagggggtgcagaaccgttttgattccaaaatcatcaaagccggatcgtttgaaagacattaataactggagacctatcacgatcggttccatcttgctgagactgttctccaggattgtaacagctaggctgagcaaagcgtgccccctgaacccaaggcaaagaggctttatcagagcggcgggatgctctgaaaacttaaaactcctgcaaactataatttggtcggccaaaagagaacacagaccactgggtgttgtattcgtggacatcgccaaggcttttgacaccgtaagccaccagcacatcattcatgctttgcagcaaagagaggtggatccccacatcgtcggtctggtgagcaatatgtacgagaacatcagtacgtatatcaccacaaagaggaacacacacacagacaaaatccagatccgggttggagtaaagcagggtgacccgatgtcgccccttttatttaacctggcaatggaccctctattatgcaagctggaagagagtggcaaaggataccaccgaggacagagcagcatcacagcgatggcatttgcagacgatctggttttgctgagcgactcctgggaaaatatgaatacaaatattagcatactggagaccttctgcaatctgaccggactcaaaacacaggggcaaaagtgccacggcttttacatcaagccgacaaagaagtcttacaccatcaatgactgcgctgcctggactatcaacggcacacccctgaacatgatcgaccccggcgaatctgagaaatacctcggcctgcagtttgacccgtggattggaatagcaaggtccggtctctccacaaaactagatttttggcttcagcggatcgatcaagcaccacttaaacctctgcagaaaactgatattctcaaaacatacaccatccctcggctgatctacatagctgaccactcagaagtgaaaagcgcactactcgaaacccttgaccagaagatccggacagcggtcaaggaatggcttcacctacctccgtgcacctgcgatgccatcctgtactcgagcacgagagacggcggtttgggcatcaccaaattggcaggactgatccccagcgtgcaggcccgtagactgcatcggatcgcacagtcatctgacgatacgatgaaatgcttcatggaaaaagagaaaatggaacagctgcataagaaattgtggattcaagctggaggggacagagagaacataccctcgatttgggaagcaccaccgtcgagtgaaccaccaaacaacgtgagcacaaattcggaatgggaagcaccgacccagaaagataaatttccaaagccttgcaattggaggaaaaacgaattcaaaaaatggaccaaattggcatcccaaggccgcggaattgtaaattttgaaagagacaaaattagtaaccattggatccaatactacagacgcatacctcacaggaaactcctcactgcactacaactcagggccaacgtttaccccacgagagaatttctagccaggggtagacaagaccaatacatcaaggcgtgtaggcactgcgatgcggacaacgaatcctgcgcccacatcatcggcaactgcccagtgacacaggacgcccgaatcaagaggcacaattacatctgcgaactgcttctcgaggaggcgaagaagaaggactgggtagtgttcaaggaaccgcacataagggattccaacaaggaactgtacaaacctgacctgatatttgtgaaggatgggcgtgcacttgtcgtggatgtgacagtacggtatgaagcagccaaatcatcgctggaggaagccgctgcagagaaagtgagaaagtacaaacacctggaaacggaagtaagacatctcacgaatgcaaaggacgttacttttgtgggctttcccctaggagcgcgggggaaatggcaccaagataactttaaacttttgactgagcttggcctctccaaatcgaggcaagtgaaaatggcagagactttttccacagtagcgctcttttcatctgtggacattgtacatatgtttgccagtagggccagaaaatctatggttatgtgataataggctgccttctgcggggcttgccttctggccatgcccttcttctctcccttgcacctgtacctcttggtctttgaataaagcctgagtaggaaggaccggtaaaaaaaaaaaaaaaaaaaaaaaaaaaaaaacgttgactaaaaaaaaaaaaaaaaaaaaaaaaaaaaaaaaaaaaaaaaaaaaaaaaaaaaaaaaaaaaaaaaaaaaaa

SEQ ID NO: 10809 - DNA, 5264 bp, synthetic construct
  source 1..5264: mol_type = other DNA
gaaataagagagaaaagaagagtaagaagaaatataagagaattcgccaccatggcccctaagaaaaagcggaaggtgaatatcagcggctctagctgcggcagccccaacagcgccgacaccagcagcgacttcaaggacctgtggaccaagctgaaggaatgccacgaccgggaagtgcagggactccaggtgaaggtcaccaaactcaagcaagaaagaatcctggacgcccagagactggaagaattcttcaccaagaaccagcagctgagagagcagcagaaagtgctgcacgagacaatcaaggttctggaagatagactgcgggccggcctgtgcgacagatgcgccgtgaccgaggaacacatgcgcaaaaagcagcaggagttcgagaacattagacagcaaaatctgaaattgatcacagagctgatgaacgagagaaacacactgcaggaggagaacaagaagctgagcgagcagctgcaacagaagatcgagaatgatcagcaacaccaggccgctgagctggaatgtgaagaggacgtgatccccgacagcccaatcacagctttcagcttttctggcgtgaacagactgaggcggaaggaaaacccccacgtgcggtacatcgagcagacccataccaagctggaacacagcgtgtgtgccaacgagatgagaaaggtgtccaagtcctccacccatccccagcacaaccctaacgaaaatgagatcctggtggctgatacctacgaccagtctcagagccctatggccaaggcccacggcaccagctcttatacccctgataagagctccttcaacctggccaccgtggtggccgagacactgggcctgggcgtgcaggaggaaagcgagacacagggcccaatgagccctctgggagatgagctgtaccactgcctggaaggcaaccacaagaaacagccttttgagtccggctccgagactcctggaacaagcgagagcgctacacctgagggcagccctaagagaaaggtgtccagcgccgagggcgctgccaaggaagagcctaaacggagaagcgccagactgagcgccaagccccccgccaaggtggaagccaagcctaagaaggccgccgctaaggacaagagcagcgataagaaagtccagaccaagggcaagcggggcgccaaaggcaaacaggccgaggtggccaaccaggagacaaaggaagatctgcctgctgagaacggcgaaaccaagaccgaggaatctccagcttctgacgaggccggagagaaggaggccaaaagcgacagcggctctgagacacctggaacaagcgagagcgccaccccggaatcctatgaacaacttgcaccacaaccgtgtgtgggagaaactttacattctagcctcccacgagacagtgaactgtttgtgcctgaagaggggagcagcgagaaggagagcgaggacgcgccaaaaacatctcctccgacgcctgggaaacatggtttggaacagactggggaggaaaaagtgatggtgactgttcctgacaaaaatccaccttgtccttgctgtggtacccgggtaaactctgtgttgaatctgattgaacatctgaaagtgtcacacgggaaaaggggggtttgttttcggtgtgcaaaatgtggaaaggaaaatagtaactatcacagtgttgtttgtcattttaagaaatgcaggggtccagagacggagaaagccccagctggggagtggatttgtgaggtatgcaacagagattttacaaccaaaattggcctgggacaacacaagagattggcacacccagcagtgagaaatcaggaaaggatcgttgcttcccaaccgaaagaaacatcaaatagaggtgctcacaaaaggtgctggacaaaggaggaggaagaattactaataagactggaggctcagttcgagggaaacaaaaatattaataagcttattgcagaacacataaccaccaaaacagctaagcagatcagtgacaaaaggcgattgctgtccagaaagccagcagaggagccacgtgaggagcctggaacgtgtcatcacaccaggagagcagctgcgagcctgagaacggagcctgagatgagtcatcacgcccaggcagaggacagagataatggacctgggagacgccctctgccaggcagggcagctgccggagggagaacaatggacgagataagacgccaccctgataagggcaacggacagcagagacccaccaagcaaaaatcagaagaacagctgcaggcttactataaaaagacactagaggaacgactttcagctggggcacttaacaccttcccccgagcattcaagcaggtaatggaaggccgggatataaagctagtaatcaatcagacagcgcaggactgcttcggatgcctggaatccataagccaaataagaacggcaacccgagataaaaaggacacggtgacccgggagaaacacccaaagaaaccttttcagaagtggatgaagaagagagcaatcaaaaaaggtaattatcttcggttccagcgtttattttatcttgatagagggaaactggctaaaatcattttagatgatattgaatgcttgtcttgtgacataccactcagtgaaatttattcggtttttaaaacaagatgggaaacaactggtagctttaaaagccttggggactttaaaacttacgggaaggctgacaacactgccttcagagaattaattacggctaaagaaattgagaaaaatgtgcaggaaatgagcaaaggctcggctcccggtccagacgggattactcttggggacgtcgtaaagatggatcccgagttttcccggaccatggagattttcaatttatggttaacaactggtaaaatcccggacatggtgagggggtgcagaaccgttttgattccaaaatcatcaaagccggatcgtttgaaagacattaataactggagacctatcacgatcggttccatcttgctgagactgttctccaggattgtaacagctaggctgagcaaagcgtgccccctgaacccaaggcaaagaggctttatcagagcggcgggatgctctgaaaacttaaaactcctgcaaactataatttggtcggccaaaagagaacacagaccactgggtgttgtattcgtggacatcgccaaggcttttgacaccgtaagccaccagcacatcattcatgctttgcagcaaagagaggtggatccccacatcgtcggtctggtgagcaatatgtacgagaacatcagtacgtatatcaccacaaagaggaacacacacacagacaaaatccagatccgggttggagtaaagcagggtgacccgatgtcgccccttttatttaacctggcaatggaccctctattatgcaagctggaagagagtggcaaaggataccaccgaggacagagcagcatcacagcgatggcatttgcagacgatctggttttgctgagcgactcctgggaaaatatgaatacaaatattagcatactggagaccttctgcaatctgaccggactcaaaacacaggggcaaaagtgccacggcttttacatcaagccgacaaagaagtcttacaccatcaatgactgcgctgcctggactatcaacggcacacccctgaacatgatcgaccccggcgaatctgagaaatacctcggcctgcagtttgacccgtggattggaatagcaaggtccggtctctccacaaaactagatttttggcttcagcggatcgatcaagcaccacttaaacctctgcagaaaactgatattctcaaaacatacaccatccctcggctgatctacatagctgaccactcagaagtgaaaagcgcactactcgaaacccttgaccagaagatccggacagcggtcaaggaatggcttcacctacctccgtgcacctgcgatgccatcctgtactcgagcacgagagacggcggtttgggcatcaccaaattggcaggactgatccccagcgtgcaggcccgtagactgcatcggatcgcacagtcatctgacgatacgatgaaatgcttcatggaaaaagagaaaatggaacagctgcataagaaattgtggattcaagctggaggggacagagagaacataccctcgatttgggaagcaccaccgtcgagtgaaccaccaaacaacgtgagcacaaattcggaatgggaagcaccgacccagaaagataaatttccaaagccttgcaattggaggaaaaacgaattcaaaaaatggacccacttggcatcccaaggccgcggaattgtaaattttgaaagagacaaaattagtaaccattggatccaatactacagacgcatacctcacaggaaactcctcactgcactacaactcagggccaacgtttaccccacgagagaatttctagccaggggtagacaagaccaatacatcaaggcgtgtaggcactgcgatgcggacaacgaatcctgcgcccacatcatcggcaactgcccagtgacacaggacgcccgaatcaagaggcacaattacatctgcgaactgcttctcgaggaggcgaagaagaaggactgggtagtgttcaaggaaccgcacataagggattccaacaaggaactgtacaaacctgacctgatatttgtgaaggatgggcgtgcacttgtcgtggatgtgacagtacggtatgaagcagccaaatcatcgctggaggaagccgctgcagagaaagtgagaaagtacaaacacctggaaacggaagtaagacatctcacgaatgcaaaggacgttacttttgtgggctttcccctaggagcgcgggggaaatggcaccaagataactttaaacttttgactgagcttggcctctccaaatcgaggcaagtgaaaatggcagagactttttccacagtagcgctcttttcatctgtggacattgtacatatgtttgccagtagggccagaaaatctatggttatgtgataataggctgccttctgcggggcttgccttctggccatgcccttcttctctcccttgcacctgtacctcttggtctttgaataaagcctgagtaggaaggaccggtaaaaaaaaaaaaaaaaaaaaaaaaaaaaaaacgttgactaaaaaaaaaaaaaaaaaaaaaaaaaaaaaaaaaaaaaaaaaaaaaaaaaaaaaaaaaaaaaaaaaaaaaa

SEQ ID NO: 10810 - DNA, 5264 bp, synthetic construct
  source 1..5264: mol_type = other DNA
gaaataagagagaaaagaagagtaagaagaaatataagagaattcgccaccatggcccctaagaaaaagcggaaggtgaatatcagcggctctagctgcggcagccccaacagcgccgacaccagcagcgacttcaaggacctgtggaccaagctgaaggaatgccacgaccgggaagtgcagggactccaggtgaaggtcaccaaactcaagcaagaaagaatcctggacgcccagagactggaagaattcttcaccaagaaccagcagctgagagagcagcagaaagtgctgcacgagacaatcaaggttctggaagatagactgcgggccggcctgtgcgacagatgcgccgtgaccgaggaacacatgcgcaaaaagcagcaggagttcgagaacattagacagcaaaatctgaaattgatcacagagctgatgaacgagagaaacacactgcaggaggagaacaagaagctgagcgagcagctgcaacagaagatcgagaatgatcagcaacaccaggccgctgagctggaatgtgaagaggacgtgatccccgacagcccaatcacagctttcagcttttctggcgtgaacagactgaggcggaaggaaaacccccacgtgcggtacatcgagcagacccataccaagctggaacacagcgtgtgtgccaacgagatgagaaaggtgtccaagtcctccacccatccccagcacaaccctaacgaaaatgagatcctggtggctgatacctacgaccagtctcagagccctatggccaaggcccacggcaccagctcttatacccctgataagagctccttcaacctggccaccgtggtggccgagacactgggcctgggcgtgcaggaggaaagcgagacacagggcccaatgagccctctgggagatgagctgtaccactgcctggaaggcaaccacaagaaacagccttttgagtccggctccgagactcctggaacaagcgagagcgctacacctgagggcagccctaagagaaaggtgtccagcgccgagggcgctgccaaggaagagcctaaacggagaagcgccagactgagcgccaagccccccgccaaggtggaagccaagcctaagaaggccgccgctaaggacaagagcagcgataagaaagtccagaccaagggcaagcggggcgccaaaggcaaacaggccgaggtggccaaccaggagacaaaggaagatctgcctgctgagaacggcgaaaccaagaccgaggaatctccagcttctgacgaggccggagagaaggaggccaaaagcgacagcggctctgagacacctggaacaagcgagagcgccaccccggaatcctatgaacaacttgcaccacaaccgtgtgtgggagaaactttacattctagcctcccacgagacagtgaactgtttgtgcctgaagaggggagcagcggcaaggagagcgaggacgcgccaaaaacatctcctccgacgcctgggaaacatggtttggaacagactggggaggaaaaagtgatggtgactgttcctgacaaaaatccaccttgtccttgctgtggtacccgggtaaactctgtgttgaatctgattgaacatctgaaagtgtcacacgggaaaaggggggtttgttttcggtgtgcaaaatgtggaaaggaaaatagtaactatcacagtgttgtttgtcattttaagaaatgcaggggtccagagacggagaaagccccagctggggagtggatttgtgaggtatgcaacagagattttacaaccaaaattggcctgggacaacacaagagattggcacacccagcagtgagaaatcaggaaaggatcgttgcttcccaaccgaaagaaacatcaaatagaggtgctcacaaaaggtgctggacaaaggaggaggaagaattactaataagactggaggctcagttcgagggaaacaaaaatattaataagcttattgcagaacacataaccaccaaaacagctaagcagatcagtgacaaaaggcgattgctgtccagaaagccagcagaggagccacgtgaggagcctggaacgtgtcatcacaccaggagagcagctgcgagcctgagaacggagcctgagatgagtcatcacgcccaggcagaggacagagataatggacctgggagacgccctctgccaggcagggcagctgccggagggagaacaatggacgagataagacgccaccctgataagggcaacggacagcagagacccaccaagcaaaaatcagaagaacagctgcaggcttactataaaaagacactagaggaacgactttcagctggggcacttaacaccttcccccgagcattcaagcaggtaatggaaggccgggatataaagctagtaatcaatcagacagcgcaggactgcttcggatgcctggaatccataagccaaataagaacggcaacccgagataaaaaggacacggtgacccgggagaaacacccaaagaaaccttttcagaagtggatgaagaagagagcaatcaaaaaaggtaattatcttcggttccagcgtttattttatcttgatagagggaaactggctaaaatcattttagatgatattgaatgcttgtcttgtgacataccactcagtgaaatttattcggtttttaaaacaagatgggaaacaactggtagctttaaaagccttggggactttaaaacttacgggaaggctgacaacactgccttcagagaattaattacggctaaagaaattgagaaaaatgtgcaggaaatgagcaaaggctcggctcccggtccagacgggattactcttggggacgtcgtaaagatggatcccgagttttcccggaccatggagattttcaatttatggttaacaactggtaaaatcccggacatggtgagggggtgcagaaccgttttgattccaaaatcatcaaagccggatcgtttgaaagacattaataactggagacctatcacgatcggttccatcttgctgagactgttctccaggattgtaacagctaggctgagcaaagcgtgccccctgaacccaaggcaaagaggctttatcagagcggcgggatgctctgaaaacttaaaactcctgcaaactataatttggtcggccaaaagagaacacagaccactgggtgttgtattcgtggacatcgccaaggcttttgacaccgtaagccaccagcacatcattcatgctttgcagcaaagagaggtggatccccacatcgtcggtctggtgagcaatatgtacgagaacatcagtacgtatatcaccacaaagaggaacacacacacagacaaaatccagatccgggttggagtaaagcagggtgacccgatgtcgccccttttatttaacctggcaatggaccctctattatgcaagctggaagagagtggcaaaggataccaccgaggacagagcagcatcacagcgatggcatttgcagacgatctggttttgctgagcgactcctgggaaaatatgaatacaaatattagcatactggagaccttctgcaatctgaccggactcaaaacacaggggcaaaagtgccacggcttttacatcaagccgacaaagaagtcttacaccatcaatgactgcgctgcctggactatcaacggcacacccctgaacatgatcgaccccggcgaatctgagaaatacctcggcctgcagtttgacccgtggattggaatagcaaggtccggtctctccacaaaactagatttttggcttcagcggatcgatcaagcaccacttaaacctctgcagaaaactgatattctcaaaacatacaccatccctcggctgatctacatagctgaccactcagaagtgaaaagcgcactactcgaaacccttgaccagaagatccggacagcggtcaaggaatggcttcacctacctccgtgcacctgcgatgccatcctgtactcgagcacgagagacggcggtttgggcatcaccaaattggcaggactgatccccagcgtgcaggcccgtagactgcatcggatcgcacagtcatctgacgatacgatgaaatgcttcatggaaaaagagaaaatggaacagctgcataagaaattgtggattcaagctggaggggacagagagaacataccctcgatttgggaagcaccaccgtcgagtgaaccaccaaacaacgtgagcacaaattcggaatgggaagcaccgacccagaaagataaatttccaaagccttgcaattggaggaaaaacgaattcaaaaaatggaccaaattggcatcccaaggccgcggaattgtaaattttgaaagagacaaaattagtaaccattggatccaatactacagacgcatacctcacaggaaactcctcactgcactacaactcagggccaacgtttaccccacgagagaatttctagccaggggtagacaagaccaatacatcaaggcgtgtaggcactgcgatgcggacaacgaatcctgcgcccacatcatcggcaactgcccagtgacacaggacgcccgaatcaagaggcacaattacatctgcgaactgcttctcgaggaggcgaagaagaaggactgggtagtgttcaaggaaccgcacataagggattccaacaaggaactgtacaaacctgacctgatatttgtgaaggatgggcgtgcacttgtcgtggatgtgacagtacggtatgaagcagccaaatcatcgctggaggaagccgctgcagagaaagtgagaaagtacaaacacctggaaacggaagtaagacatctcacgaatgcaaaggacgttacttttgtgggctttcccctaggagcgcgggggaaatggcaccaagataactttaaacttttgactgagcttggcctctccaaatcgaggcaagtgaaaatggcagagactttttccacagtagcgctcttttcatctgtggacattgtacatatgtttgccagtagggccagaaaatctatggttatgtgataataggctgccttctgcggggcttgccttctggccatgcccttcttctctcccttgcacctgtacctcttggtctttgaataaagcctgagtaggaaggaccggtaaaaaaaaaaaaaaaaaaaaaaaaaaaaaaacgttgactaaaaaaaaaaaaaaaaaaaaaaaaaaaaaaaaaaaaaaaaaaaaaaaaaaaaaaaaaaaaaaaaaaaaaa

SEQ ID NO: 10811 - DNA, 5264 bp, synthetic construct
  source 1..5264: mol_type = other DNA
gaaataagagagaaaagaagagtaagaagaaatataagagaattcgccaccatggcccctaagaaaaagcggaaggtgaatatcagcggctctagctgcggcagccccaacagcgccgacaccagcagcgacttcaaggacctgtggaccaagctgaaggaatgccacgaccgggaagtgcagggactccaggtgaaggtcaccaaactcaagcaagaaagaatcctggacgcccagagactggaagaattcttcaccaagaaccagcagctgagagagcagcagaaagtgctgcacgagacaatcaaggttctggaagatagactgcgggccggcctgtgcgacagatgcgccgtgaccgaggaacacatgcgcaaaaagcagcaggagttcgagaacattagacagcaaaatctgaaattgatcacagagctgatgaacgagagaaacacactgcaggaggagaacaagaagctgagcgagcagctgcaacagaagatcgagaatgatcagcaacaccaggccgctgagctggaatgtgaagaggacgtgatccccgacagcccaatcacagctttcagcttttctggcgtgaacagactgaggcggaaggaaaacccccacgtgcggtacatcgagcagacccataccaagctggaacacagcgtgtgtgccaacgagatgagaaaggtgtccaagtcctccacccatccccagcacaaccctaacgaaaatgagatcctggtggctgatacctacgaccagtctcagagccctatggccaaggcccacggcaccagctcttatacccctgataagagctccttcaacctggccaccgtggtggccgagacactgggcctgggcgtgcaggaggaaagcgagacacagggcccaatgagccctctgggagatgagctgtaccactgcctggaaggcaaccacaagaaacagccttttgagtccggctccgagactcctggaacaagcgagagcgctacacctgagggcagccctaagagaaaggtgtccagcgccgagggcgctgccaaggaagagcctaaacggagaagcgccagactgagcgccaagccccccgccaaggtggaagccaagcctaagaaggccgccgctaaggacaagagcagcgataagaaagtccagaccaagggcaagcggggcgccaaaggcaaacaggccgaggtggccaaccaggagacaaaggaagatctgcctgctgagaacggcgaaaccaagaccgaggaatctccagcttctgacgaggccggagagaaggaggccaaaagcgacagcggctctgagacacctggaacaagcgagagcgccaccccggaatcctatgaacaacttgcaccacaaccgtgtgtgggagaaactttacattctagcctcccacgagacagtgaactgtttgtgcctgaagaggggagcagcgagaaggagagcgaggacgcgccaaaaacatctcctccgacgcctgggaaacatggtttggaacagactggggaggaaaaagtgatggtgactgttcctgacaaaaatccaccttgtccttgctgtggtacccgggtaaactctgtgttgaatctgattgaacatctgaaagtgtcacacgggaaaaggggggtttgttttcggtgtgcaaaatgtggaaaggaaaatagtaactatcacagtgttgtttgtcattttaagaaatgcaggggtccagagacggagaaagccccagctggggagtggatttgtgaggtatgcaacagagattttacaaccaaaattggcctgggacaacacaagagattggcacacccagcagtgagaaatcaggaaaggatcgttgcttcccaaccgaaagaaacatcaaatagaggtgctcacaaaaggtgctggacaaaggaggaggaagaattactaataagactggaggctcagttcgagggaaacaaaaatattaataagcttattgcagaacacataaccaccaaaacagctaagcagatcagtgacaaaaggcgattgctgtccagaaagccagcagaggagccacgtgaggagcctggaacgtgtcatcacaccaggagagcagctgcgagcggcagaacggagcctgagatgagtcatcacgcccaggcagaggacagagataatggacctgggagacgccctctgccaggcagggcagctgccggagggagaacaatggacgagataagacgccaccctgataagggcaacggacagcagagacccaccaagcaaaaatcagaagaacagctgcaggcttactataaaaagacactagaggaacgactttcagctggggcacttaacaccttcccccgagcattcaagcaggtaatggaaggccgggatataaagctagtaatcaatcagacagcgcaggactgcttcggatgcctggaatccataagccaaataagaacggcaacccgagataaaaaggacacggtgacccgggagaaacacccaaagaaaccttttcagaagtggatgaagaagagagcaatcaaaaaaggtaattatcttcggttccagcgtttattttatcttgatagagggaaactggctaaaatcattttagatgatattgaatgcttgtcttgtgacataccactcagtgaaatttattcggtttttaaaacaagatgggaaacaactggtagctttaaaagccttggggactttaaaacttacgggaaggctgacaacactgccttcagagaattaattacggctaaagaaattgagaaaaatgtgcaggaaatgagcaaaggctcggctcccggtccagacgggattactcttggggacgtcgtaaagatggatcccgagttttcccggaccatggagattttcaatttatggttaacaactggtaaaatcccggacatggtgagggggtgcagaaccgttttgattccaaaatcatcaaagccggatcgtttgaaagacattaataactggagacctatcacgatcggttccatcttgctgagactgttctccaggattgtaacagctaggctgagcaaagcgtgccccctgaacccaaggcaaagaggctttatcagagcggcgggatgctctgaaaacttaaaactcctgcaaactataatttggtcggccaaaagagaacacagaccactgggtgttgtattcgtggacatcgccaaggcttttgacaccgtaagccaccagcacatcattcatgctttgcagcaaagagaggtggatccccacatcgtcggtctggtgagcaatatgtacgagaacatcagtacgtatatcaccacaaagaggaacacacacacagacaaaatccagatccgggttggagtaaagcagggtgacccgatgtcgccccttttatttaacctggcaatggaccctctattatgcaagctggaagagagtggcaaaggataccaccgaggacagagcagcatcacagcgatggcatttgcagacgatctggttttgctgagcgactcctgggaaaatatgaatacaaatattagcatactggagaccttctgcaatctgaccggactcaaaacacaggggcaaaagtgccacggcttttacatcaagccgacaaagaagtcttacaccatcaatgactgcgctgcctggactatcaacggcacacccctgaacatgatcgaccccggcgaatctgagaaatacctcggcctgcagtttgacccgtggattggaatagcaaggtccggtctctccacaaaactagatttttggcttcagcggatcgatcaagcaccacttaaacctctgcagaaaactgatattctcaaaacatacaccatccctcggctgatctacatagctgaccactcagaagtgaaaagcgcactactcgaaacccttgaccagaagatccggacagcggtcaaggaatggcttcacctacctccgtgcacctgcgatgccatcctgtactcgagcacgagagacggcggtttgggcatcaccaaattggcaggactgatccccagcgtgcaggcccgtagactgcatcggatcgcacagtcatctgacgatacgatgaaatgcttcatggaaaaagagaaaatggaacagctgcataagaaattgtggattcaagctggaggggacagagagaacataccctcgatttgggaagcaccaccgtcgagtgaaccaccaaacaacgtgagcacaaattcggaatgggaagcaccgacccagaaagataaatttccaaagccttgcaattggaggaaaaacgaattcaaaaaatggaccaaattggcatcccaaggccgcggaattgtaaattttgaaagagacaaaattagtaaccattggatccaatactacagacgcatacctcacaggaaactcctcactgcactacaactcagggccaacgtttaccccacgagagaatttctagccaggggtagacaagaccaatacatcaaggcgtgtaggcactgcgatgcggacaacgaatcctgcgcccacatcatcggcaactgcccagtgacacaggacgcccgaatcaagaggcacaattacatctgcgaactgcttctcgaggaggcgaagaagaaggactgggtagtgttcaaggaaccgcacataagggattccaacaaggaactgtacaaacctgacctgatatttgtgaaggatgggcgtgcacttgtcgtggatgtgacagtacggtatgaagcagccaaatcatcgctggaggaagccgctgcagagaaagtgagaaagtacaaacacctggaaacggaagtaagacatctcacgaatgcaaaggacgttacttttgtgggctttcccctaggagcgcgggggaaatggcaccaagataactttaaacttttgactgagcttggcctctccaaatcgaggcaagtgaaaatggcagagactttttccacagtagcgctcttttcatctgtggacattgtacatatgtttgccagtagggccagaaaatctatggttatgtgataataggctgccttctgcggggcttgccttctggccatgcccttcttctctcccttgcacctgtacctcttggtctttgaataaagcctgagtaggaaggaccggtaaaaaaaaaaaaaaaaaaaaaaaaaaaaaaacgttgactaaaaaaaaaaaaaaaaaaaaaaaaaaaaaaaaaaaaaaaaaaaaaaaaaaaaaaaaaaaaaaaaaaaaaa

SEQ ID NO: 10812 - DNA, 5264 bp, synthetic construct
  source 1..5264: mol_type = other DNA
gaaataagagagaaaagaagagtaagaagaaatataagagaattcgccaccatggcccctaagaaaaagcggaaggtgaatatcagcggctctagctgcggcagccccaacagcgccgacaccagcagcgacttcaaggacctgtggaccaagctgaaggaatgccacgaccgggaagtgcagggactccaggtgaaggtcaccaaactcaagcaagaaagaatcctggacgcccagagactggaagaattcttcaccaagaaccagcagctgagagagcagcagaaagtgctgcacgagacaatcaaggttctggaagatagactgcgggccggcctgtgcgacagatgcgccgtgaccgaggaacacatgcgcaaaaagcagcaggagttcgagaacattagacagcaaaatctgaaattgatcacagagctgatgaacgagagaaacacactgcaggaggagaacaagaagctgagcgagcagctgcaacagaagatcgagaatgatcagcaacaccaggccgctgagctggaatgtgaagaggacgtgatccccgacagcccaatcacagctttcagcttttctggcgtgaacagactgaggcggaaggaaaacccccacgtgcggtacatcgagcagacccataccaagctggaacacagcgtgtgtgccaacgagatgagaaaggtgtccaagtcctccacccatccccagcacaaccctaacgaaaatgagatcctggtggctgatacctacgaccagtctcagagccctatggccaaggcccacggcaccagctcttatacccctgataagagctccttcaacctggccaccgtggtggccgagacactgggcctgggcgtgcaggaggaaagcgagacacagggcccaatgagccctctgggagatgagctgtaccactgcctggaaggcaaccacaagaaacagccttttgagtccggctccgagactcctggaacaagcgagagcgctacacctgagggcagccctaagagaaaggtgtccagcgccgagggcgctgccaaggaagagcctaaacggagaagcgccagactgagcgccaagccccccgccaaggtggaagccaagcctaagaaggccgccgctaaggacaagagcagcgataagaaagtccagaccaagggcaagcggggcgccaaaggcaaacaggccgaggtggccaaccaggagacaaaggaagatctgcctgctgagaacggcgaaaccaagaccgaggaatctccagcttctgacgaggccggagagaaggaggccaaaagcgacagcggctctgagacacctggaacaagcgagagcgccaccccggaatcctatgaacaacttgcaccacaaccgtgtgtgggagaaactttacattctagcctcccacgagacagtgaactgtttgtgcctgaagaggggagcagcgagaaggagagcgaggacgcgccaaaaacatctcctccgacgcctgggaaacatggtttggaacagactggggaggaaaaagtgatggtgactgttcctgacaaaaatccaccttgtccttgctgtggtacccgggtaaactctgtgttgaatctgattgaacatctgaaagtgtcacacgggaaaaggggggtttgttttcggtgtgcaaaatgtggaaaggaaaatagtaactatcacagtgttgtttgtcattttaagaaatgcaggggtccagagacggagaaagccccagctggggagtggatttgtgaggtatgcaacagagattttacaaccaaaattggcctgggacaacacaagagattggcacacccagcagtgagaaatcaggaaaggatcgttgcttcccaaccgaaagaaacatcaaatagaggtgctcacaaaaggtgctggacaaaggaggaggaagaattactaataagactggaggctcagttcgagggaaacaaaaatattaataagcttattgcagaacacataaccaccaaaacagctaagcagatcagtgacaaaaggcgattgctgtccagaaagccagcagaggagccacgtgaggagcctggaacgtgtcatcacaccaggagagcagctgcgagcctgagaacggagcctgagatgagtcatcacgcccaggcagaggacagagataatggacctgggagacgccctctgccaggcagggcagctgccggagggagaacaatggacgagataagacgccaccctgataagggcaacggacagcagagacccaccaagcaaaaatcagaagaacagctgcaggcttactataaaaagacactagaggaacgactttcagctggggcacttaacaccttcccccgagcattcaagcaggtaatggaaggccgggatataaagctagtaatcaatcagacagcgcaggactgcttcggatgcctggaatccataagccaaataagaacggcaacccgagataaaaaggacacggtgacccgggagaaacacccaaagaaaccttttcagaagtggatgaagaagagagcaatcaaaaaaggtaattatcttcggttccagcgtttattttatcttgatagcgggaaactggctaaaatcattttagatgatattgaatgcttgtcttgtgacataccactcagtgaaatttattcggtttttaaaacaagatgggaaacaactggtagctttaaaagccttggggactttaaaacttacgggaaggctgacaacactgccttcagagaattaattacggctaaagaaattgagaaaaatgtgcaggaaatgagcaaaggctcggctcccggtccagacgggattactcttggggacgtcgtaaagatggatcccgagttttcccggaccatggagattttcaatttatggttaacaactggtaaaatcccggacatggtgagggggtgcagaaccgttttgattccaaaatcatcaaagccggatcgtttgaaagacattaataactggagacctatcacgatcggttccatcttgctgagactgttctccaggattgtaacagctaggctgagcaaagcgtgccccctgaacccaaggcaaagaggctttatcagagcggcgggatgctctgaaaacttaaaactcctgcaaactataatttggtcggccaaaagagaacacagaccactgggtgttgtattcgtggacatcgccaaggcttttgacaccgtaagccaccagcacatcattcatgctttgcagcaaagagaggtggatccccacatcgtcggtctggtgagcaatatgtacgagaacatcagtacgtatatcaccacaaagaggaacacacacacagacaaaatccagatccgggttggagtaaagcagggtgacccgatgtcgccccttttatttaacctggcaatggaccctctattatgcaagctggaagagagtggcaaaggataccaccgaggacagagcagcatcacagcgatggcatttgcagacgatctggttttgctgagcgactcctgggaaaatatgaatacaaatattagcatactggagaccttctgcaatctgaccggactcaaaacacaggggcaaaagtgccacggcttttacatcaagccgacaaagaagtcttacaccatcaatgactgcgctgcctggactatcaacggcacacccctgaacatgatcgaccccggcgaatctgagaaatacctcggcctgcagtttgacccgtggattggaatagcaaggtccggtctctccacaaaactagatttttggcttcagcggatcgatcaagcaccacttaaacctctgcagaaaactgatattctcaaaacatacaccatccctcggctgatctacatagctgaccactcagaagtgaaaagcgcactactcgaaacccttgaccagaagatccggacagcggtcaaggaatggcttcacctacctccgtgcacctgcgatgccatcctgtactcgagcacgagagacggcggtttgggcatcaccaaattggcaggactgatccccagcgtgcaggcccgtagactgcatcggatcgcacagtcatctgacgatacgatgaaatgcttcatggaaaaagagaaaatggaacagctgcataagaaattgtggattcaagctggaggggacagagagaacataccctcgatttgggaagcaccaccgtcgagtgaaccaccaaacaacgtgagcacaaattcggaatgggaagcaccgacccagaaagataaatttccaaagccttgcaattggaggaaaaacgaattcaaaaaatggaccaaattggcatcccaaggccgcggaattgtaaattttgaaagagacaaaattagtaaccattggatccaatactacagacgcatacctcacaggaaactcctcactgcactacaactcagggccaacgtttaccccacgagagaatttctagccaggggtagacaagaccaatacatcaaggcgtgtaggcactgcgatgcggacaacgaatcctgcgcccacatcatcggcaactgcccagtgacacaggacgcccgaatcaagaggcacaattacatctgcgaactgcttctcgaggaggcgaagaagaaggactgggtagtgttcaaggaaccgcacataagggattccaacaaggaactgtacaaacctgacctgatatttgtgaaggatgggcgtgcacttgtcgtggatgtgacagtacggtatgaagcagccaaatcatcgctggaggaagccgctgcagagaaagtgagaaagtacaaacacctggaaacggaagtaagacatctcacgaatgcaaaggacgttacttttgtgggctttcccctaggagcgcgggggaaatggcaccaagataactttaaacttttgactgagcttggcctctccaaatcgaggcaagtgaaaatggcagagactttttccacagtagcgctcttttcatctgtggacattgtacatatgtttgccagtagggccagaaaatctatggttatgtgataataggctgccttctgcggggcttgccttctggccatgcccttcttctctcccttgcacctgtacctcttggtctttgaataaagcctgagtaggaaggaccggtaaaaaaaaaaaaaaaaaaaaaaaaaaaaaaacgttgactaaaaaaaaaaaaaaaaaaaaaaaaaaaaaaaaaaaaaaaaaaaaaaaaaaaaaaaaaaaaaaaaaaaaaa

SEQ ID NO: 10813 - DNA, 5264 bp, synthetic construct
  source 1..5264: mol_type = other DNA
gaaataagagagaaaagaagagtaagaagaaatataagagaattcgccaccatggcccctaagaaaaagcggaaggtgaatatcagcggctctagctgcggcagccccaacagcgccgacaccagcagcgacttcaaggacctgtggaccaagctgaaggaatgccacgaccgggaagtgcagggactccaggtgaaggtcaccaaactcaagcaagaaagaatcctggacgcccagagactggaagaattcttcaccaagaaccagcagctgagagagcagcagaaagtgctgcacgagacaatcaaggttctggaagatagactgcgggccggcctgtgcgacagatgcgccgtgaccgaggaacacatgcgcaaaaagcagcaggagttcgagaacattagacagcaaaatctgaaattgatcacagagctgatgaacgagagaaacacactgcaggaggagaacaagaagctgagcgagcagctgcaacagaagatcgagaatgatcagcaacaccaggccgctgagctggaatgtgaagaggacgtgatccccgacagcccaatcacagctttcagcttttctggcgtgaacagactgaggcggaaggaaaacccccacgtgcggtacatcgagcagacccataccaagctggaacacagcgtgtgtgccaacgagatgagaaaggtgtccaagtcctccacccatccccagcacaaccctaacgaaaatgagatcctggtggctgatacctacgaccagtctcagagccctatggccaaggcccacggcaccagctcttatacccctgataagagctccttcaacctggccaccgtggtggccgagacactgggcctgggcgtgcaggaggaaagcgagacacagggcccaatgagccctctgggagatgagctgtaccactgcctggaaggcaaccacaagaaacagccttttgagtccggctccgagactcctggaacaagcgagagcgctacacctgagggcagccctaagagaaaggtgtccagcgccgagggcgctgccaaggaagagcctaaacggagaagcgccagactgagcgccaagccccccgccaaggtggaagccaagcctaagaaggccgccgctaaggacaagagcagcgataagaaagtccagaccaagggcaagcggggcgccaaaggcaaacaggccgaggtggccaaccaggagacaaaggaagatctgcctgctgagaacggcgaaaccaagaccgaggaatctccagcttctgacgaggccggagagaaggaggccaaaagcgacagcggctctgagacacctggaacaagcgagagcgccaccccggaatcctatgaacaacttgcaccacaaccgtgtgtgggagaaactttacattctagcctcccacgagacagtgaactgggcgtgcctgaagaggggagcagcgagaaggagagcgaggacgcgccaaaaacatctcctccgacgcctgggaaacatggtttggaacagactggggaggaaaaagtgatggtgactgttcctgacaaaaatccaccttgtccttgctgtggtacccgggtaaactctgtgttgaatctgattgaacatctgaaagtgtcacacgggaaaaggggggtttgttttcggtgtgcaaaatgtggaaaggaaaatagtaactatcacagtgttgtttgtcattttaagaaatgcaggggtccagagacggagaaagccccagctggggagtggatttgtgaggtatgcaacagagattttacaaccaaaattggcctgggacaacacaagagattggcacacccagcagtgagaaatcaggaaaggatcgttgcttcccaaccgaaagaaacatcaaatagaggtgctcacaaaaggtgctggacaaaggaggaggaagaattactaataagactggaggctcagttcgagggaaacaaaaatattaataagcttattgcagaacacataaccaccaaaacagctaagcagatcagtgacaaaaggcgattgctgtccagaaagccagcagaggagccacgtgaggagcctggaacgtgtcatcacaccaggagagcagctgcgagcctgagaacggagcctgagatgagtcatcacgcccaggcagaggacagagataatggacctgggagacgccctctgccaggcagggcagctgccggagggagaacaatggacgagataagacgccaccctgataagggcaacggacagcagagacccaccaagcaaaaatcagaagaacagctgcaggcttactataaaaagacactagaggaacgactttcagctggggcacttaacaccttcccccgagcattcaagcaggtaatggaaggccgggatataaagctagtaatcaatcagacagcgcaggactgcttcggatgcctggaatccataagccaaataagaacggcaacccgagataaaaaggacacggtgacccgggagaaacacccaaagaaaccttttcagaagtggatgaagaagagagcaatcaaaaaaggtaattatcttcggttccagcgtttattttatcttgatagagggaaactggctaaaatcattttagatgatattgaatgcttgtcttgtgacataccactcagtgaaatttattcggtttttaaaacaagatgggaaacaactggtagctttaaaagccttggggactttaaaacttacgggaaggctgacaacactgccttcagagaattaattacggctaaagaaattgagaaaaatgtgcaggaaatgagcaaaggctcggctcccggtccagacgggattactcttggggacgtcgtaaagatggatcccgagttttcccggaccatggagattttcaatttatggttaacaactggtaaaatcccggacatggtgagggggtgcagaaccgttttgattccaaaatcatcaaagccggatcgtttgaaagacattaataactggagacctatcacgatcggttccatcttgctgagactgttctccaggattgtaacagctaggctgagcaaagcgtgccccctgaacccaaggcaaagaggctttatcagagcggcgggatgctctgaaaacttaaaactcctgcaaactataatttggtcggccaaaagagaacacagaccactgggtgttgtattcgtggacatcgccaaggcttttgacaccgtaagccaccagcacatcattcatgctttgcagcaaagagaggtggatccccacatcgtcggtctggtgagcaatatgtacgagaacatcagtacgtatatcaccacaaagaggaacacacacacagacaaaatccagatccgggttggagtaaagcagggtgacccgatgtcgccccttttatttaacctggcaatggaccctctattatgcaagctggaagagagtggcaaaggataccaccgaggacagagcagcatcacagcgatggcatttgcagacgatctggttttgctgagcgactcctgggaaaatatgaatacaaatattagcatactggagaccttctgcaatctgaccggactcaaaacacaggggcaaaagtgccacggcttttacatcaagccgacaaagaagtcttacaccatcaatgactgcgctgcctggactatcaacggcacacccctgaacatgatcgaccccggcgaatctgagaaatacctcggcctgcagtttgacccgtggattggaatagcaaggtccggtctctccacaaaactagatttttggcttcagcggatcgatcaagcaccacttaaacctctgcagaaaactgatattctcaaaacatacaccatccctcggctgatctacatagctgaccactcagaagtgaaaagcgcactactcgaaacccttgaccagaagatccggacagcggtcaaggaatggcttcacctacctccgtgcacctgcgatgccatcctgtactcgagcacgagagacggcggtttgggcatcaccaaattggcaggactgatccccagcgtgcaggcccgtagactgcatcggatcgcacagtcatctgacgatacgatgaaatgcttcatggaaaaagagaaaatggaacagctgcataagaaattgtggattcaagctggaggggacagagagaacataccctcgatttgggaagcaccaccgtcgagtgaaccaccaaacaacgtgagcacaaattcggaatgggaagcaccgacccagaaagataaatttccaaagccttgcaattggaggaaaaacgaattcaaaaaatggaccaaattggcatcccaaggccgcggaattgtaaattttgaaagagacaaaattagtaaccattggatccaatactacagacgcatacctcacaggaaactcctcactgcactacaactcagggccaacgtttaccccacgagagaatttctagccaggggtagacaagaccaatacatcaaggcgtgtaggcactgcgatgcggacaacgaatcctgcgcccacatcatcggcaactgcccagtgacacaggacgcccgaatcaagaggcacaattacatctgcgaactgcttctcgaggaggcgaagaagaaggactgggtagtgttcaaggaaccgcacataagggattccaacaaggaactgtacaaacctgacctgatatttgtgaaggatgggcgtgcacttgtcgtggatgtgacagtacggtatgaagcagccaaatcatcgctggaggaagccgctgcagagaaagtgagaaagtacaaacacctggaaacggaagtaagacatctcacgaatgcaaaggacgttacttttgtgggctttcccctaggagcgcgggggaaatggcaccaagataactttaaacttttgactgagcttggcctctccaaatcgaggcaagtgaaaatggcagagactttttccacagtagcgctcttttcatctgtggacattgtacatatgtttgccagtagggccagaaaatctatggttatgtgataataggctgccttctgcggggcttgccttctggccatgcccttcttctctcccttgcacctgtacctcttggtctttgaataaagcctgagtaggaaggaccggtaaaaaaaaaaaaaaaaaaaaaaaaaaaaaaacgttgactaaaaaaaaaaaaaaaaaaaaaaaaaaaaaaaaaaaaaaaaaaaaaaaaaaaaaaaaaaaaaaaaaaaaaa

SEQ ID NO: 10814 - DNA, 5264 bp, synthetic construct
  source 1..5264: mol_type = other DNA
gaaataagagagaaaagaagagtaagaagaaatataagagaattcgccaccatggcccctaagaaaaagcggaaggtgaatatcagcggctctagctgcggcagccccaacagcgccgacaccagcagcgacttcaaggacctgtggaccaagctgaaggaatgccacgaccgggaagtgcagggactccaggtgaaggtcaccaaactcaagcaagaaagaatcctggacgcccagagactggaagaattcttcaccaagaaccagcagctgagagagcagcagaaagtgctgcacgagacaatcaaggttctggaagatagactgcgggccggcctgtgcgacagatgcgccgtgaccgaggaacacatgcgcaaaaagcagcaggagttcgagaacattagacagcaaaatctgaaattgatcacagagctgatgaacgagagaaacacactgcaggaggagaacaagaagctgagcgagcagctgcaacagaagatcgagaatgatcagcaacaccaggccgctgagctggaatgtgaagaggacgtgatccccgacagcccaatcacagctttcagcttttctggcgtgaacagactgaggcggaaggaaaacccccacgtgcggtacatcgagcagacccataccaagctggaacacagcgtgtgtgccaacgagatgagaaaggtgtccaagtcctccacccatccccagcacaaccctaacgaaaatgagatcctggtggctgatacctacgaccagtctcagagccctatggccaaggcccacggcaccagctcttatacccctgataagagctccttcaacctggccaccgtggtggccgagacactgggcctgggcgtgcaggaggaaagcgagacacagggcccaatgagccctctgggagatgagctgtaccactgcctggaaggcaaccacaagaaacagccttttgagtccggctccgagactcctggaacaagcgagagcgctacacctgagggcagccctaagagaaaggtgtccagcgccgagggcgctgccaaggaagagcctaaacggagaagcgccagactgagcgccaagccccccgccaaggtggaagccaagcctaagaaggccgccgctaaggacaagagcagcgataagaaagtccagaccaagggcaagcggggcgccaaaggcaaacaggccgaggtggccaaccaggagacaaaggaagatctgcctgctgagaacggcgaaaccaagaccgaggaatctccagcttctgacgaggccggagagaaggaggccaaaagcgacagcggctctgagacacctggaacaagcgagagcgccaccccggaatcctatgaacaacttgcaccacaaccgtgtgtgggagaaactttacattctagcctcccacgagacagtgaactgtttgtgcctgaagaggggagcagcgagaaggagagcgaggacgcgccaaaaacatctcctccgacgcctgggaaacatggtttggaacagactggggaggaaaaagtgatggtgactgttcctgacaaaaatccaccttgtccttgctgtggtacccgggtaaactctgtgttgaatctgattgaacatctgaaagtgtcacacgggaaaaggggggtttgttttcggtgtgcaaaatgtggaaaggaaaatagtaactatcacagtgttgtttgtcattttaagaaatgcaggggtccagagacggagaaagccccagctggggagtggatttgtgaggtatgcaacagagattttacaaccaaaattggcctgggacaacacaagagattggcacacccagcagtgagaaatcaggaaaggatcgttgcttcccaaccgaaagaaacatcaaatagaggtgctcacaaaaggtgctggacaaaggaggaggaagaattactaataagactggaggctcagttcgagggaaacaaaaatattaataagcttattgcagaacacataaccaccaaaacagctaagcagatcagtgacaaaaggcgattgctgtccagaaagccagcagaggagccacgtgaggagcctggaacgtgtcatcacaccaggagagcagctgcgagcctgagaacggagcctgagatgagtcatcacgcccaggcagaggacagagataatggacctgggagacgccctctgccaggcagggcagctgccggagggagaacaatggacgagataagacgccaccctgataagggcaacggacagcagagacccaccaagcaaaaatcagaagaacagctgcaggcttactataaaaagacactagaggaacgactttcagctggggcacttaacaccttcccccgagcattcaagcaggtaatggaaggccgggatataaagctagtaatcaatcagacagcgcaggactgcttcggatgcctggaatccataagccaaataagaacggcaacccgagataaaaaggacacggtgacccgggagaaacacccaaagaaaccttttcagaagtggatgaagaagagagcaatcaaaaaaggtaattatcttcggttccagcgtttattttatcttgatagagggaaactggctaaaatcattttagatgatattgaatgcttgtcttgtgacataccactcagtgaaatttattcggtttttaaaacaagatgggaaacaactggtagctttaaaagccttggggactttaaaacttacgggaaggctgacaacactgccttcagagaattaattacggctaaagaaattgagaaaaatgtgcaggaaatgagcaaaggctcggctcccggtccagacgggattactcttggggacgtcgtaaagatggatcccgagttttcccggaccatggagattttcaatttatggttaacaactggtaaaatcccggacatggtgagggggtgcagaaccgttttgattccaaaatcatcaaagccggatcgtttgaaagacattaataactggagacctatcacgatcggttccatcttgctgagactgttctccaggattgtaacagctaggctgagcaaagcgtgccccctgaacccaaggcaaagaggctttatcagagcggcgggatgctctgaaaacttaaaactcctgcaaactataatttggtcggccaaaagagaacacagaccactgggtgttgtattcgtggacatcgccaaggcttttgacaccgtaagccaccagcacatcattcatgctttgcagcaaagagaggtggatccccacatcgtcggtctggtgagcaatatgtacgagaacatcagtacgtatatcaccacaaagaggaacacacacacagacaaaatccagatccgggttggagtaaagcagggtgacccgatgtcgccccttttatttaacctggcaatggaccctctattatgcaagctggaagagagtggcaaaggataccaccgaggacagagcagcatcacagcgatggcatttgcagacgatctggttttgctgagcgactcctgggaaaatatgaatacaaatattagcatactggagaccttctgcaatctgaccggactcaaaacacaggggcaaaagtgccacggcttttacatcaagccgacaaagaagtcttacaccatcaatgactgcgctgcctggactatcaacggcacacccctgaacatgatcgaccccggcgaatctgagaaatacctcggcctgcagtttgacccgtggattggaatagcaaggtccggtctctccgagaaactagatttttggcttcagcggatcgatcaagcaccacttaaacctctgcagaaaactgatattctcaaaacatacaccatccctcggctgatctacatagctgaccactcagaagtgaaaagcgcactactcgaaacccttgaccagaagatccggacagcggtcaaggaatggcttcacctacctccgtgcacctgcgatgccatcctgtactcgagcacgagagacggcggtttgggcatcaccaaattggcaggactgatccccagcgtgcaggcccgtagactgcatcggatcgcacagtcatctgacgatacgatgaaatgcttcatggaaaaagagaaaatggaacagctgcataagaaattgtggattcaagctggaggggacagagagaacataccctcgatttgggaagcaccaccgtcgagtgaaccaccaaacaacgtgagcacaaattcggaatgggaagcaccgacccagaaagataaatttccaaagccttgcaattggaggaaaaacgaattcaaaaaatggaccaaattggcatcccaaggccgcggaattgtaaattttgaaagagacaaaattagtaaccattggatccaatactacagacgcatacctcacaggaaactcctcactgcactacaactcagggccaacgtttaccccacgagagaatttctagccaggggtagacaagaccaatacatcaaggcgtgtaggcactgcgatgcggacaacgaatcctgcgcccacatcatcggcaactgcccagtgacacaggacgcccgaatcaagaggcacaattacatctgcgaactgcttctcgaggaggcgaagaagaaggactgggtagtgttcaaggaaccgcacataagggattccaacaaggaactgtacaaacctgacctgatatttgtgaaggatgggcgtgcacttgtcgtggatgtgacagtacggtatgaagcagccaaatcatcgctggaggaagccgctgcagagaaagtgagaaagtacaaacacctggaaacggaagtaagacatctcacgaatgcaaaggacgttacttttgtgggctttcccctaggagcgcgggggaaatggcaccaagataactttaaacttttgactgagcttggcctctccaaatcgaggcaagtgaaaatggcagagactttttccacagtagcgctcttttcatctgtggacattgtacatatgtttgccagtagggccagaaaatctatggttatgtgataataggctgccttctgcggggcttgccttctggccatgcccttcttctctcccttgcacctgtacctcttggtctttgaataaagcctgagtaggaaggaccggtaaaaaaaaaaaaaaaaaaaaaaaaaaaaaaacgttgactaaaaaaaaaaaaaaaaaaaaaaaaaaaaaaaaaaaaaaaaaaaaaaaaaaaaaaaaaaaaaaaaaaaaaa

SEQ ID NO: 10815 - DNA, 5264 bp, synthetic construct
  source 1..5264: mol_type = other DNA
gaaataagagagaaaagaagagtaagaagaaatataagagaattcgccaccatggcccctaagaaaaagcggaaggtgaatatcagcggctctagctgcggcagccccaacagcgccgacaccagcagcgacttcaaggacctgtggaccaagctgaaggaatgccacgaccgggaagtgcagggactccaggtgaaggtcaccaaactcaagcaagaaagaatcctggacgcccagagactggaagaattcttcaccaagaaccagcagctgagagagcagcagaaagtgctgcacgagacaatcaaggttctggaagatagactgcgggccggcctgtgcgacagatgcgccgtgaccgaggaacacatgcgcaaaaagcagcaggagttcgagaacattagacagcaaaatctgaaattgatcacagagctgatgaacgagagaaacacactgcaggaggagaacaagaagctgagcgagcagctgcaacagaagatcgagaatgatcagcaacaccaggccgctgagctggaatgtgaagaggacgtgatccccgacagcccaatcacagctttcagcttttctggcgtgaacagactgaggcggaaggaaaacccccacgtgcggtacatcgagcagacccataccaagctggaacacagcgtgtgtgccaacgagatgagaaaggtgtccaagtcctccacccatccccagcacaaccctaacgaaaatgagatcctggtggctgatacctacgaccagtctcagagccctatggccaaggcccacggcaccagctcttatacccctgataagagctccttcaacctggccaccgtggtggccgagacactgggcctgggcgtgcaggaggaaagcgagacacagggcccaatgagccctctgggagatgagctgtaccactgcctggaaggcaaccacaagaaacagccttttgagtccggctccgagactcctggaacaagcgagagcgctacacctgagggcagccctaagagaaaggtgtccagcgccgagggcgctgccaaggaagagcctaaacggagaagcgccagactgagcgccaagccccccgccaaggtggaagccaagcctaagaaggccgccgctaaggacaagagcagcgataagaaagtccagaccaagggcaagcggggcgccaaaggcaaacaggccgaggtggccaaccaggagacaaaggaagatctgcctgctgagaacggcgaaaccaagaccgaggaatctccagcttctgacgaggccggagagaaggaggccaaaagcgacagcggctctgagacacctggaacaagcgagagcgccaccccggaatcctatgaacaacttgcaccacaaccgtgtgtgggagaaactttacattctagcctcccacgagacagtgaactgtttgtgcctgaagaggggagcagcgagaaggagagcgaggacgcgccaaaaacatctcctccgacgcctgggaaacatggtttggaacagactggggaggaaaaagtgatggtgactgttcctgacaaaaatccaccttgtccttgctgtggtacccgggtaaactctgtgttgaatctgattgaacatctgaaagtgtcacacgggaaaaggggggtttgttttcggtgtgcaaaatgtggaaaggaaaatagtaactatcacagtgttgtttgtcattttaagaaatgcaggggtccagagacggagaaagccccagctggggagtggatttgtgaggtatgcaacagagattttacaaccaaaattggcctgggacaacacaagagattggcacacccagcagtgagaaatcaggaaaggatcgttgcttcccaaccgaaagaaacatcaaatagaggtgctcacaaaaggtgctggacaaaggaggaggaagaattactaataagactggaggctcagttcgagggaaacaaaaatattaataagcttattgcagaacacataaccaccaaaacagctaagcagatcagtgacaaaaggcgattgctgtccagaaagccagcagaggagccacgtgaggagcctggaacgtgtcatcacaccaggagagcagctgcgagcctgagaacggagcctgagatgagtcatcacgcccaggcagaggacagagataatcagcctgggagacgccctctgccaggcagggcagctgccggagggagaacaatggacgagataagacgccaccctgataagggcaacggacagcagagacccaccaagcaaaaatcagaagaacagctgcaggcttactataaaaagacactagaggaacgactttcagctggggcacttaacaccttcccccgagcattcaagcaggtaatggaaggccgggatataaagctagtaatcaatcagacagcgcaggactgcttcggatgcctggaatccataagccaaataagaacggcaacccgagataaaaaggacacggtgacccgggagaaacacccaaagaaaccttttcagaagtggatgaagaagagagcaatcaaaaaaggtaattatcttcggttccagcgtttattttatcttgatagagggaaactggctaaaatcattttagatgatattgaatgcttgtcttgtgacataccactcagtgaaatttattcggtttttaaaacaagatgggaaacaactggtagctttaaaagccttggggactttaaaacttacgggaaggctgacaacactgccttcagagaattaattacggctaaagaaattgagaaaaatgtgcaggaaatgagcaaaggctcggctcccggtccagacgggattactcttggggacgtcgtaaagatggatcccgagttttcccggaccatggagattttcaatttatggttaacaactggtaaaatcccggacatggtgagggggtgcagaaccgttttgattccaaaatcatcaaagccggatcgtttgaaagacattaataactggagacctatcacgatcggttccatcttgctgagactgttctccaggattgtaacagctaggctgagcaaagcgtgccccctgaacccaaggcaaagaggctttatcagagcggcgggatgctctgaaaacttaaaactcctgcaaactataatttggtcggccaaaagagaacacagaccactgggtgttgtattcgtggacatcgccaaggcttttgacaccgtaagccaccagcacatcattcatgctttgcagcaaagagaggtggatccccacatcgtcggtctggtgagcaatatgtacgagaacatcagtacgtatatcaccacaaagaggaacacacacacagacaaaatccagatccgggttggagtaaagcagggtgacccgatgtcgccccttttatttaacctggcaatggaccctctattatgcaagctggaagagagtggcaaaggataccaccgaggacagagcagcatcacagcgatggcatttgcagacgatctggttttgctgagcgactcctgggaaaatatgaatacaaatattagcatactggagaccttctgcaatctgaccggactcaaaacacaggggcaaaagtgccacggcttttacatcaagccgacaaagaagtcttacaccatcaatgactgcgctgcctggactatcaacggcacacccctgaacatgatcgaccccggcgaatctgagaaatacctcggcctgcagtttgacccgtggattggaatagcaaggtccggtctctccacaaaactagatttttggcttcagcggatcgatcaagcaccacttaaacctctgcagaaaactgatattctcaaaacatacaccatccctcggctgatctacatagctgaccactcagaagtgaaaagcgcactactcgaaacccttgaccagaagatccggacagcggtcaaggaatggcttcacctacctccgtgcacctgcgatgccatcctgtactcgagcacgagagacggcggtttgggcatcaccaaattggcaggactgatccccagcgtgcaggcccgtagactgcatcggatcgcacagtcatctgacgatacgatgaaatgcttcatggaaaaagagaaaatggaacagctgcataagaaattgtggattcaagctggaggggacagagagaacataccctcgatttgggaagcaccaccgtcgagtgaaccaccaaacaacgtgagcacaaattcggaatgggaagcaccgacccagaaagataaatttccaaagccttgcaattggaggaaaaacgaattcaaaaaatggaccaaattggcatcccaaggccgcggaattgtaaattttgaaagagacaaaattagtaaccattggatccaatactacagacgcatacctcacaggaaactcctcactgcactacaactcagggccaacgtttaccccacgagagaatttctagccaggggtagacaagaccaatacatcaaggcgtgtaggcactgcgatgcggacaacgaatcctgcgcccacatcatcggcaactgcccagtgacacaggacgcccgaatcaagaggcacaattacatctgcgaactgcttctcgaggaggcgaagaagaaggactgggtagtgttcaaggaaccgcacataagggattccaacaaggaactgtacaaacctgacctgatatttgtgaaggatgggcgtgcacttgtcgtggatgtgacagtacggtatgaagcagccaaatcatcgctggaggaagccgctgcagagaaagtgagaaagtacaaacacctggaaacggaagtaagacatctcacgaatgcaaaggacgttacttttgtgggctttcccctaggagcgcgggggaaatggcaccaagataactttaaacttttgactgagcttggcctctccaaatcgaggcaagtgaaaatggcagagactttttccacagtagcgctcttttcatctgtggacattgtacatatgtttgccagtagggccagaaaatctatggttatgtgataataggctgccttctgcggggcttgccttctggccatgcccttcttctctcccttgcacctgtacctcttggtctttgaataaagcctgagtaggaaggaccggtaaaaaaaaaaaaaaaaaaaaaaaaaaaaaaacgttgactaaaaaaaaaaaaaaaaaaaaaaaaaaaaaaaaaaaaaaaaaaaaaaaaaaaaaaaaaaaaaaaaaaaaaa

SEQ ID NO: 10816 - DNA, 5264 bp, synthetic construct
  source 1..5264: mol_type = other DNA
gaaataagagagaaaagaagagtaagaagaaatataagagaattcgccaccatggcccctaagaaaaagcggaaggtgaatatcagcggctctagctgcggcagccccaacagcgccgacaccagcagcgacttcaaggacctgtggaccaagctgaaggaatgccacgaccgggaagtgcagggactccaggtgaaggtcaccaaactcaagcaagaaagaatcctggacgcccagagactggaagaattcttcaccaagaaccagcagctgagagagcagcagaaagtgctgcacgagacaatcaaggttctggaagatagactgcgggccggcctgtgcgacagatgcgccgtgaccgaggaacacatgcgcaaaaagcagcaggagttcgagaacattagacagcaaaatctgaaattgatcacagagctgatgaacgagagaaacacactgcaggaggagaacaagaagctgagcgagcagctgcaacagaagatcgagaatgatcagcaacaccaggccgctgagctggaatgtgaagaggacgtgatccccgacagcccaatcacagctttcagcttttctggcgtgaacagactgaggcggaaggaaaacccccacgtgcggtacatcgagcagacccataccaagctggaacacagcgtgtgtgccaacgagatgagaaaggtgtccaagtcctccacccatccccagcacaaccctaacgaaaatgagatcctggtggctgatacctacgaccagtctcagagccctatggccaaggcccacggcaccagctcttatacccctgataagagctccttcaacctggccaccgtggtggccgagacactgggcctgggcgtgcaggaggaaagcgagacacagggcccaatgagccctctgggagatgagctgtaccactgcctggaaggcaaccacaagaaacagccttttgagtccggctccgagactcctggaacaagcgagagcgctacacctgagggcagccctaagagaaaggtgtccagcgccgagggcgctgccaaggaagagcctaaacggagaagcgccagactgagcgccaagccccccgccaaggtggaagccaagcctaagaaggccgccgctaaggacaagagcagcgataagaaagtccagaccaagggcaagcggggcgccaaaggcaaacaggccgaggtggccaaccaggagacaaaggaagatctgcctgctgagaacggcgaaaccaagaccgaggaatctccagcttctgacgaggccggagagaaggaggccaaaagcgacagcggctctgagacacctggaacaagcgagagcgccaccccggaatcctatgaacaacttgcaccacaaccgtgtgtgggagaaactttacattctagcctcccacgagacagtgaactgtttgtgcctgaagaggggagcagcgagaaggagagcgaggacgcgccaaaaacatctcctccgacgcctgggaaacatggtttggaacagactggggaggaaaaagtgatggtgactgttcctgacaaaaatccaccttgtccttgctgtggtacccgggtaaactctgtgttgaatctgattgaacatctgaaagtgtcacacgggaaaaggggggtttgttttcggtgtgcaaaatgtggaaaggaaaatagtaactatcacagtgttgtttgtcattttaagaaatgcaggggtccagagacggagaaagccccagctggggagtggatttgtgaggtatgcaacagagattttacaaccaaaattggcctgggacaacacaagagattggcacacccagcagtgagaaatcaggaaaggatcgttgcttcccaaccgaaagaaacatcaaatagaggtgctcacaaaaggtgctggacaaaggaggaggaagaattactaataagactggaggctcagttcgagggaaacaaaaatattaataagcttattgcagaacacataaccaccaaaacagctaagcagatcagtgacaaaaggcgattgctgtccagaaagccagcagaggagccacgtgaggagcctggaacgtgtcatcacaccaggagagcagctgcgagcctgagaacggagcctgagatgagtcatcacgcccaggcagaggacagagataatggacctgggagacgccctctgccaggcagggcagctgccggagggagaacaatggacgagataagacgccaccctgataagggcaacggacagcagagacccaccaagcaaaaatcagaagaacagctgcaggcttactataaaaagacactagaggaacgactttcagctggggcacttaacaccttcccccgagcattcaagcaggtaatggaaggccgggatataaagctagtaatcaatcagacagcgcaggactgcttcggatgcctggaatccataagccaaataagaacggcaacccgagataaaaaggacacggtgacccgggagaaacacccaaagaaaccttttcagaagtggatgaagaagagagcaatcaaaaaaggtaattatcttcggttccagcgtttattttatcttgatagagggaaactggctaaaatcattttagatgatattgaatgcttgtcttgtgacataccactcagtgaaatttattcggtttttaaaacaagatgggaaacaactggtagctttaaaagccttggggactttaaaacttacgggaaggctgacaacactgccttcagagaattaattacggctaaagaaattgagaaaaatgtgcaggaaatgagcaaaggctcggctcccggtccagacgggattactcttggggacgtcgtaaagatggatcccgagttttcccggaccatggagattttcaatttatggttaacaactggtaaaatcccggacatggtgagggggtgcagaaccgttttgattccaaaatcatcaaagccggatcgtttgaaagacattaataactggagacctatcacgatcggttccatcttgctgagactgttctccaggattgtaacagctaggctgagcaaagcgtgccccctgaacccaaggcaaagaggctttatcagagcggcgggatgctctgaaaacttaaaactcctgcaaactataatttggtcggccaaaagagaacacagaccactgggtgttgtattcgtggacatcgccaaggcttttgacaccgtaagccaccagcacatcattcatgctttgcagcaaagagaggtggatccccacatcgtcggtctggtgagcaatatgtacgagaacatcagtacgtatatcaccacaaagaggaacacacacacagacaaaatccagatccgggttggagtaaagcagggtgacccgatgtcgccccttttatttaacctggcaatggaccctctattatgcaagctggaagagagtggcaaaggataccaccgaggacagagcagcatcacagcgatggcatttgcagacgatctggttttgctgagcgactcctgggaaaatatgaatacaaatattagcatactggagaccttctgcaatctgaccggactcaaaacacaggggcaaaagtgccacggcttttacatcaagccgacaaagaagtcttacaccatcaatgactgcgctgcctggactatcaacggcacacccctgaacatgatcgaccccggcgaatctgagaaatacctcggcctgcagtttgacccgtggattggaatagcaaggtccggtctctccacaaaactagatttttggcttcagcggatcgatcaagcaccacttaaaagactgcagaaaactgatattctcaaaacatacaccatccctcggctgatctacatagctgaccactcagaagtgaaaagcgcactactcgaaacccttgaccagaagatccggacagcggtcaaggaatggcttcacctacctccgtgcacctgcgatgccatcctgtactcgagcacgagagacggcggtttgggcatcaccaaattggcaggactgatccccagcgtgcaggcccgtagactgcatcggatcgcacagtcatctgacgatacgatgaaatgcttcatggaaaaagagaaaatggaacagctgcataagaaattgtggattcaagctggaggggacagagagaacataccctcgatttgggaagcaccaccgtcgagtgaaccaccaaacaacgtgagcacaaattcggaatgggaagcaccgacccagaaagataaatttccaaagccttgcaattggaggaaaaacgaattcaaaaaatggaccaaattggcatcccaaggccgcggaattgtaaattttgaaagagacaaaattagtaaccattggatccaatactacagacgcatacctcacaggaaactcctcactgcactacaactcagggccaacgtttaccccacgagagaatttctagccaggggtagacaagaccaatacatcaaggcgtgtaggcactgcgatgcggacaacgaatcctgcgcccacatcatcggcaactgcccagtgacacaggacgcccgaatcaagaggcacaattacatctgcgaactgcttctcgaggaggcgaagaagaaggactgggtagtgttcaaggaaccgcacataagggattccaacaaggaactgtacaaacctgacctgatatttgtgaaggatgggcgtgcacttgtcgtggatgtgacagtacggtatgaagcagccaaatcatcgctggaggaagccgctgcagagaaagtgagaaagtacaaacacctggaaacggaagtaagacatctcacgaatgcaaaggacgttacttttgtgggctttcccctaggagcgcgggggaaatggcaccaagataactttaaacttttgactgagcttggcctctccaaatcgaggcaagtgaaaatggcagagactttttccacagtagcgctcttttcatctgtggacattgtacatatgtttgccagtagggccagaaaatctatggttatgtgataataggctgccttctgcggggcttgccttctggccatgcccttcttctctcccttgcacctgtacctcttggtctttgaataaagcctgagtaggaaggaccggtaaaaaaaaaaaaaaaaaaaaaaaaaaaaaaacgttgactaaaaaaaaaaaaaaaaaaaaaaaaaaaaaaaaaaaaaaaaaaaaaaaaaaaaaaaaaaaaaaaaaaaaaa

SEQ ID NO: 10817 - DNA, 5264 bp, synthetic construct
  source 1..5264: mol_type = other DNA
gaaataagagagaaaagaagagtaagaagaaatataagagaattcgccaccatggcccctaagaaaaagcggaaggtgaatatcagcggctctagctgcggcagccccaacagcgccgacaccagcagcgacttcaaggacctgtggaccaagctgaaggaatgccacgaccgggaagtgcagggactccaggtgaaggtcaccaaactcaagcaagaaagaatcctggacgcccagagactggaagaattcttcaccaagaaccagcagctgagagagcagcagaaagtgctgcacgagacaatcaaggttctggaagatagactgcgggccggcctgtgcgacagatgcgccgtgaccgaggaacacatgcgcaaaaagcagcaggagttcgagaacattagacagcaaaatctgaaattgatcacagagctgatgaacgagagaaacacactgcaggaggagaacaagaagctgagcgagcagctgcaacagaagatcgagaatgatcagcaacaccaggccgctgagctggaatgtgaagaggacgtgatccccgacagcccaatcacagctttcagcttttctggcgtgaacagactgaggcggaaggaaaacccccacgtgcggtacatcgagcagacccataccaagctggaacacagcgtgtgtgccaacgagatgagaaaggtgtccaagtcctccacccatccccagcacaaccctaacgaaaatgagatcctggtggctgatacctacgaccagtctcagagccctatggccaaggcccacggcaccagctcttatacccctgataagagctccttcaacctggccaccgtggtggccgagacactgggcctgggcgtgcaggaggaaagcgagacacagggcccaatgagccctctgggagatgagctgtaccactgcctggaaggcaaccacaagaaacagccttttgagtccggctccgagactcctggaacaagcgagagcgctacacctgagggcagccctaagagaaaggtgtccagcgccgagggcgctgccaaggaagagcctaaacggagaagcgccagactgagcgccaagccccccgccaaggtggaagccaagcctaagaaggccgccgctaaggacaagagcagcgataagaaagtccagaccaagggcaagcggggcgccaaaggcaaacaggccgaggtggccaaccaggagacaaaggaagatctgcctgctgagaacggcgaaaccaagaccgaggaatctccagcttctgacgaggccggagagaaggaggccaaaagcgacagcggctctgagacacctggaacaagcgagagcgccaccccggaatcctatgaacaacttgcaccacaaccgtgtgtgggagaaactttacattctagcctcccacgagacagtgaactgtttgtgcctgaagaggggagcagcgagaaggagagcgaggacgcgccaaaaacatctcctccgacgcctgggaaacatggtttggaacagactggggaggaaaaagtgatggtgactgttcctgacaaaaatccaccttgtccttgctgtggtacccgggtaaactctgtgttgaatctgattgaacatctgaaagtgtcacacgggaaaaggggggtttgttttcggtgtgcaaaatgtggaaaggaaaatagtaactatcacagtgttgtttgtcattttaagaaatgcaggggtccagagacggagaaagccccagctggggagtggatttgtgaggtatgcaacagagattttacaaccaaaattggcctgggacaacacaagagattggcacacccagcagtgagaaatcaggaaaggatcgttgcttcccaaccgaaagaaacatcaaatagaggtgctcacaaaaggtgctggacaaaggaggaggaagaattactaataagactggaggctcagttcgagggaaacaaaaatattaataagcttattgcagaacacataaccaccaaaacagctaagcagatcagtgacaaaaggcgattgctgtccagaaagccagcagaggagccacgtgaggagcctggaacgtgtcatcacaccaggagagcagctgcgagcctgagaacggagcctgagatgagtcatcacgcccaggcagaggacagagataatggacctgggagacgccctctgccaggcagggcagctgccggagggagaacaatggacgagataagacgccaccctgataagggcaacggacagcagagacccaccaagcaaaaatcagaagaacagctgcaggcttactataaaaagacactagaggaacgactttcagctggggcacttaacaccttcccccgagcattcaagcaggtaatggaaggccgggatataaagctagtaatcaatcagacagcgcaggactgcttcggatgcctggaatccataagccaaataagaacggcaacccgagataaaaaggacacggtgacccgggagaaacacccaaagaaaccttttcagaagtggatgaagaagagagcaatcaaaaaaggtaattatcttcggttccagcgtttattttatcttgatagagggaaactggctaaaatcattttagatgatattgaatgcttgtcttgtcagataccactcagtgaaatttattcggtttttaaaacaagatgggaaacaactggtagctttaaaagccttggggactttaaaacttacgggaaggctgacaacactgccttcagagaattaattacggctaaagaaattgagaaaaatgtgcaggaaatgagcaaaggctcggctcccggtccagacgggattactcttggggacgtcgtaaagatggatcccgagttttcccggaccatggagattttcaatttatggttaacaactggtaaaatcccggacatggtgagggggtgcagaaccgttttgattccaaaatcatcaaagccggatcgtttgaaagacattaataactggagacctatcacgatcggttccatcttgctgagactgttctccaggattgtaacagctaggctgagcaaagcgtgccccctgaacccaaggcaaagaggctttatcagagcggcgggatgctctgaaaacttaaaactcctgcaaactataatttggtcggccaaaagagaacacagaccactgggtgttgtattcgtggacatcgccaaggcttttgacaccgtaagccaccagcacatcattcatgctttgcagcaaagagaggtggatccccacatcgtcggtctggtgagcaatatgtacgagaacatcagtacgtatatcaccacaaagaggaacacacacacagacaaaatccagatccgggttggagtaaagcagggtgacccgatgtcgccccttttatttaacctggcaatggaccctctattatgcaagctggaagagagtggcaaaggataccaccgaggacagagcagcatcacagcgatggcatttgcagacgatctggttttgctgagcgactcctgggaaaatatgaatacaaatattagcatactggagaccttctgcaatctgaccggactcaaaacacaggggcaaaagtgccacggcttttacatcaagccgacaaagaagtcttacaccatcaatgactgcgctgcctggactatcaacggcacacccctgaacatgatcgaccccggcgaatctgagaaatacctcggcctgcagtttgacccgtggattggaatagcaaggtccggtctctccacaaaactagatttttggcttcagcggatcgatcaagcaccacttaaacctctgcagaaaactgatattctcaaaacatacaccatccctcggctgatctacatagctgaccactcagaagtgaaaagcgcactactcgaaacccttgaccagaagatccggacagcggtcaaggaatggcttcacctacctccgtgcacctgcgatgccatcctgtactcgagcacgagagacggcggtttgggcatcaccaaattggcaggactgatccccagcgtgcaggcccgtagactgcatcggatcgcacagtcatctgacgatacgatgaaatgcttcatggaaaaagagaaaatggaacagctgcataagaaattgtggattcaagctggaggggacagagagaacataccctcgatttgggaagcaccaccgtcgagtgaaccaccaaacaacgtgagcacaaattcggaatgggaagcaccgacccagaaagataaatttccaaagccttgcaattggaggaaaaacgaattcaaaaaatggaccaaattggcatcccaaggccgcggaattgtaaattttgaaagagacaaaattagtaaccattggatccaatactacagacgcatacctcacaggaaactcctcactgcactacaactcagggccaacgtttaccccacgagagaatttctagccaggggtagacaagaccaatacatcaaggcgtgtaggcactgcgatgcggacaacgaatcctgcgcccacatcatcggcaactgcccagtgacacaggacgcccgaatcaagaggcacaattacatctgcgaactgcttctcgaggaggcgaagaagaaggactgggtagtgttcaaggaaccgcacataagggattccaacaaggaactgtacaaacctgacctgatatttgtgaaggatgggcgtgcacttgtcgtggatgtgacagtacggtatgaagcagccaaatcatcgctggaggaagccgctgcagagaaagtgagaaagtacaaacacctggaaacggaagtaagacatctcacgaatgcaaaggacgttacttttgtgggctttcccctaggagcgcgggggaaatggcaccaagataactttaaacttttgactgagcttggcctctccaaatcgaggcaagtgaaaatggcagagactttttccacagtagcgctcttttcatctgtggacattgtacatatgtttgccagtagggccagaaaatctatggttatgtgataataggctgccttctgcggggcttgccttctggccatgcccttcttctctcccttgcacctgtacctcttggtctttgaataaagcctgagtaggaaggaccggtaaaaaaaaaaaaaaaaaaaaaaaaaaaaaaacgttgactaaaaaaaaaaaaaaaaaaaaaaaaaaaaaaaaaaaaaaaaaaaaaaaaaaaaaaaaaaaaaaaaaaaaaa

SEQ ID NO: 10818 - DNA, 5264 bp, synthetic construct
  source 1..5264: mol_type = other DNA
gaaataagagagaaaagaagagtaagaagaaatataagagaattcgccaccatggcccctaagaaaaagcggaaggtgaatatcagcggctctagctgcggcagccccaacagcgccgacaccagcagcgacttcaaggacctgtggaccaagctgaaggaatgccacgaccgggaagtgcagggactccaggtgaaggtcaccaaactcaagcaagaaagaatcctggacgcccagagactggaagaattcttcaccaagaaccagcagctgagagagcagcagaaagtgctgcacgagacaatcaaggttctggaagatagactgcgggccggcctgtgcgacagatgcgccgtgaccgaggaacacatgcgcaaaaagcagcaggagttcgagaacattagacagcaaaatctgaaattgatcacagagctgatgaacgagagaaacacactgcaggaggagaacaagaagctgagcgagcagctgcaacagaagatcgagaatgatcagcaacaccaggccgctgagctggaatgtgaagaggacgtgatccccgacagcccaatcacagctttcagcttttctggcgtgaacagactgaggcggaaggaaaacccccacgtgcggtacatcgagcagacccataccaagctggaacacagcgtgtgtgccaacgagatgagaaaggtgtccaagtcctccacccatccccagcacaaccctaacgaaaatgagatcctggtggctgatacctacgaccagtctcagagccctatggccaaggcccacggcaccagctcttatacccctgataagagctccttcaacctggccaccgtggtggccgagacactgggcctgggcgtgcaggaggaaagcgagacacagggcccaatgagccctctgggagatgagctgtaccactgcctggaaggcaaccacaagaaacagccttttgagtccggctccgagactcctggaacaagcgagagcgctacacctgagggcagccctaagagaaaggtgtccagcgccgagggcgctgccaaggaagagcctaaacggagaagcgccagactgagcgccaagccccccgccaaggtggaagccaagcctaagaaggccgccgctaaggacaagagcagcgataagaaagtccagaccaagggcaagcggggcgccaaaggcaaacaggccgaggtggccaaccaggagacaaaggaagatctgcctgctgagaacggcgaaaccaagaccgaggaatctccagcttctgacgaggccggagagaaggaggccaaaagcgacagcggctctgagacacctggaacaagcgagagcgccaccccggaatcctatgaacaacttgcaccacaaccgtgtgtgggagaaactttacattctagcctcccacgagacagtgaactgtttgtgcctgaagaggggagcagcgagaaggagagcgaggacgcgccaaaaacatctcctccgacgcctgggaaacatggtttggaacagactggggaggaaaaagtgatggtgactgttcctgacaaaaatccaccttgtccttgctgtggtacccgggtaaactctgtgttgaatctgattgaacatctgaaagtgtcacacgggaaaaggggggtttgttttcggtgtgcaaaatgtggaaaggaaaatagtaactatcacagtgttgtttgtcattttaagaaatgcaggggtccagagacggagaaagccccagctggggagtggatttgtgaggtatgcaacagagattttacaaccaaaattggcctgggacaacacaagagattggcacacccagcagtgagaaatcaggaaaggatcgttgcttcccaaccgaaagaaacatcaaatagaggtgctcacaaaaggtgctggacaaaggaggaggaagaattactaataagactggaggctcagttcgagggaaacaaaaatattaataagcttattgcagaacacataaccaccaaaacagctaagcagatcagtgacaaaaggcgattgctgtccagaaagccagcagaggagccacgtgaggagcctggaacgtgtcatcacaccaggagagcagctgcgagcctgagaacggagcctgagatgagtcatcacgcccaggcagaggacagagataatggacctgggagacgccctctgccaggcagggcagctgccggagggagaacaatggacgagataagacgccaccctgataagggcaacggacagcagagacccaccaagcaaaaatcagaagaacagctgcaggcttactataaaaagacactagaggaacgactttcagctggggcacttaacaccttcccccgagcattcaagcaggtaatggaaggccgggatataaagctagtaatcaatcagacagcgcaggactgcttcggatgcctggaatccataagccaaataagaacggcaacccgagataaaaaggacacggtgacccgggagaaacacccaaagaaaccttttcagaagtggagaaagaagagagcaatcaaaaaaggtaattatcttcggttccagcgtttattttatcttgatagagggaaactggctaaaatcattttagatgatattgaatgcttgtcttgtgacataccactcagtgaaatttattcggtttttaaaacaagatgggaaacaactggtagctttaaaagccttggggactttaaaacttacgggaaggctgacaacactgccttcagagaattaattacggctaaagaaattgagaaaaatgtgcaggaaatgagcaaaggctcggctcccggtccagacgggattactcttggggacgtcgtaaagatggatcccgagttttcccggaccatggagattttcaatttatggttaacaactggtaaaatcccggacatggtgagggggtgcagaaccgttttgattccaaaatcatcaaagccggatcgtttgaaagacattaataactggagacctatcacgatcggttccatcttgctgagactgttctccaggattgtaacagctaggctgagcaaagcgtgccccctgaacccaaggcaaagaggctttatcagagcggcgggatgctctgaaaacttaaaactcctgcaaactataatttggtcggccaaaagagaacacagaccactgggtgttgtattcgtggacatcgccaaggcttttgacaccgtaagccaccagcacatcattcatgctttgcagcaaagagaggtggatccccacatcgtcggtctggtgagcaatatgtacgagaacatcagtacgtatatcaccacaaagaggaacacacacacagacaaaatccagatccgggttggagtaaagcagggtgacccgatgtcgccccttttatttaacctggcaatggaccctctattatgcaagctggaagagagtggcaaaggataccaccgaggacagagcagcatcacagcgatggcatttgcagacgatctggttttgctgagcgactcctgggaaaatatgaatacaaatattagcatactggagaccttctgcaatctgaccggactcaaaacacaggggcaaaagtgccacggcttttacatcaagccgacaaagaagtcttacaccatcaatgactgcgctgcctggactatcaacggcacacccctgaacatgatcgaccccggcgaatctgagaaatacctcggcctgcagtttgacccgtggattggaatagcaaggtccggtctctccacaaaactagatttttggcttcagcggatcgatcaagcaccacttaaacctctgcagaaaactgatattctcaaaacatacaccatccctcggctgatctacatagctgaccactcagaagtgaaaagcgcactactcgaaacccttgaccagaagatccggacagcggtcaaggaatggcttcacctacctccgtgcacctgcgatgccatcctgtactcgagcacgagagacggcggtttgggcatcaccaaattggcaggactgatccccagcgtgcaggcccgtagactgcatcggatcgcacagtcatctgacgatacgatgaaatgcttcatggaaaaagagaaaatggaacagctgcataagaaattgtggattcaagctggaggggacagagagaacataccctcgatttgggaagcaccaccgtcgagtgaaccaccaaacaacgtgagcacaaattcggaatgggaagcaccgacccagaaagataaatttccaaagccttgcaattggaggaaaaacgaattcaaaaaatggaccaaattggcatcccaaggccgcggaattgtaaattttgaaagagacaaaattagtaaccattggatccaatactacagacgcatacctcacaggaaactcctcactgcactacaactcagggccaacgtttaccccacgagagaatttctagccaggggtagacaagaccaatacatcaaggcgtgtaggcactgcgatgcggacaacgaatcctgcgcccacatcatcggcaactgcccagtgacacaggacgcccgaatcaagaggcacaattacatctgcgaactgcttctcgaggaggcgaagaagaaggactgggtagtgttcaaggaaccgcacataagggattccaacaaggaactgtacaaacctgacctgatatttgtgaaggatgggcgtgcacttgtcgtggatgtgacagtacggtatgaagcagccaaatcatcgctggaggaagccgctgcagagaaagtgagaaagtacaaacacctggaaacggaagtaagacatctcacgaatgcaaaggacgttacttttgtgggctttcccctaggagcgcgggggaaatggcaccaagataactttaaacttttgactgagcttggcctctccaaatcgaggcaagtgaaaatggcagagactttttccacagtagcgctcttttcatctgtggacattgtacatatgtttgccagtagggccagaaaatctatggttatgtgataataggctgccttctgcggggcttgccttctggccatgcccttcttctctcccttgcacctgtacctcttggtctttgaataaagcctgagtaggaaggaccggtaaaaaaaaaaaaaaaaaaaaaaaaaaaaaaacgttgactaaaaaaaaaaaaaaaaaaaaaaaaaaaaaaaaaaaaaaaaaaaaaaaaaaaaaaaaaaaaaaaaaaaaaa

SEQ ID NO: 10819 - DNA, 5264 bp, synthetic construct
  source 1..5264: mol_type = other DNA
gaaataagagagaaaagaagagtaagaagaaatataagagaattcgccaccatggcccctaagaaaaagcggaaggtgaatatcagcggctctagctgcggcagccccaacagcgccgacaccagcagcgacttcaaggacctgtggaccaagctgaaggaatgccacgaccgggaagtgcagggactccaggtgaaggtcaccaaactcaagcaagaaagaatcctggacgcccagagactggaagaattcttcaccaagaaccagcagctgagagagcagcagaaagtgctgcacgagacaatcaaggttctggaagatagactgcgggccggcctgtgcgacagatgcgccgtgaccgaggaacacatgcgcaaaaagcagcaggagttcgagaacattagacagcaaaatctgaaattgatcacagagctgatgaacgagagaaacacactgcaggaggagaacaagaagctgagcgagcagctgcaacagaagatcgagaatgatcagcaacaccaggccgctgagctggaatgtgaagaggacgtgatccccgacagcccaatcacagctttcagcttttctggcgtgaacagactgaggcggaaggaaaacccccacgtgcggtacatcgagcagacccataccaagctggaacacagcgtgtgtgccaacgagatgagaaaggtgtccaagtcctccacccatccccagcacaaccctaacgaaaatgagatcctggtggctgatacctacgaccagtctcagagccctatggccaaggcccacggcaccagctcttatacccctgataagagctccttcaacctggccaccgtggtggccgagacactgggcctgggcgtgcaggaggaaagcgagacacagggcccaatgagccctctgggagatgagctgtaccactgcctggaaggcaaccacaagaaacagccttttgagtccggctccgagactcctggaacaagcgagagcgctacacctgagggcagccctaagagaaaggtgtccagcgccgagggcgctgccaaggaagagcctaaacggagaagcgccagactgagcgccaagccccccgccaaggtggaagccaagcctaagaaggccgccgctaaggacaagagcagcgataagaaagtccagaccaagggcaagcggggcgccaaaggcaaacaggccgaggtggccaaccaggagacaaaggaagatctgcctgctgagaacggcgaaaccaagaccgaggaatctccagcttctgacgaggccggagagaaggaggccaaaagcgacagcggctctgagacacctggaacaagcgagagcgccaccccggaatcctatgaacaacttgcaccacaaccgtgtgtgggagaaaagttacattctagcctcccacgagacagtgaactgtttgtgcctgaagaggggagcagcgagaaggagagcgaggacgcgccaaaaacatctcctccgacgcctgggaaacatggtttggaacagactggggaggaaaaagtgatggtgactgttcctgacaaaaatccaccttgtccttgctgtggtacccgggtaaactctgtgttgaatctgattgaacatctgaaagtgtcacacgggaaaaggggggtttgttttcggtgtgcaaaatgtggaaaggaaaatagtaactatcacagtgttgtttgtcattttaagaaatgcaggggtccagagacggagaaagccccagctggggagtggatttgtgaggtatgcaacagagattttacaaccaaaattggcctgggacaacacaagagattggcacacccagcagtgagaaatcaggaaaggatcgttgcttcccaaccgaaagaaacatcaaatagaggtgctcacaaaaggtgctggacaaaggaggaggaagaattactaataagactggaggctcagttcgagggaaacaaaaatattaataagcttattgcagaacacataaccaccaaaacagctaagcagatcagtgacaaaaggcgattgctgtccagaaagccagcagaggagccacgtgaggagcctggaacgtgtcatcacaccaggagagcagctgcgagcctgagaacggagcctgagatgagtcatcacgcccaggcagaggacagagataatggacctgggagacgccctctgccaggcagggcagctgccggagggagaacaatggacgagataagacgccaccctgataagggcaacggacagcagagacccaccaagcaaaaatcagaagaacagctgcaggcttactataaaaagacactagaggaacgactttcagctggggcacttaacaccttcccccgagcattcaagcaggtaatggaaggccgggatataaagctagtaatcaatcagacagcgcaggactgcttcggatgcctggaatccataagccaaataagaacggcaacccgagataaaaaggacacggtgacccgggagaaacacccaaagaaaccttttcagaagtggatgaagaagagagcaatcaaaaaaggtaattatcttcggttccagcgtttattttatcttgatagagggaaactggctaaaatcattttagatgatattgaatgcttgtcttgtgacataccactcagtgaaatttattcggtttttaaaacaagatgggaaacaactggtagctttaaaagccttggggactttaaaacttacgggaaggctgacaacactgccttcagagaattaattacggctaaagaaattgagaaaaatgtgcaggaaatgagcaaaggctcggctcccggtccagacgggattactcttggggacgtcgtaaagatggatcccgagttttcccggaccatggagattttcaatttatggttaacaactggtaaaatcccggacatggtgagggggtgcagaaccgttttgattccaaaatcatcaaagccggatcgtttgaaagacattaataactggagacctatcacgatcggttccatcttgctgagactgttctccaggattgtaacagctaggctgagcaaagcgtgccccctgaacccaaggcaaagaggctttatcagagcggcgggatgctctgaaaacttaaaactcctgcaaactataatttggtcggccaaaagagaacacagaccactgggtgttgtattcgtggacatcgccaaggcttttgacaccgtaagccaccagcacatcattcatgctttgcagcaaagagaggtggatccccacatcgtcggtctggtgagcaatatgtacgagaacatcagtacgtatatcaccacaaagaggaacacacacacagacaaaatccagatccgggttggagtaaagcagggtgacccgatgtcgccccttttatttaacctggcaatggaccctctattatgcaagctggaagagagtggcaaaggataccaccgaggacagagcagcatcacagcgatggcatttgcagacgatctggttttgctgagcgactcctgggaaaatatgaatacaaatattagcatactggagaccttctgcaatctgaccggactcaaaacacaggggcaaaagtgccacggcttttacatcaagccgacaaagaagtcttacaccatcaatgactgcgctgcctggactatcaacggcacacccctgaacatgatcgaccccggcgaatctgagaaatacctcggcctgcagtttgacccgtggattggaatagcaaggtccggtctctccacaaaactagatttttggcttcagcggatcgatcaagcaccacttaaacctctgcagaaaactgatattctcaaaacatacaccatccctcggctgatctacatagctgaccactcagaagtgaaaagcgcactactcgaaacccttgaccagaagatccggacagcggtcaaggaatggcttcacctacctccgtgcacctgcgatgccatcctgtactcgagcacgagagacggcggtttgggcatcaccaaattggcaggactgatccccagcgtgcaggcccgtagactgcatcggatcgcacagtcatctgacgatacgatgaaatgcttcatggaaaaagagaaaatggaacagctgcataagaaattgtggattcaagctggaggggacagagagaacataccctcgatttgggaagcaccaccgtcgagtgaaccaccaaacaacgtgagcacaaattcggaatgggaagcaccgacccagaaagataaatttccaaagccttgcaattggaggaaaaacgaattcaaaaaatggaccaaattggcatcccaaggccgcggaattgtaaattttgaaagagacaaaattagtaaccattggatccaatactacagacgcatacctcacaggaaactcctcactgcactacaactcagggccaacgtttaccccacgagagaatttctagccaggggtagacaagaccaatacatcaaggcgtgtaggcactgcgatgcggacaacgaatcctgcgcccacatcatcggcaactgcccagtgacacaggacgcccgaatcaagaggcacaattacatctgcgaactgcttctcgaggaggcgaagaagaaggactgggtagtgttcaaggaaccgcacataagggattccaacaaggaactgtacaaacctgacctgatatttgtgaaggatgggcgtgcacttgtcgtggatgtgacagtacggtatgaagcagccaaatcatcgctggaggaagccgctgcagagaaagtgagaaagtacaaacacctggaaacggaagtaagacatctcacgaatgcaaaggacgttacttttgtgggctttcccctaggagcgcgggggaaatggcaccaagataactttaaacttttgactgagcttggcctctccaaatcgaggcaagtgaaaatggcagagactttttccacagtagcgctcttttcatctgtggacattgtacatatgtttgccagtagggccagaaaatctatggttatgtgataataggctgccttctgcggggcttgccttctggccatgcccttcttctctcccttgcacctgtacctcttggtctttgaataaagcctgagtaggaaggaccggtaaaaaaaaaaaaaaaaaaaaaaaaaaaaaaacgttgactaaaaaaaaaaaaaaaaaaaaaaaaaaaaaaaaaaaaaaaaaaaaaaaaaaaaaaaaaaaaaaaaaaaaaa

SEQ ID NO: 10820 - DNA, 5264 bp, synthetic construct
  source 1..5264: mol_type = other DNA
gaaataagagagaaaagaagagtaagaagaaatataagagaattcgccaccatggcccctaagaaaaagcggaaggtgaatatcagcggctctagctgcggcagccccaacagcgccgacaccagcagcgacttcaaggacctgtggaccaagctgaaggaatgccacgaccgggaagtgcagggactccaggtgaaggtcaccaaactcaagcaagaaagaatcctggacgcccagagactggaagaattcttcaccaagaaccagcagctgagagagcagcagaaagtgctgcacgagacaatcaaggttctggaagatagactgcgggccggcctgtgcgacagatgcgccgtgaccgaggaacacatgcgcaaaaagcagcaggagttcgagaacattagacagcaaaatctgaaattgatcacagagctgatgaacgagagaaacacactgcaggaggagaacaagaagctgagcgagcagctgcaacagaagatcgagaatgatcagcaacaccaggccgctgagctggaatgtgaagaggacgtgatccccgacagcccaatcacagctttcagcttttctggcgtgaacagactgaggcggaaggaaaacccccacgtgcggtacatcgagcagacccataccaagctggaacacagcgtgtgtgccaacgagatgagaaaggtgtccaagtcctccacccatccccagcacaaccctaacgaaaatgagatcctggtggctgatacctacgaccagtctcagagccctatggccaaggcccacggcaccagctcttatacccctgataagagctccttcaacctggccaccgtggtggccgagacactgggcctgggcgtgcaggaggaaagcgagacacagggcccaatgagccctctgggagatgagctgtaccactgcctggaaggcaaccacaagaaacagccttttgagtccggctccgagactcctggaacaagcgagagcgctacacctgagggcagccctaagagaaaggtgtccagcgccgagggcgctgccaaggaagagcctaaacggagaagcgccagactgagcgccaagccccccgccaaggtggaagccaagcctaagaaggccgccgctaaggacaagagcagcgataagaaagtccagaccaagggcaagcggggcgccaaaggcaaacaggccgaggtggccaaccaggagacaaaggaagatctgcctgctgagaacggcgaaaccaagaccgaggaatctccagcttctgacgaggccggagagaaggaggccaaaagcgacagcggctctgagacacctggaacaagcgagagcgccaccccggaatcctatgaacaacttgcaccacaaccgtgtgtgggagaaactttacattctagcctcccacgagacagtgaactgtttgtgcctgaagaggggagcagcgagaaggagagcgaggacgcgccaaaaacatctcctccgacgcctgggaaacatggtttggaacagactggggaggaaaaagtgatggtgactgttcctgacaaaaatccaccttgtccttgctgtggtacccgggtaaactctgtgttgaatctgattgaacatctgaaagtgtcacacgggaaaaggggggtttgttttcggtgtgcaaaatgtggaaaggaaaatagtaactatcacagtgttgtttgtcattttaagaaatgcaggggtccagagacggagaaagccccagctggggagtggatttgtgaggtatgcaacagagattttacaaccaaaattggcctgggacaacacaagagattggcacacccagcagtgagaaatcaggaaaggatcgttgcttcccaaccgaaagaaacatcaaatagaggtgctcacaaaaggtgctggacaaaggaggaggaagaattactaataagactggaggctcagttcgagggaaacaaaaatattaataagcttattgcagaacacataaccaccaaaacagctaagcagatcagtgacaaaaggcgattgctgtccagaaagccagcagaggagccacgtgaggagcctggaacgtgtcatcacaccaggagagcagctgcgagcctgagaacggagcctgagatgagtcatcacgcccaggcagaggacagagataatggacctgggagacgccctctgccaggcagggcagctgccggagggagaacaatggacgagataagacgccaccctgataagggcaacggacagcagagacccaccaagcaaaaatcagaagaacagctgcaggcttactataaaaagacactagaggaacgactttcagctggggcacttaacaccttcccccgagcattcaagcaggtaatggaaggccgggatataaagctagtaatcaatcagacagcgcaggactgcttcggatgcctggaatccataagccaaataagaacggcaacccgatacaaaaaggacacggtgacccgggagaaacacccaaagaaaccttttcagaagtggatgaagaagagagcaatcaaaaaaggtaattatcttcggttccagcgtttattttatcttgatagagggaaactggctaaaatcattttagatgatattgaatgcttgtcttgtgacataccactcagtgaaatttattcggtttttaaaacaagatgggaaacaactggtagctttaaaagccttggggactttaaaacttacgggaaggctgacaacactgccttcagagaattaattacggctaaagaaattgagaaaaatgtgcaggaaatgagcaaaggctcggctcccggtccagacgggattactcttggggacgtcgtaaagatggatcccgagttttcccggaccatggagattttcaatttatggttaacaactggtaaaatcccggacatggtgagggggtgcagaaccgttttgattccaaaatcatcaaagccggatcgtttgaaagacattaataactggagacctatcacgatcggttccatcttgctgagactgttctccaggattgtaacagctaggctgagcaaagcgtgccccctgaacccaaggcaaagaggctttatcagagcggcgggatgctctgaaaacttaaaactcctgcaaactataatttggtcggccaaaagagaacacagaccactgggtgttgtattcgtggacatcgccaaggcttttgacaccgtaagccaccagcacatcattcatgctttgcagcaaagagaggtggatccccacatcgtcggtctggtgagcaatatgtacgagaacatcagtacgtatatcaccacaaagaggaacacacacacagacaaaatccagatccgggttggagtaaagcagggtgacccgatgtcgccccttttatttaacctggcaatggaccctctattatgcaagctggaagagagtggcaaaggataccaccgaggacagagcagcatcacagcgatggcatttgcagacgatctggttttgctgagcgactcctgggaaaatatgaatacaaatattagcatactggagaccttctgcaatctgaccggactcaaaacacaggggcaaaagtgccacggcttttacatcaagccgacaaagaagtcttacaccatcaatgactgcgctgcctggactatcaacggcacacccctgaacatgatcgaccccggcgaatctgagaaatacctcggcctgcagtttgacccgtggattggaatagcaaggtccggtctctccacaaaactagatttttggcttcagcggatcgatcaagcaccacttaaacctctgcagaaaactgatattctcaaaacatacaccatccctcggctgatctacatagctgaccactcagaagtgaaaagcgcactactcgaaacccttgaccagaagatccggacagcggtcaaggaatggcttcacctacctccgtgcacctgcgatgccatcctgtactcgagcacgagagacggcggtttgggcatcaccaaattggcaggactgatccccagcgtgcaggcccgtagactgcatcggatcgcacagtcatctgacgatacgatgaaatgcttcatggaaaaagagaaaatggaacagctgcataagaaattgtggattcaagctggaggggacagagagaacataccctcgatttgggaagcaccaccgtcgagtgaaccaccaaacaacgtgagcacaaattcggaatgggaagcaccgacccagaaagataaatttccaaagccttgcaattggaggaaaaacgaattcaaaaaatggaccaaattggcatcccaaggccgcggaattgtaaattttgaaagagacaaaattagtaaccattggatccaatactacagacgcatacctcacaggaaactcctcactgcactacaactcagggccaacgtttaccccacgagagaatttctagccaggggtagacaagaccaatacatcaaggcgtgtaggcactgcgatgcggacaacgaatcctgcgcccacatcatcggcaactgcccagtgacacaggacgcccgaatcaagaggcacaattacatctgcgaactgcttctcgaggaggcgaagaagaaggactgggtagtgttcaaggaaccgcacataagggattccaacaaggaactgtacaaacctgacctgatatttgtgaaggatgggcgtgcacttgtcgtggatgtgacagtacggtatgaagcagccaaatcatcgctggaggaagccgctgcagagaaagtgagaaagtacaaacacctggaaacggaagtaagacatctcacgaatgcaaaggacgttacttttgtgggctttcccctaggagcgcgggggaaatggcaccaagataactttaaacttttgactgagcttggcctctccaaatcgaggcaagtgaaaatggcagagactttttccacagtagcgctcttttcatctgtggacattgtacatatgtttgccagtagggccagaaaatctatggttatgtgataataggctgccttctgcggggcttgccttctggccatgcccttcttctctcccttgcacctgtacctcttggtctttgaataaagcctgagtaggaaggaccggtaaaaaaaaaaaaaaaaaaaaaaaaaaaaaaacgttgactaaaaaaaaaaaaaaaaaaaaaaaaaaaaaaaaaaaaaaaaaaaaaaaaaaaaaaaaaaaaaaaaaaaaaa

SEQ ID NO: 10821 - DNA, 5264 bp, synthetic construct
  source 1..5264: mol_type = other DNA
gaaataagagagaaaagaagagtaagaagaaatataagagaattcgccaccatggcccctaagaaaaagcggaaggtgaatatcagcggctctagctgcggcagccccaacagcgccgacaccagcagcgacttcaaggacctgtggaccaagctgaaggaatgccacgaccgggaagtgcagggactccaggtgaaggtcaccaaactcaagcaagaaagaatcctggacgcccagagactggaagaattcttcaccaagaaccagcagctgagagagcagcagaaagtgctgcacgagacaatcaaggttctggaagatagactgcgggccggcctgtgcgacagatgcgccgtgaccgaggaacacatgcgcaaaaagcagcaggagttcgagaacattagacagcaaaatctgaaattgatcacagagctgatgaacgagagaaacacactgcaggaggagaacaagaagctgagcgagcagctgcaacagaagatcgagaatgatcagcaacaccaggccgctgagctggaatgtgaagaggacgtgatccccgacagcccaatcacagctttcagcttttctggcgtgaacagactgaggcggaaggaaaacccccacgtgcggtacatcgagcagacccataccaagctggaacacagcgtgtgtgccaacgagatgagaaaggtgtccaagtcctccacccatccccagcacaaccctaacgaaaatgagatcctggtggctgatacctacgaccagtctcagagccctatggccaaggcccacggcaccagctcttatacccctgataagagctccttcaacctggccaccgtggtggccgagacactgggcctgggcgtgcaggaggaaagcgagacacagggcccaatgagccctctgggagatgagctgtaccactgcctggaaggcaaccacaagaaacagccttttgagtccggctccgagactcctggaacaagcgagagcgctacacctgagggcagccctaagagaaaggtgtccagcgccgagggcgctgccaaggaagagcctaaacggagaagcgccagactgagcgccaagccccccgccaaggtggaagccaagcctaagaaggccgccgctaaggacaagagcagcgataagaaagtccagaccaagggcaagcggggcgccaaaggcaaacaggccgaggtggccaaccaggagacaaaggaagatctgcctgctgagaacggcgaaaccaagaccgaggaatctccagcttctgacgaggccggagagaaggaggccaaaagcgacagcggctctgagacacctggaacaagcgagagcgccaccccggaatcctatgaacaacttgcaccacaaccgtgtgtgggagaaactttacattctagcctcccacgagacagtgaactgtttgtgcctgaagaggggagcagcgagaaggagagcgaggacgcgccaaaaacatctcctccgacgcctgggaaacatggtttggaacagactggggaggaaaaagtgatggtgactgttcctgacaaaaatccaccttgtccttgctgtggtacccgggtaaactctgtgttgaatctgattgaacatctgaaagtgtcacacgggaaaaggggggtttgttttcggtgtgcaaaatgtggaaaggaaaatagtaactatcacagtgttgtttgtcattttaagaaatgcaggggtccagagacggagaaagccccagctggggagtggatttgtgaggtatgcaacagagattttacaaccaaaattggcctgggacaacacaagagattggcacacccagcagtgagaaatcaggaaaggatcgttgcttcccaaccgaaagaaacatcaaatagaggtgctcacaaaaggtgctggacaaaggaggaggaagaattactaataagactggaggctcagttcgagggaaacaaaaatattaataagcttattgcagaacacataaccaccaaaacagctaagcagatcagtgacaaaaggcgattgctgtccagaaagccagcagaggagccacgtgaggagcctggaacgtgtcatcacaccaggagagcagctgcgagcctgagaacggagcctgagatgagtcatcacgcccaggcagaggacagagataatggacctgggagacgccctctgccaggcagggcagctgccggagggagaacaatggacgagataagacgccaccctgataagggcaacggacagcagagacccaccaagcaaaaatcagaagaacagctgcaggcttactataaaaagacactagaggaacgactttcagctggggcacttaacaccttcccccgagcattcaagcaggtaatggaaggccgggatataaagctagtaatcaatcagacagcgcaggactgcttcggatgcctggaatccataagccaaataagaacggcaacccgagataaaaaggacacggtgacccgggagaaacacccaaagaaaccttttcagaagtggatgaagaagagagcaatcaaaaaaggtaattatcttcggttccagcgtttattttatcttgatagagggaaactggctaaaatcattttagatgatattgaatgcttgtcttgttggataccactcagtgaaatttattcggtttttaaaacaagatgggaaacaactggtagctttaaaagccttggggactttaaaacttacgggaaggctgacaacactgccttcagagaattaattacggctaaagaaattgagaaaaatgtgcaggaaatgagcaaaggctcggctcccggtccagacgggattactcttggggacgtcgtaaagatggatcccgagttttcccggaccatggagattttcaatttatggttaacaactggtaaaatcccggacatggtgagggggtgcagaaccgttttgattccaaaatcatcaaagccggatcgtttgaaagacattaataactggagacctatcacgatcggttccatcttgctgagactgttctccaggattgtaacagctaggctgagcaaagcgtgccccctgaacccaaggcaaagaggctttatcagagcggcgggatgctctgaaaacttaaaactcctgcaaactataatttggtcggccaaaagagaacacagaccactgggtgttgtattcgtggacatcgccaaggcttttgacaccgtaagccaccagcacatcattcatgctttgcagcaaagagaggtggatccccacatcgtcggtctggtgagcaatatgtacgagaacatcagtacgtatatcaccacaaagaggaacacacacacagacaaaatccagatccgggttggagtaaagcagggtgacccgatgtcgccccttttatttaacctggcaatggaccctctattatgcaagctggaagagagtggcaaaggataccaccgaggacagagcagcatcacagcgatggcatttgcagacgatctggttttgctgagcgactcctgggaaaatatgaatacaaatattagcatactggagaccttctgcaatctgaccggactcaaaacacaggggcaaaagtgccacggcttttacatcaagccgacaaagaagtcttacaccatcaatgactgcgctgcctggactatcaacggcacacccctgaacatgatcgaccccggcgaatctgagaaatacctcggcctgcagtttgacccgtggattggaatagcaaggtccggtctctccacaaaactagatttttggcttcagcggatcgatcaagcaccacttaaacctctgcagaaaactgatattctcaaaacatacaccatccctcggctgatctacatagctgaccactcagaagtgaaaagcgcactactcgaaacccttgaccagaagatccggacagcggtcaaggaatggcttcacctacctccgtgcacctgcgatgccatcctgtactcgagcacgagagacggcggtttgggcatcaccaaattggcaggactgatccccagcgtgcaggcccgtagactgcatcggatcgcacagtcatctgacgatacgatgaaatgcttcatggaaaaagagaaaatggaacagctgcataagaaattgtggattcaagctggaggggacagagagaacataccctcgatttgggaagcaccaccgtcgagtgaaccaccaaacaacgtgagcacaaattcggaatgggaagcaccgacccagaaagataaatttccaaagccttgcaattggaggaaaaacgaattcaaaaaatggaccaaattggcatcccaaggccgcggaattgtaaattttgaaagagacaaaattagtaaccattggatccaatactacagacgcatacctcacaggaaactcctcactgcactacaactcagggccaacgtttaccccacgagagaatttctagccaggggtagacaagaccaatacatcaaggcgtgtaggcactgcgatgcggacaacgaatcctgcgcccacatcatcggcaactgcccagtgacacaggacgcccgaatcaagaggcacaattacatctgcgaactgcttctcgaggaggcgaagaagaaggactgggtagtgttcaaggaaccgcacataagggattccaacaaggaactgtacaaacctgacctgatatttgtgaaggatgggcgtgcacttgtcgtggatgtgacagtacggtatgaagcagccaaatcatcgctggaggaagccgctgcagagaaagtgagaaagtacaaacacctggaaacggaagtaagacatctcacgaatgcaaaggacgttacttttgtgggctttcccctaggagcgcgggggaaatggcaccaagataactttaaacttttgactgagcttggcctctccaaatcgaggcaagtgaaaatggcagagactttttccacagtagcgctcttttcatctgtggacattgtacatatgtttgccagtagggccagaaaatctatggttatgtgataataggctgccttctgcggggcttgccttctggccatgcccttcttctctcccttgcacctgtacctcttggtctttgaataaagcctgagtaggaaggaccggtaaaaaaaaaaaaaaaaaaaaaaaaaaaaaaacgttgactaaaaaaaaaaaaaaaaaaaaaaaaaaaaaaaaaaaaaaaaaaaaaaaaaaaaaaaaaaaaaaaaaaaaaa

SEQ ID NO: 10822 - DNA, 5264 bp, synthetic construct
  source 1..5264: mol_type = other DNA
gaaataagagagaaaagaagagtaagaagaaatataagagaattcgccaccatggcccctaagaaaaagcggaaggtgaatatcagcggctctagctgcggcagccccaacagcgccgacaccagcagcgacttcaaggacctgtggaccaagctgaaggaatgccacgaccgggaagtgcagggactccaggtgaaggtcaccaaactcaagcaagaaagaatcctggacgcccagagactggaagaattcttcaccaagaaccagcagctgagagagcagcagaaagtgctgcacgagacaatcaaggttctggaagatagactgcgggccggcctgtgcgacagatgcgccgtgaccgaggaacacatgcgcaaaaagcagcaggagttcgagaacattagacagcaaaatctgaaattgatcacagagctgatgaacgagagaaacacactgcaggaggagaacaagaagctgagcgagcagctgcaacagaagatcgagaatgatcagcaacaccaggccgctgagctggaatgtgaagaggacgtgatccccgacagcccaatcacagctttcagcttttctggcgtgaacagactgaggcggaaggaaaacccccacgtgcggtacatcgagcagacccataccaagctggaacacagcgtgtgtgccaacgagatgagaaaggtgtccaagtcctccacccatccccagcacaaccctaacgaaaatgagatcctggtggctgatacctacgaccagtctcagagccctatggccaaggcccacggcaccagctcttatacccctgataagagctccttcaacctggccaccgtggtggccgagacactgggcctgggcgtgcaggaggaaagcgagacacagggcccaatgagccctctgggagatgagctgtaccactgcctggaaggcaaccacaagaaacagccttttgagtccggctccgagactcctggaacaagcgagagcgctacacctgagggcagccctaagagaaaggtgtccagcgccgagggcgctgccaaggaagagcctaaacggagaagcgccagactgagcgccaagccccccgccaaggtggaagccaagcctaagaaggccgccgctaaggacaagagcagcgataagaaagtccagaccaagggcaagcggggcgccaaaggcaaacaggccgaggtggccaaccaggagacaaaggaagatctgcctgctgagaacggcgaaaccaagaccgaggaatctccagcttctgacgaggccggagagaaggaggccaaaagcgacagcggctctgagacacctggaacaagcgagagcgccaccccggaatcctatgaacaacttgcaccacaaccgtgtgtgggagaaactttacattctagcctcccacgagacagtgaactgtttgtgcctgaagaggggagcagcgagaaggagagcgaggacgcgccaaaaacatctcctccgacgcctgggaaacatggtttggaacagactggggaggaaaaagtgatggtgactgttcctgacaaaaatccaccttgtccttgctgtggtacccgggtaaactctgtgttgaatctgattgaacatctgaaagtgtcacacgggaaaaggggggtttgttttcggtgtgcaaaatgtggaaaggaaaatagtaactatcacagtgttgtttgtcattttaagaaatgcaggggtccagagacggagaaagccccagctggggagtggatttgtgaggtatgcaacagagattttacaaccaaaattggcctgggacaacacaagagattggcacacccagcagtgagaaatcaggaaaggatcgttgcttcccaaccgaaagaaacatcaaatagaggtgctcacaaaaggtgctggacaaaggaggaggaagaattactaataagactggaggctcagttcgagggaaacaaaaatattaataagcttattgcagaacacataaccaccaaaacagctaagcagatcagtgacaaaaggcgattgctgtccagaaagccagcagaggagccacgtgaggagcctggaacgtgtcatcacaccaggagagcagctgcgagcctgagaacggagcctgagatgagtcatcacgcccaggcagaggacagagataatggacctgggagacgccctctgccaggcagggcagctgccggagggagaacaatggacgagataagacgccaccctgataagggcaacggacagcagagacccaccaagcaaaaatcagaagaacagctgcaggcttactataaaaagacactagaggaacgactttcagctggggcacttaacaccttcccccgagcattcaagcaggtaatggaaggccgggatataaagctagtaatcaatcagacagcgcaggactgcttcggatgcctggaatccataagccaaataagaacggcaacccgagataaaaaggacacggtgacccgggagaaacacccaaagaaaccttttcagaagtggatgaagaagagagcaatcaaaaaaggtaattatcttcggttccagcgtttattttatcttgatagagggaaactggctaaaatcattttagatgatattgaatgcttgtcttgtgacataccactcagtgaaatttattcggtttttaaaacaagatgggaaacaactggtagctttaaaagccttggggactttaaaacttacgggaaggctgacaacactgccttcagagaattaattacggctaaagaaattgagaaaaatgtgcaggaaatgagcaaaggctcggctcccggtccagacgggattactcttggggacgtcgtaaagatggatcccgagttttcccggaccatggagattttcaatttatggttaacaactggtaaaatcccggacatggtgagggggtgcagaaccgttttgattccaaaatcatcaaagccggatcgtttgaaagacattaataactggagacctatcacgatcggttccatcttgctgagactgttctccaggattgtaacagctaggctgagcaaagcgtgccccctgaacccaaggcaaagaggctttatcagagcggcgggatgctctgaaaacttaaaactcctgcaaactataatttggtcggccaaaagagaacacagaccactgggtgttgtattcgtggacatcgccaaggcttttgacaccgtaagccaccagcacatcattcatgctttgcagcaaagagaggtggatccccacatcgtcggtctggtgagcaatatgtacgagaacatcagtacgtatatcaccacaaagaggaacacacacacagacaaaatccagatccgggttggagtaaagcagggtgacccgatgtcgccccttttatttaacctggcaatggaccctctattatgcaagctggaagagagtggcaaaggataccaccgaggacagagcagcatcacagcgatggcatttgcagacgatctggttttgctgagcgactcctgggaaaatatgaatacaaatattagcatactggagaccttctgcaatctgaccggactcaaaacacaggggcaaaagtgccacggcttttacatcaagccgacaaagaagtcttacaccatcaatgactgcgctgcctggactatcaacggcacacccctgaacatgatcgaccccggcgaatctgagaaatacctcggcctgcagtttgacccgtggattggaatagcaaggtccggtctctccacaaaactacagttttggcttcagcggatcgatcaagcaccacttaaacctctgcagaaaactgatattctcaaaacatacaccatccctcggctgatctacatagctgaccactcagaagtgaaaagcgcactactcgaaacccttgaccagaagatccggacagcggtcaaggaatggcttcacctacctccgtgcacctgcgatgccatcctgtactcgagcacgagagacggcggtttgggcatcaccaaattggcaggactgatccccagcgtgcaggcccgtagactgcatcggatcgcacagtcatctgacgatacgatgaaatgcttcatggaaaaagagaaaatggaacagctgcataagaaattgtggattcaagctggaggggacagagagaacataccctcgatttgggaagcaccaccgtcgagtgaaccaccaaacaacgtgagcacaaattcggaatgggaagcaccgacccagaaagataaatttccaaagccttgcaattggaggaaaaacgaattcaaaaaatggaccaaattggcatcccaaggccgcggaattgtaaattttgaaagagacaaaattagtaaccattggatccaatactacagacgcatacctcacaggaaactcctcactgcactacaactcagggccaacgtttaccccacgagagaatttctagccaggggtagacaagaccaatacatcaaggcgtgtaggcactgcgatgcggacaacgaatcctgcgcccacatcatcggcaactgcccagtgacacaggacgcccgaatcaagaggcacaattacatctgcgaactgcttctcgaggaggcgaagaagaaggactgggtagtgttcaaggaaccgcacataagggattccaacaaggaactgtacaaacctgacctgatatttgtgaaggatgggcgtgcacttgtcgtggatgtgacagtacggtatgaagcagccaaatcatcgctggaggaagccgctgcagagaaagtgagaaagtacaaacacctggaaacggaagtaagacatctcacgaatgcaaaggacgttacttttgtgggctttcccctaggagcgcgggggaaatggcaccaagataactttaaacttttgactgagcttggcctctccaaatcgaggcaagtgaaaatggcagagactttttccacagtagcgctcttttcatctgtggacattgtacatatgtttgccagtagggccagaaaatctatggttatgtgataataggctgccttctgcggggcttgccttctggccatgcccttcttctctcccttgcacctgtacctcttggtctttgaataaagcctgagtaggaaggaccggtaaaaaaaaaaaaaaaaaaaaaaaaaaaaaaacgttgactaaaaaaaaaaaaaaaaaaaaaaaaaaaaaaaaaaaaaaaaaaaaaaaaaaaaaaaaaaaaaaaaaaaaaa

SEQ ID NO: 10823 - DNA, 5264 bp, synthetic construct
  source 1..5264: mol_type = other DNA
gaaataagagagaaaagaagagtaagaagaaatataagagaattcgccaccatggcccctaagaaaaagcggaaggtgaatatcagcggctctagctgcggcagccccaacagcgccgacaccagcagcgacttcaaggacctgtggaccaagctgaaggaatgccacgaccgggaagtgcagggactccaggtgaaggtcaccaaactcaagcaagaaagaatcctggacgcccagagactggaagaattcttcaccaagaaccagcagctgagagagcagcagaaagtgctgcacgagacaatcaaggttctggaagatagactgcgggccggcctgtgcgacagatgcgccgtgaccgaggaacacatgcgcaaaaagcagcaggagttcgagaacattagacagcaaaatctgaaattgatcacagagctgatgaacgagagaaacacactgcaggaggagaacaagaagctgagcgagcagctgcaacagaagatcgagaatgatcagcaacaccaggccgctgagctggaatgtgaagaggacgtgatccccgacagcccaatcacagctttcagcttttctggcgtgaacagactgaggcggaaggaaaacccccacgtgcggtacatcgagcagacccataccaagctggaacacagcgtgtgtgccaacgagatgagaaaggtgtccaagtcctccacccatccccagcacaaccctaacgaaaatgagatcctggtggctgatacctacgaccagtctcagagccctatggccaaggcccacggcaccagctcttatacccctgataagagctccttcaacctggccaccgtggtggccgagacactgggcctgggcgtgcaggaggaaagcgagacacagggcccaatgagccctctgggagatgagctgtaccactgcctggaaggcaaccacaagaaacagccttttgagtccggctccgagactcctggaacaagcgagagcgctacacctgagggcagccctaagagaaaggtgtccagcgccgagggcgctgccaaggaagagcctaaacggagaagcgccagactgagcgccaagccccccgccaaggtggaagccaagcctaagaaggccgccgctaaggacaagagcagcgataagaaagtccagaccaagggcaagcggggcgccaaaggcaaacaggccgaggtggccaaccaggagacaaaggaagatctgcctgctgagaacggcgaaaccaagaccgaggaatctccagcttctgacgaggccggagagaaggaggccaaaagcgacagcggctctgagacacctggaacaagcgagagcgccaccccggaatcctatgaacaacttgcaccacaaccgtgtgtgggagaaactttacattctagcctcccacgagacagtgaactgtttgtgcctgaagaggggagcagcgagaaggagagcgaggacgcgccaaaaacatctcctccgacgcctgggaaacatggtttggaacagactggggaggaaaaagtgatggtgactgttcctgacaaaaatccaccttgtccttgctgtggtacccgggtaaactctgtgttgaatctgattgaacatctgaaagtgtcacacgggaaaaggggggtttgttttcggtgtgcaaaatgtggaaaggaaaatagtaactatcacagtgttgtttgtcattttaagaaatgcaggggtccagagacggagaaagccccagctggggagtggatttgtgaggtatgcaacagagattttacaaccaaaattggcctgggacaacacaagagattggcacacccagcagtgagaaatcaggaaaggatcgttgcttcccaaccgaaagaaacatcaaatagaggtgctcacaaaaggtgctggacaaaggaggaggaagaattactaataagactggaggctcagttcgagggaaacaaaaatattaataagcttattgcagaacacataaccaccaaaacagctaagcagatcagtgacaaaaggcgattgctgtccagaaagccagcagaggagccacgtgaggagcctggaacgtgtcatcacaccaggagagcagctgcgagcctgagaacggagcctgagatgagtcatcacgcccaggcagaggacagagataatggacctgggagacgccctctgccaggcagggcagctgccggagggagaacaatggacgagataagacgccaccctgataagggcaacggacagcagagacccaccaagcaaaaatcagaagaacagctgcaggcttactataaaaagacactagaggaacgactttcagctggggcacttaacaccttcccccgagcattcaagcaggtaatggaaggccgggatataaagctagtaatcaatcagacagcgcaggactgcttcggatgcctggaatccataagccaaataagaacggcaacccgagataaaaaggacacggtgacccgggagaaacacccaaagaaaccttttcagaagtggatgaagaagagagcaatcaaaaaaggtaattatcttcggttccagcgtttattttatcttgatagagggaaactggctaaaatcattttagatgatattgaatgcttgtcttgtgacataccactcagtgaaatttattcggtttttaaaacaagatgggaaacaactggtagctttaaaagccttggggactttaaaacttacgggaaggctgacaacactgccttcagagaattaattacggctaaagaaattgagaaaaatgtgcaggaaatgagcaaaggctcggctcccggtccagacgggattactcttggggacgtcgtaaagatggatcccgagttttcccggaccatggagattttcaatttatggttaacaactggtaaaatcccggacatggtgagggggtgcagaaccgttttgattccaaaatcatcaaagccggatcgtttgaaagacattaataactggagacctatcacgatcggttccatcttgctgagactgttctccaggattgtaacagctaggctgagcaaagcgtgccccctgaacccaaggcaaagaggctttatcagagcggcgggatgctctgaaaacttaaaactcctgcaaactataatttggtcggccaaaagagaacacagaccactgggtgttgtattcgtggacatcgccaaggcttttgacaccgtaagccaccagcacatcattcatgctttgcagcaaagagaggtggatccccacatcgtcggtctggtgagcaatatgtacgagaacatcagtacgtatatcaccacaaagaggaacacacacacagacaaaatccagatccgggttggagtaaagcagggtgacccgatgtcgccccttttatttaacctggcaatggaccctctattatgcaagctggaagagagtggcaaaggataccaccgaggacagagcagcatcacagcgatggcatttgcagacgatctggttttgctgagcgactcctgggaaaatatgaatacaaatattagcatactggagaccttctgcaatctgaccggactcaaaacacaggggcaaaagtgccacggcttttacatcaagccgacaaagaagtcttacaccatcaatgactgcgctgcctggactatcaacggcacacccctgaacatgatcgaccccggcgaatctgagaaatacctcggcctgcagtttgacccgtggattggaatagcaaggtccggtctctccacaaaactagatttttggagacagcggatcgatcaagcaccacttaaacctctgcagaaaactgatattctcaaaacatacaccatccctcggctgatctacatagctgaccactcagaagtgaaaagcgcactactcgaaacccttgaccagaagatccggacagcggtcaaggaatggcttcacctacctccgtgcacctgcgatgccatcctgtactcgagcacgagagacggcggtttgggcatcaccaaattggcaggactgatccccagcgtgcaggcccgtagactgcatcggatcgcacagtcatctgacgatacgatgaaatgcttcatggaaaaagagaaaatggaacagctgcataagaaattgtggattcaagctggaggggacagagagaacataccctcgatttgggaagcaccaccgtcgagtgaaccaccaaacaacgtgagcacaaattcggaatgggaagcaccgacccagaaagataaatttccaaagccttgcaattggaggaaaaacgaattcaaaaaatggaccaaattggcatcccaaggccgcggaattgtaaattttgaaagagacaaaattagtaaccattggatccaatactacagacgcatacctcacaggaaactcctcactgcactacaactcagggccaacgtttaccccacgagagaatttctagccaggggtagacaagaccaatacatcaaggcgtgtaggcactgcgatgcggacaacgaatcctgcgcccacatcatcggcaactgcccagtgacacaggacgcccgaatcaagaggcacaattacatctgcgaactgcttctcgaggaggcgaagaagaaggactgggtagtgttcaaggaaccgcacataagggattccaacaaggaactgtacaaacctgacctgatatttgtgaaggatgggcgtgcacttgtcgtggatgtgacagtacggtatgaagcagccaaatcatcgctggaggaagccgctgcagagaaagtgagaaagtacaaacacctggaaacggaagtaagacatctcacgaatgcaaaggacgttacttttgtgggctttcccctaggagcgcgggggaaatggcaccaagataactttaaacttttgactgagcttggcctctccaaatcgaggcaagtgaaaatggcagagactttttccacagtagcgctcttttcatctgtggacattgtacatatgtttgccagtagggccagaaaatctatggttatgtgataataggctgccttctgcggggcttgccttctggccatgcccttcttctctcccttgcacctgtacctcttggtctttgaataaagcctgagtaggaaggaccggtaaaaaaaaaaaaaaaaaaaaaaaaaaaaaaacgttgactaaaaaaaaaaaaaaaaaaaaaaaaaaaaaaaaaaaaaaaaaaaaaaaaaaaaaaaaaaaaaaaaaaaaaa

SEQ ID NO: 10824 - DNA, 5264 bp, synthetic construct
  source 1..5264: mol_type = other DNA
gaaataagagagaaaagaagagtaagaagaaatataagagaattcgccaccatggcccctaagaaaaagcggaaggtgaatatcagcggctctagctgcggcagccccaacagcgccgacaccagcagcgacttcaaggacctgtggaccaagctgaaggaatgccacgaccgggaagtgcagggactccaggtgaaggtcaccaaactcaagcaagaaagaatcctggacgcccagagactggaagaattcttcaccaagaaccagcagctgagagagcagcagaaagtgctgcacgagacaatcaaggttctggaagatagactgcgggccggcctgtgcgacagatgcgccgtgaccgaggaacacatgcgcaaaaagcagcaggagttcgagaacattagacagcaaaatctgaaattgatcacagagctgatgaacgagagaaacacactgcaggaggagaacaagaagctgagcgagcagctgcaacagaagatcgagaatgatcagcaacaccaggccgctgagctggaatgtgaagaggacgtgatccccgacagcccaatcacagctttcagcttttctggcgtgaacagactgaggcggaaggaaaacccccacgtgcggtacatcgagcagacccataccaagctggaacacagcgtgtgtgccaacgagatgagaaaggtgtccaagtcctccacccatccccagcacaaccctaacgaaaatgagatcctggtggctgatacctacgaccagtctcagagccctatggccaaggcccacggcaccagctcttatacccctgataagagctccttcaacctggccaccgtggtggccgagacactgggcctgggcgtgcaggaggaaagcgagacacagggcccaatgagccctctgggagatgagctgtaccactgcctggaaggcaaccacaagaaacagccttttgagtccggctccgagactcctggaacaagcgagagcgctacacctgagggcagccctaagagaaaggtgtccagcgccgagggcgctgccaaggaagagcctaaacggagaagcgccagactgagcgccaagccccccgccaaggtggaagccaagcctaagaaggccgccgctaaggacaagagcagcgataagaaagtccagaccaagggcaagcggggcgccaaaggcaaacaggccgaggtggccaaccaggagacaaaggaagatctgcctgctgagaacggcgaaaccaagaccgaggaatctccagcttctgacgaggccggagagaaggaggccaaaagcgacagcggctctgagacacctggaacaagcgagagcgccaccccggaatcctatgaacaacttgcaccacaaccgtgtgtgggagaaactttacattctagcctcccacgagacagtgaactgtttgtgcctgaagaggggagcagcgagaaggagagcgaggacgcgccaaaaacatctcctccgacgcctgggaaacatggtttggaacagactggggaggaaaaagtgatggtgactgttcctgacaaaaatccaccttgtccttgctgtggtacccgggtaaactctgtgttgaatctgattgaacatctgaaagtgtcacacgggaaaaggggggtttgttttcggtgtgcaaaatgtggaaaggaaaatagtaactatcacagtgttgtttgtcattttaagaaatgcaggggtccagagacggagaaagccccagctggggagtggatttgtgaggtatgcaacagagattttacaaccaaaattggcctgggacaacacaagagattggcacacccagcagtgagaaatcaggaaaggatcgttgcttcccaaccgaaagaaacatcaaatagaggtgctcacaaaaggtgctggacaaaggaggaggaagaattactaataagactggaggctcagttcgagggaaacaaaaatattaataagcttattgcagaacacataaccaccaaaacagctaagcagatcagtgacaaaaggcgattgctgtccagaaagccagcagaggagccacgtgaggagcctggaacgtgtcatcacaccaggagagcagctgcgagcctgagaacggagcctgagatgagtcatcacgcccaggcagaggacagagataatggacctgggagacgccctctgccaggcagggcagctgccggagggagaacaatggacgagataagacgccaccctgataagggcaacggacagcagagacccaccaagcaaaaatcagaagaacagctgcaggcttactataaaaagacactagaggaacgactttcagctggggcacttaacaccttcccccgagcattcaagcaggtaatggaaggccgggatataaagctagtaatcaatcagacagcgcaggactgcttcggatgcctggaatccataagccaaataagaacggcaacccgagataaaaaggacacggtgacccgggagaaacacccaaagaaaccttttcagaagtggatgaagaagagagcaatcaaaaaaggtaattatcttcggttccagcgtttattttatcttgatagagggaaactggctaaaatcattttagatgatattgaaaagttgtcttgtgacataccactcagtgaaatttattcggtttttaaaacaagatgggaaacaactggtagctttaaaagccttggggactttaaaacttacgggaaggctgacaacactgccttcagagaattaattacggctaaagaaattgagaaaaatgtgcaggaaatgagcaaaggctcggctcccggtccagacgggattactcttggggacgtcgtaaagatggatcccgagttttcccggaccatggagattttcaatttatggttaacaactggtaaaatcccggacatggtgagggggtgcagaaccgttttgattccaaaatcatcaaagccggatcgtttgaaagacattaataactggagacctatcacgatcggttccatcttgctgagactgttctccaggattgtaacagctaggctgagcaaagcgtgccccctgaacccaaggcaaagaggctttatcagagcggcgggatgctctgaaaacttaaaactcctgcaaactataatttggtcggccaaaagagaacacagaccactgggtgttgtattcgtggacatcgccaaggcttttgacaccgtaagccaccagcacatcattcatgctttgcagcaaagagaggtggatccccacatcgtcggtctggtgagcaatatgtacgagaacatcagtacgtatatcaccacaaagaggaacacacacacagacaaaatccagatccgggttggagtaaagcagggtgacccgatgtcgccccttttatttaacctggcaatggaccctctattatgcaagctggaagagagtggcaaaggataccaccgaggacagagcagcatcacagcgatggcatttgcagacgatctggttttgctgagcgactcctgggaaaatatgaatacaaatattagcatactggagaccttctgcaatctgaccggactcaaaacacaggggcaaaagtgccacggcttttacatcaagccgacaaagaagtcttacaccatcaatgactgcgctgcctggactatcaacggcacacccctgaacatgatcgaccccggcgaatctgagaaatacctcggcctgcagtttgacccgtggattggaatagcaaggtccggtctctccacaaaactagatttttggcttcagcggatcgatcaagcaccacttaaacctctgcagaaaactgatattctcaaaacatacaccatccctcggctgatctacatagctgaccactcagaagtgaaaagcgcactactcgaaacccttgaccagaagatccggacagcggtcaaggaatggcttcacctacctccgtgcacctgcgatgccatcctgtactcgagcacgagagacggcggtttgggcatcaccaaattggcaggactgatccccagcgtgcaggcccgtagactgcatcggatcgcacagtcatctgacgatacgatgaaatgcttcatggaaaaagagaaaatggaacagctgcataagaaattgtggattcaagctggaggggacagagagaacataccctcgatttgggaagcaccaccgtcgagtgaaccaccaaacaacgtgagcacaaattcggaatgggaagcaccgacccagaaagataaatttccaaagccttgcaattggaggaaaaacgaattcaaaaaatggaccaaattggcatcccaaggccgcggaattgtaaattttgaaagagacaaaattagtaaccattggatccaatactacagacgcatacctcacaggaaactcctcactgcactacaactcagggccaacgtttaccccacgagagaatttctagccaggggtagacaagaccaatacatcaaggcgtgtaggcactgcgatgcggacaacgaatcctgcgcccacatcatcggcaactgcccagtgacacaggacgcccgaatcaagaggcacaattacatctgcgaactgcttctcgaggaggcgaagaagaaggactgggtagtgttcaaggaaccgcacataagggattccaacaaggaactgtacaaacctgacctgatatttgtgaaggatgggcgtgcacttgtcgtggatgtgacagtacggtatgaagcagccaaatcatcgctggaggaagccgctgcagagaaagtgagaaagtacaaacacctggaaacggaagtaagacatctcacgaatgcaaaggacgttacttttgtgggctttcccctaggagcgcgggggaaatggcaccaagataactttaaacttttgactgagcttggcctctccaaatcgaggcaagtgaaaatggcagagactttttccacagtagcgctcttttcatctgtggacattgtacatatgtttgccagtagggccagaaaatctatggttatgtgataataggctgccttctgcggggcttgccttctggccatgcccttcttctctcccttgcacctgtacctcttggtctttgaataaagcctgagtaggaaggaccggtaaaaaaaaaaaaaaaaaaaaaaaaaaaaaaacgttgactaaaaaaaaaaaaaaaaaaaaaaaaaaaaaaaaaaaaaaaaaaaaaaaaaaaaaaaaaaaaaaaaaaaaaa

SEQ ID NO: 10825 - DNA, 5264 bp, synthetic construct
  source 1..5264: mol_type = other DNA
gaaataagagagaaaagaagagtaagaagaaatataagagaattcgccaccatggcccctaagaaaaagcggaaggtgaatatcagcggctctagctgcggcagccccaacagcgccgacaccagcagcgacttcaaggacctgtggaccaagctgaaggaatgccacgaccgggaagtgcagggactccaggtgaaggtcaccaaactcaagcaagaaagaatcctggacgcccagagactggaagaattcttcaccaagaaccagcagctgagagagcagcagaaagtgctgcacgagacaatcaaggttctggaagatagactgcgggccggcctgtgcgacagatgcgccgtgaccgaggaacacatgcgcaaaaagcagcaggagttcgagaacattagacagcaaaatctgaaattgatcacagagctgatgaacgagagaaacacactgcaggaggagaacaagaagctgagcgagcagctgcaacagaagatcgagaatgatcagcaacaccaggccgctgagctggaatgtgaagaggacgtgatccccgacagcccaatcacagctttcagcttttctggcgtgaacagactgaggcggaaggaaaacccccacgtgcggtacatcgagcagacccataccaagctggaacacagcgtgtgtgccaacgagatgagaaaggtgtccaagtcctccacccatccccagcacaaccctaacgaaaatgagatcctggtggctgatacctacgaccagtctcagagccctatggccaaggcccacggcaccagctcttatacccctgataagagctccttcaacctggccaccgtggtggccgagacactgggcctgggcgtgcaggaggaaagcgagacacagggcccaatgagccctctgggagatgagctgtaccactgcctggaaggcaaccacaagaaacagccttttgagtccggctccgagactcctggaacaagcgagagcgctacacctgagggcagccctaagagaaaggtgtccagcgccgagggcgctgccaaggaagagcctaaacggagaagcgccagactgagcgccaagccccccgccaaggtggaagccaagcctaagaaggccgccgctaaggacaagagcagcgataagaaagtccagaccaagggcaagcggggcgccaaaggcaaacaggccgaggtggccaaccaggagacaaaggaagatctgcctgctgagaacggcgaaaccaagaccgaggaatctccagcttctgacgaggccggagagaaggaggccaaaagcgacagcggctctgagacacctggaacaagcgagagcgccaccccggaatcctatgaacaacttgcaccacaaccgtgtgtgggagaaactttacattctagcctcccacgagacagtgaactgtttgtgcctgaagaggggagcagcgagaaggagagcgaggacgcgccaaaaacatctcctccgacgcctgggaaacatggtttggaacagactggggaggaaaaagtgatggtgactgttcctgacaaaaatccaccttgtccttgctgtggtacccgggtaaactctgtgttgaatctgattgaacatctgaaagtgtcacacgggaaaaggggggtttgttttcggtgtgcaaaatgtggaaaggaaaatagtaactatcacagtgttgtttgtcattttaagaaatgcaggggtccagagacggagaaagccccagctggggagtggatttgtgaggtatgcaacagagattttacaaccaaaattggcctgggacaacacaagagattggcacacccagcagtgagaaatcaggaaaggatcgttgcttcccaaccgaaagaaacatcaaatagaggtgctcacaaaaggtgctggacaaaggaggaggaagaattactaataagactggaggctcagttcgagggaaacaaaaatattaataagcttattgcagaacacataaccaccaaaacagctaagcagatcagtgacaaaaggcgattgctgtccagaaagccagcagaggagccacgtgaggagcctggaacgtgtcatcacaccaggagagcagctgcgagcctgagaacggagcctgagatgagtcatcacgcccaggcagaggacagagataatggacctgggagacgccctctgccaggcagggcagctgccggagggagaacaatggacgagataagacgccaccctgataagggcaacggacagcagagacccaccaagcaaaaatcagaagaacagctgcaggcttactataaaaagacactagaggaacgactttcagctggggcacttaacaccttcccccgagcattcaagcaggtaatggaaggccgggatataaagctagtaatcaatcagacagcgcaggactgcttcggatgcctggaatccataagccaaataagaacggcaacccgagataaaaaggacacggtgacccgggagaaacacccaaagaaaccttttcagaagtggatgaagaagagagcaatcaaaaaaggtaattatcttcggttccagcgtttattttatcttgatagagggaaactggctaaaatcattttagatgatattgaatgcttgtcttgtgacataccactcagtgaaatttattcggtttttaaaacaagatgggaaacaactggtagctttaaaagccttggggactttaaaacttacgggaaggctgacaacactgccttcagagaattaattacggctaaagaaattgagaaaaatgtgcaggaaatgagcaaaggctcggctcccggtccagacgggattactcttggggacgtcgtaaagatggatcccgagttttcccggaccatggagattttcaatttatggttaacaactggtaaaatcccggacatggtgagggggtgcagaaccgttttgattccaaaatcatcaaagccggatcgtttgaaagacattaataactggagacctatcacgatcggttccatcttgctgagactgttctccaggattgtaacagctaggctgagcaaagcgtgccccctgaacccaaggcaaagaggctttatcagagcggcgggatgctctgaaaacttaaaactcctgcaaactataatttggtcggccaaaagagaacacagaccactgggtgttgtattcgtggacatcgccaaggcttttgacaccgtaagccaccagcacatcattcatgctttgcagcaaagagaggtggatccccacatcgtcggtctggtgagcaatatgtacgagaacatcagtacgtatatcaccacaaagaggaacacacacacagacaaaatccagatccgggttggagtaaagcagggtgacccgatgtcgccccttttatttaacctggcaatggaccctctattatgcaagctggaagagagtggcaaaggataccaccgaggacagagcagcatcacagcgatggcatttgcagacgatctggttttgctgagcgactcctgggaaaatatgaatacaaatattagcatactggagaccttctgcaatctgaccggactcaaaacacaggggcaaaagtgccacggcttttacatcaagccgacaaagaagtcttacaccatcaatgactgcgctgcctggactatcaacggcacacccctgaacatgatcgaccccggcgaatctgagaaatacctcggcctgcagtttgacccgtggattggaatagcaaggtccggtctctccacaaaactagatttttggcttcagcggaaggatcaagcaccacttaaacctctgcagaaaactgatattctcaaaacatacaccatccctcggctgatctacatagctgaccactcagaagtgaaaagcgcactactcgaaacccttgaccagaagatccggacagcggtcaaggaatggcttcacctacctccgtgcacctgcgatgccatcctgtactcgagcacgagagacggcggtttgggcatcaccaaattggcaggactgatccccagcgtgcaggcccgtagactgcatcggatcgcacagtcatctgacgatacgatgaaatgcttcatggaaaaagagaaaatggaacagctgcataagaaattgtggattcaagctggaggggacagagagaacataccctcgatttgggaagcaccaccgtcgagtgaaccaccaaacaacgtgagcacaaattcggaatgggaagcaccgacccagaaagataaatttccaaagccttgcaattggaggaaaaacgaattcaaaaaatggaccaaattggcatcccaaggccgcggaattgtaaattttgaaagagacaaaattagtaaccattggatccaatactacagacgcatacctcacaggaaactcctcactgcactacaactcagggccaacgtttaccccacgagagaatttctagccaggggtagacaagaccaatacatcaaggcgtgtaggcactgcgatgcggacaacgaatcctgcgcccacatcatcggcaactgcccagtgacacaggacgcccgaatcaagaggcacaattacatctgcgaactgcttctcgaggaggcgaagaagaaggactgggtagtgttcaaggaaccgcacataagggattccaacaaggaactgtacaaacctgacctgatatttgtgaaggatgggcgtgcacttgtcgtggatgtgacagtacggtatgaagcagccaaatcatcgctggaggaagccgctgcagagaaagtgagaaagtacaaacacctggaaacggaagtaagacatctcacgaatgcaaaggacgttacttttgtgggctttcccctaggagcgcgggggaaatggcaccaagataactttaaacttttgactgagcttggcctctccaaatcgaggcaagtgaaaatggcagagactttttccacagtagcgctcttttcatctgtggacattgtacatatgtttgccagtagggccagaaaatctatggttatgtgataataggctgccttctgcggggcttgccttctggccatgcccttcttctctcccttgcacctgtacctcttggtctttgaataaagcctgagtaggaaggaccggtaaaaaaaaaaaaaaaaaaaaaaaaaaaaaaacgttgactaaaaaaaaaaaaaaaaaaaaaaaaaaaaaaaaaaaaaaaaaaaaaaaaaaaaaaaaaaaaaaaaaaaaaa

SEQ ID NO: 10826 - DNA, 5264 bp, synthetic construct
  source 1..5264: mol_type = other DNA
gaaataagagagaaaagaagagtaagaagaaatataagagaattcgccaccatggcccctaagaaaaagcggaaggtgaatatcagcggctctagctgcggcagccccaacagcgccgacaccagcagcgacttcaaggacctgtggaccaagctgaaggaatgccacgaccgggaagtgcagggactccaggtgaaggtcaccaaactcaagcaagaaagaatcctggacgcccagagactggaagaattcttcaccaagaaccagcagctgagagagcagcagaaagtgctgcacgagacaatcaaggttctggaagatagactgcgggccggcctgtgcgacagatgcgccgtgaccgaggaacacatgcgcaaaaagcagcaggagttcgagaacattagacagcaaaatctgaaattgatcacagagctgatgaacgagagaaacacactgcaggaggagaacaagaagctgagcgagcagctgcaacagaagatcgagaatgatcagcaacaccaggccgctgagctggaatgtgaagaggacgtgatccccgacagcccaatcacagctttcagcttttctggcgtgaacagactgaggcggaaggaaaacccccacgtgcggtacatcgagcagacccataccaagctggaacacagcgtgtgtgccaacgagatgagaaaggtgtccaagtcctccacccatccccagcacaaccctaacgaaaatgagatcctggtggctgatacctacgaccagtctcagagccctatggccaaggcccacggcaccagctcttatacccctgataagagctccttcaacctggccaccgtggtggccgagacactgggcctgggcgtgcaggaggaaagcgagacacagggcccaatgagccctctgggagatgagctgtaccactgcctggaaggcaaccacaagaaacagccttttgagtccggctccgagactcctggaacaagcgagagcgctacacctgagggcagccctaagagaaaggtgtccagcgccgagggcgctgccaaggaagagcctaaacggagaagcgccagactgagcgccaagccccccgccaaggtggaagccaagcctaagaaggccgccgctaaggacaagagcagcgataagaaagtccagaccaagggcaagcggggcgccaaaggcaaacaggccgaggtggccaaccaggagacaaaggaagatctgcctgctgagaacggcgaaaccaagaccgaggaatctccagcttctgacgaggccggagagaaggaggccaaaagcgacagcggctctgagacacctggaacaagcgagagcgccaccccggaatcctatgaacaacttgcaccacaaccgtgtgtgggagaaactttacattctagcctcccacgagacagtgaactgtttgtgcctgaagaggggagcagcgagaaggagagcgaggacgcgccaaaaacatctcctccgacgcctgggaaacatggtttggaacagactggggaggaaaaagtgatggtgactgttcctgacaaaaatccaccttgtccttgctgtggtacccgggtaaactctgtgttgaatctgattgaacatctgaaagtgtcacacgggaaaaggggggtttgttttcggtgtgcaaaatgtggaaaggaaaatagtaactatcacagtgttgtttgtcattttaagaaatgcaggggtccagagacggagaaagccccagctggggagtggatttgtgaggtatgcaacagagattttacaaccaaaattggcctgggacaacacaagagattggcacacccagcagtgagaaatcaggaaaggatcgttgcttcccaaccgaaagaaacatcaaatagaggtgctcacaaaaggtgctggacaaaggaggaggaagaattactaataagactggaggctcagttcgagggaaacaaaaatattaataagcttattgcagaacacataaccaccaaaacagctaagcagatcagtgacaaaaggcgattgctgtccagaaagccagcagaggagccacgtgaggagcctggaacgtgtcatcacaccaggagagcagctgcgagcctgagaacggagcctgagatgagtcatcacgcccaggcagaggacagagataatggacctgggagacgccctctgccaggcagggcagctgccggagggagaacaatggacgagataagacgccaccctgataagggcaacggacagcagagacccaccaagcaaaaatcagaagaacagctgcaggcttactataaaaagacactagaggaacgactttcagctggggcacttaacaccttcccccgagcattcaagcaggtaatggaaggccgggatataaagctagtaatcaatcagacagcgcaggactgcttcggatgcctggaatccataagccaaataagaacggcaacccgagataaaaaggacacggtgacccgggagaaacacccaaagaaaccttttcagaagtggatgaagaagagagcaatcaaaaaaggtaattatcttcggttccagcgtttattttatcttgatagagggaaactggctaaaatcattttagatgatattgaatgcttgtcttgtagaataccactcagtgaaatttattcggtttttaaaacaagatgggaaacaactggtagctttaaaagccttggggactttaaaacttacgggaaggctgacaacactgccttcagagaattaattacggctaaagaaattgagaaaaatgtgcaggaaatgagcaaaggctcggctcccggtccagacgggattactcttggggacgtcgtaaagatggatcccgagttttcccggaccatggagattttcaatttatggttaacaactggtaaaatcccggacatggtgagggggtgcagaaccgttttgattccaaaatcatcaaagccggatcgtttgaaagacattaataactggagacctatcacgatcggttccatcttgctgagactgttctccaggattgtaacagctaggctgagcaaagcgtgccccctgaacccaaggcaaagaggctttatcagagcggcgggatgctctgaaaacttaaaactcctgcaaactataatttggtcggccaaaagagaacacagaccactgggtgttgtattcgtggacatcgccaaggcttttgacaccgtaagccaccagcacatcattcatgctttgcagcaaagagaggtggatccccacatcgtcggtctggtgagcaatatgtacgagaacatcagtacgtatatcaccacaaagaggaacacacacacagacaaaatccagatccgggttggagtaaagcagggtgacccgatgtcgccccttttatttaacctggcaatggaccctctattatgcaagctggaagagagtggcaaaggataccaccgaggacagagcagcatcacagcgatggcatttgcagacgatctggttttgctgagcgactcctgggaaaatatgaatacaaatattagcatactggagaccttctgcaatctgaccggactcaaaacacaggggcaaaagtgccacggcttttacatcaagccgacaaagaagtcttacaccatcaatgactgcgctgcctggactatcaacggcacacccctgaacatgatcgaccccggcgaatctgagaaatacctcggcctgcagtttgacccgtggattggaatagcaaggtccggtctctccacaaaactagatttttggcttcagcggatcgatcaagcaccacttaaacctctgcagaaaactgatattctcaaaacatacaccatccctcggctgatctacatagctgaccactcagaagtgaaaagcgcactactcgaaacccttgaccagaagatccggacagcggtcaaggaatggcttcacctacctccgtgcacctgcgatgccatcctgtactcgagcacgagagacggcggtttgggcatcaccaaattggcaggactgatccccagcgtgcaggcccgtagactgcatcggatcgcacagtcatctgacgatacgatgaaatgcttcatggaaaaagagaaaatggaacagctgcataagaaattgtggattcaagctggaggggacagagagaacataccctcgatttgggaagcaccaccgtcgagtgaaccaccaaacaacgtgagcacaaattcggaatgggaagcaccgacccagaaagataaatttccaaagccttgcaattggaggaaaaacgaattcaaaaaatggaccaaattggcatcccaaggccgcggaattgtaaattttgaaagagacaaaattagtaaccattggatccaatactacagacgcatacctcacaggaaactcctcactgcactacaactcagggccaacgtttaccccacgagagaatttctagccaggggtagacaagaccaatacatcaaggcgtgtaggcactgcgatgcggacaacgaatcctgcgcccacatcatcggcaactgcccagtgacacaggacgcccgaatcaagaggcacaattacatctgcgaactgcttctcgaggaggcgaagaagaaggactgggtagtgttcaaggaaccgcacataagggattccaacaaggaactgtacaaacctgacctgatatttgtgaaggatgggcgtgcacttgtcgtggatgtgacagtacggtatgaagcagccaaatcatcgctggaggaagccgctgcagagaaagtgagaaagtacaaacacctggaaacggaagtaagacatctcacgaatgcaaaggacgttacttttgtgggctttcccctaggagcgcgggggaaatggcaccaagataactttaaacttttgactgagcttggcctctccaaatcgaggcaagtgaaaatggcagagactttttccacagtagcgctcttttcatctgtggacattgtacatatgtttgccagtagggccagaaaatctatggttatgtgataataggctgccttctgcggggcttgccttctggccatgcccttcttctctcccttgcacctgtacctcttggtctttgaataaagcctgagtaggaaggaccggtaaaaaaaaaaaaaaaaaaaaaaaaaaaaaaacgttgactaaaaaaaaaaaaaaaaaaaaaaaaaaaaaaaaaaaaaaaaaaaaaaaaaaaaaaaaaaaaaaaaaaaaaa

SEQ ID NO: 10827 - DNA, 5264 bp, synthetic construct
  source 1..5264: mol_type = other DNA
gaaataagagagaaaagaagagtaagaagaaatataagagaattcgccaccatggcccctaagaaaaagcggaaggtgaatatcagcggctctagctgcggcagccccaacagcgccgacaccagcagcgacttcaaggacctgtggaccaagctgaaggaatgccacgaccgggaagtgcagggactccaggtgaaggtcaccaaactcaagcaagaaagaatcctggacgcccagagactggaagaattcttcaccaagaaccagcagctgagagagcagcagaaagtgctgcacgagacaatcaaggttctggaagatagactgcgggccggcctgtgcgacagatgcgccgtgaccgaggaacacatgcgcaaaaagcagcaggagttcgagaacattagacagcaaaatctgaaattgatcacagagctgatgaacgagagaaacacactgcaggaggagaacaagaagctgagcgagcagctgcaacagaagatcgagaatgatcagcaacaccaggccgctgagctggaatgtgaagaggacgtgatccccgacagcccaatcacagctttcagcttttctggcgtgaacagactgaggcggaaggaaaacccccacgtgcggtacatcgagcagacccataccaagctggaacacagcgtgtgtgccaacgagatgagaaaggtgtccaagtcctccacccatccccagcacaaccctaacgaaaatgagatcctggtggctgatacctacgaccagtctcagagccctatggccaaggcccacggcaccagctcttatacccctgataagagctccttcaacctggccaccgtggtggccgagacactgggcctgggcgtgcaggaggaaagcgagacacagggcccaatgagccctctgggagatgagctgtaccactgcctggaaggcaaccacaagaaacagccttttgagtccggctccgagactcctggaacaagcgagagcgctacacctgagggcagccctaagagaaaggtgtccagcgccgagggcgctgccaaggaagagcctaaacggagaagcgccagactgagcgccaagccccccgccaaggtggaagccaagcctaagaaggccgccgctaaggacaagagcagcgataagaaagtccagaccaagggcaagcggggcgccaaaggcaaacaggccgaggtggccaaccaggagacaaaggaagatctgcctgctgagaacggcgaaaccaagaccgaggaatctccagcttctgacgaggccggagagaaggaggccaaaagcgacagcggctctgagacacctggaacaagcgagagcgccaccccggaatcctatgaacaacttgcaccacaaccgtgtgtgggagaaactttacattctagcctcccacgaagaagtgaactgtttgtgcctgaagaggggagcagcgagaaggagagcgaggacgcgccaaaaacatctcctccgacgcctgggaaacatggtttggaacagactggggaggaaaaagtgatggtgactgttcctgacaaaaatccaccttgtccttgctgtggtacccgggtaaactctgtgttgaatctgattgaacatctgaaagtgtcacacgggaaaaggggggtttgttttcggtgtgcaaaatgtggaaaggaaaatagtaactatcacagtgttgtttgtcattttaagaaatgcaggggtccagagacggagaaagccccagctggggagtggatttgtgaggtatgcaacagagattttacaaccaaaattggcctgggacaacacaagagattggcacacccagcagtgagaaatcaggaaaggatcgttgcttcccaaccgaaagaaacatcaaatagaggtgctcacaaaaggtgctggacaaaggaggaggaagaattactaataagactggaggctcagttcgagggaaacaaaaatattaataagcttattgcagaacacataaccaccaaaacagctaagcagatcagtgacaaaaggcgattgctgtccagaaagccagcagaggagccacgtgaggagcctggaacgtgtcatcacaccaggagagcagctgcgagcctgagaacggagcctgagatgagtcatcacgcccaggcagaggacagagataatggacctgggagacgccctctgccaggcagggcagctgccggagggagaacaatggacgagataagacgccaccctgataagggcaacggacagcagagacccaccaagcaaaaatcagaagaacagctgcaggcttactataaaaagacactagaggaacgactttcagctggggcacttaacaccttcccccgagcattcaagcaggtaatggaaggccgggatataaagctagtaatcaatcagacagcgcaggactgcttcggatgcctggaatccataagccaaataagaacggcaacccgagataaaaaggacacggtgacccgggagaaacacccaaagaaaccttttcagaagtggatgaagaagagagcaatcaaaaaaggtaattatcttcggttccagcgtttattttatcttgatagagggaaactggctaaaatcattttagatgatattgaatgcttgtcttgtgacataccactcagtgaaatttattcggtttttaaaacaagatgggaaacaactggtagctttaaaagccttggggactttaaaacttacgggaaggctgacaacactgccttcagagaattaattacggctaaagaaattgagaaaaatgtgcaggaaatgagcaaaggctcggctcccggtccagacgggattactcttggggacgtcgtaaagatggatcccgagttttcccggaccatggagattttcaatttatggttaacaactggtaaaatcccggacatggtgagggggtgcagaaccgttttgattccaaaatcatcaaagccggatcgtttgaaagacattaataactggagacctatcacgatcggttccatcttgctgagactgttctccaggattgtaacagctaggctgagcaaagcgtgccccctgaacccaaggcaaagaggctttatcagagcggcgggatgctctgaaaacttaaaactcctgcaaactataatttggtcggccaaaagagaacacagaccactgggtgttgtattcgtggacatcgccaaggcttttgacaccgtaagccaccagcacatcattcatgctttgcagcaaagagaggtggatccccacatcgtcggtctggtgagcaatatgtacgagaacatcagtacgtatatcaccacaaagaggaacacacacacagacaaaatccagatccgggttggagtaaagcagggtgacccgatgtcgccccttttatttaacctggcaatggaccctctattatgcaagctggaagagagtggcaaaggataccaccgaggacagagcagcatcacagcgatggcatttgcagacgatctggttttgctgagcgactcctgggaaaatatgaatacaaatattagcatactggagaccttctgcaatctgaccggactcaaaacacaggggcaaaagtgccacggcttttacatcaagccgacaaagaagtcttacaccatcaatgactgcgctgcctggactatcaacggcacacccctgaacatgatcgaccccggcgaatctgagaaatacctcggcctgcagtttgacccgtggattggaatagcaaggtccggtctctccacaaaactagatttttggcttcagcggatcgatcaagcaccacttaaacctctgcagaaaactgatattctcaaaacatacaccatccctcggctgatctacatagctgaccactcagaagtgaaaagcgcactactcgaaacccttgaccagaagatccggacagcggtcaaggaatggcttcacctacctccgtgcacctgcgatgccatcctgtactcgagcacgagagacggcggtttgggcatcaccaaattggcaggactgatccccagcgtgcaggcccgtagactgcatcggatcgcacagtcatctgacgatacgatgaaatgcttcatggaaaaagagaaaatggaacagctgcataagaaattgtggattcaagctggaggggacagagagaacataccctcgatttgggaagcaccaccgtcgagtgaaccaccaaacaacgtgagcacaaattcggaatgggaagcaccgacccagaaagataaatttccaaagccttgcaattggaggaaaaacgaattcaaaaaatggaccaaattggcatcccaaggccgcggaattgtaaattttgaaagagacaaaattagtaaccattggatccaatactacagacgcatacctcacaggaaactcctcactgcactacaactcagggccaacgtttaccccacgagagaatttctagccaggggtagacaagaccaatacatcaaggcgtgtaggcactgcgatgcggacaacgaatcctgcgcccacatcatcggcaactgcccagtgacacaggacgcccgaatcaagaggcacaattacatctgcgaactgcttctcgaggaggcgaagaagaaggactgggtagtgttcaaggaaccgcacataagggattccaacaaggaactgtacaaacctgacctgatatttgtgaaggatgggcgtgcacttgtcgtggatgtgacagtacggtatgaagcagccaaatcatcgctggaggaagccgctgcagagaaagtgagaaagtacaaacacctggaaacggaagtaagacatctcacgaatgcaaaggacgttacttttgtgggctttcccctaggagcgcgggggaaatggcaccaagataactttaaacttttgactgagcttggcctctccaaatcgaggcaagtgaaaatggcagagactttttccacagtagcgctcttttcatctgtggacattgtacatatgtttgccagtagggccagaaaatctatggttatgtgataataggctgccttctgcggggcttgccttctggccatgcccttcttctctcccttgcacctgtacctcttggtctttgaataaagcctgagtaggaaggaccggtaaaaaaaaaaaaaaaaaaaaaaaaaaaaaaacgttgactaaaaaaaaaaaaaaaaaaaaaaaaaaaaaaaaaaaaaaaaaaaaaaaaaaaaaaaaaaaaaaaaaaaaaa

SEQ ID NO: 10828 - skipped

SEQ ID NO: 10829 - DNA, 5264 bp, synthetic construct
  source 1..5264: mol_type = other DNA
gaaataagagagaaaagaagagtaagaagaaatataagagaattcgccaccatggcccctaagaaaaagcggaaggtgaatatcagcggctctagctgcggcagccccaacagcgccgacaccagcagcgacttcaaggacctgtggaccaagctgaaggaatgccacgaccgggaagtgcagggactccaggtgaaggtcaccaaactcaagcaagaaagaatcctggacgcccagagactggaagaattcttcaccaagaaccagcagctgagagagcagcagaaagtgctgcacgagacaatcaaggttctggaagatagactgcgggccggcctgtgcgacagatgcgccgtgaccgaggaacacatgcgcaaaaagcagcaggagttcgagaacattagacagcaaaatctgaaattgatcacagagctgatgaacgagagaaacacactgcaggaggagaacaagaagctgagcgagcagctgcaacagaagatcgagaatgatcagcaacaccaggccgctgagctggaatgtgaagaggacgtgatccccgacagcccaatcacagctttcagcttttctggcgtgaacagactgaggcggaaggaaaacccccacgtgcggtacatcgagcagacccataccaagctggaacacagcgtgtgtgccaacgagatgagaaaggtgtccaagtcctccacccatccccagcacaaccctaacgaaaatgagatcctggtggctgatacctacgaccagtctcagagccctatggccaaggcccacggcaccagctcttatacccctgataagagctccttcaacctggccaccgtggtggccgagacactgggcctgggcgtgcaggaggaaagcgagacacagggcccaatgagccctctgggagatgagctgtaccactgcctggaaggcaaccacaagaaacagccttttgagtccggctccgagactcctggaacaagcgagagcgctacacctgagggcagccctaagagaaaggtgtccagcgccgagggcgctgccaaggaagagcctaaacggagaagcgccagactgagcgccaagccccccgccaaggtggaagccaagcctaagaaggccgccgctaaggacaagagcagcgataagaaagtccagaccaagggcaagcggggcgccaaaggcaaacaggccgaggtggccaaccaggagacaaaggaagatctgcctgctgagaacggcgaaaccaagaccgaggaatctccagcttctgacgaggccggagagaaggaggccaaaagcgacagcggctctgagacacctggaacaagcgagagcgccaccccggaatcctatgaacaacttgcaccacaaccgtgtgtgggagaaactttacattctagcctcccacgagacagtgaactgtttgtgcctgaagaggggagcagcgagaaggagagcgaggacgcgccaaaaacatctcctccgacgcctgggaaacatggtttggaacagactggggaggaaaaagtgatggtgactgttcctgacaaaaatccaccttgtccttgctgtggtacccgggtaaactctgtgttgaatctgattgaacatctgaaagtgtcacacgggaaaaggggggtttgttttcggtgtgcaaaatgtggaaaggaaaatagtaactatcacagtgttgtttgtcattttaagaaatgcaggggtccagagacggagaaagccccagctggggagtggatttgtgaggtatgcaacagagattttacaaccaaaattggcctgggacaacacaagagattggcacacccagcagtgagaaatcaggaaaggatcgttgcttcccaaccgaaagaaacatcaaatagaggtgctcacaaaaggtgctggacaaaggaggaggaagaattactaataagactggaggctcagttcgagggaaacaaaaatattaataagcttattgcagaacacataaccaccaaaacagctaagcagatcagtgacaaaaggcgattgctgtccagaaagccagcagaggagccacgtgaggagcctggaacgtgtcatcacaccaggagagcagctgcgagcctgagaacggagcctgagatgagtcatcacgcccaggcagaggacagagataatggacctgggagacgccctctgccaggcagggcagctgccggagggagaacaatggacgagataagacgccaccctgataagggcaacggacagcagagacccaccaagcaaaaatcagaagaacagctgcaggcttactataaaaagacactagaggaacgactttcagctggggcacttaacaccttcccccgagcattcaagcaggtaatggaaggccgggatataaagctagtaatcaatcagacagcgcaggactgcttcggatgcctggaatccataagccaaataagaacggcaacccgagataaaaaggacacggtgacccgggagaaacacccaaagaaaccttttcagaagtggatgaagaagagagcaatcaaaaaaggtaattatcttcggttccagcgtttattttatcttgatagagggaaactggctaaaatcattttagatgatattgaatgcttgtcttgtgacataccactcagtgaaatttattcggtttttaaaacaagatgggaaacaactggtagctttaaaagccttggggactttaaaacttacgggaaggctgacaacactgccttcagagaattaattacggctaaagaaattgagaaaaatgtgcaggaaatgagcaaaggctcggctcccggtccagacgggattactcttggggacgtcgtaaagatggatcccgagttttcccggaccatggagattttcaatttatggttaacaactggtaaaatcccggacatggtgagggggtgcagaaccgttttgattccaaaatcatcaaagccggatcgtttgaaagacattaataactggagacctatcacgatcggttccatcttgctgagactgttctccaggattgtaacagctaggctgagcaaagcgtgccccctgaacccaaggcaaagaggctttatcagagcggcgggatgctctgaaaacttaaaactcctgcaaactataatttggtcggccaaaagagaacacagaccactgggtgttgtattcgtggacatcgccaaggcttttgacaccgtaagccaccagcacatcattcatgctttgcagcaaagagaggtggatccccacatcgtcggtctggtgagcaatatgtacgagaacatcagtacgtatatcaccacaaagaggaacacacacacagacaaaatccagatccgggttggagtaaagcagggtgacccgatgtcgccccttttatttaacctggcaatggaccctctattatgcaagctggaagagagtggcaaaggataccaccgaggacagagcagcatcacagcgatggcatttgcagacgatctggttttgctgagcgactcctgggaaaatatgaatacaaatattagcatactggagaccttctgcaatctgaccggactcaaaacacaggggcaaaagtgccacggcttttacatcaagccgacaaagaagtcttacaccatcaatgactgcgctgcctggactatcaacggcacacccctgaacatgatcgaccccggcgaatctgagaaatacctcggcctgcagtttgacccgtggattggaatagcaaggtccggtctctccacaaaactagatttttggcttcagcggatcgatcaagcaccacttaaaaagctgcagaaaactgatattctcaaaacatacaccatccctcggctgatctacatagctgaccactcagaagtgaaaagcgcactactcgaaacccttgaccagaagatccggacagcggtcaaggaatggcttcacctacctccgtgcacctgcgatgccatcctgtactcgagcacgagagacggcggtttgggcatcaccaaattggcaggactgatccccagcgtgcaggcccgtagactgcatcggatcgcacagtcatctgacgatacgatgaaatgcttcatggaaaaagagaaaatggaacagctgcataagaaattgtggattcaagctggaggggacagagagaacataccctcgatttgggaagcaccaccgtcgagtgaaccaccaaacaacgtgagcacaaattcggaatgggaagcaccgacccagaaagataaatttccaaagccttgcaattggaggaaaaacgaattcaaaaaatggaccaaattggcatcccaaggccgcggaattgtaaattttgaaagagacaaaattagtaaccattggatccaatactacagacgcatacctcacaggaaactcctcactgcactacaactcagggccaacgtttaccccacgagagaatttctagccaggggtagacaagaccaatacatcaaggcgtgtaggcactgcgatgcggacaacgaatcctgcgcccacatcatcggcaactgcccagtgacacaggacgcccgaatcaagaggcacaattacatctgcgaactgcttctcgaggaggcgaagaagaaggactgggtagtgttcaaggaaccgcacataagggattccaacaaggaactgtacaaacctgacctgatatttgtgaaggatgggcgtgcacttgtcgtggatgtgacagtacggtatgaagcagccaaatcatcgctggaggaagccgctgcagagaaagtgagaaagtacaaacacctggaaacggaagtaagacatctcacgaatgcaaaggacgttacttttgtgggctttcccctaggagcgcgggggaaatggcaccaagataactttaaacttttgactgagcttggcctctccaaatcgaggcaagtgaaaatggcagagactttttccacagtagcgctcttttcatctgtggacattgtacatatgtttgccagtagggccagaaaatctatggttatgtgataataggctgccttctgcggggcttgccttctggccatgcccttcttctctcccttgcacctgtacctcttggtctttgaataaagcctgagtaggaaggaccggtaaaaaaaaaaaaaaaaaaaaaaaaaaaaaaacgttgactaaaaaaaaaaaaaaaaaaaaaaaaaaaaaaaaaaaaaaaaaaaaaaaaaaaaaaaaaaaaaaaaaaaaaa

SEQ ID NO: 10830 - DNA, 5264 bp, synthetic construct
  source 1..5264: mol_type = other DNA
gaaataagagagaaaagaagagtaagaagaaatataagagaattcgccaccatggcccctaagaaaaagcggaaggtgaatatcagcggctctagctgcggcagccccaacagcgccgacaccagcagcgacttcaaggacctgtggaccaagctgaaggaatgccacgaccgggaagtgcagggactccaggtgaaggtcaccaaactcaagcaagaaagaatcctggacgcccagagactggaagaattcttcaccaagaaccagcagctgagagagcagcagaaagtgctgcacgagacaatcaaggttctggaagatagactgcgggccggcctgtgcgacagatgcgccgtgaccgaggaacacatgcgcaaaaagcagcaggagttcgagaacattagacagcaaaatctgaaattgatcacagagctgatgaacgagagaaacacactgcaggaggagaacaagaagctgagcgagcagctgcaacagaagatcgagaatgatcagcaacaccaggccgctgagctggaatgtgaagaggacgtgatccccgacagcccaatcacagctttcagcttttctggcgtgaacagactgaggcggaaggaaaacccccacgtgcggtacatcgagcagacccataccaagctggaacacagcgtgtgtgccaacgagatgagaaaggtgtccaagtcctccacccatccccagcacaaccctaacgaaaatgagatcctggtggctgatacctacgaccagtctcagagccctatggccaaggcccacggcaccagctcttatacccctgataagagctccttcaacctggccaccgtggtggccgagacactgggcctgggcgtgcaggaggaaagcgagacacagggcccaatgagccctctgggagatgagctgtaccactgcctggaaggcaaccacaagaaacagccttttgagtccggctccgagactcctggaacaagcgagagcgctacacctgagggcagccctaagagaaaggtgtccagcgccgagggcgctgccaaggaagagcctaaacggagaagcgccagactgagcgccaagccccccgccaaggtggaagccaagcctaagaaggccgccgctaaggacaagagcagcgataagaaagtccagaccaagggcaagcggggcgccaaaggcaaacaggccgaggtggccaaccaggagacaaaggaagatctgcctgctgagaacggcgaaaccaagaccgaggaatctccagcttctgacgaggccggagagaaggaggccaaaagcgacagcggctctgagacacctggaacaagcgagagcgccaccccggaatcctatgaacaacttgcaccacaaccgtgtgtgagagaaactttacattctagcctcccacgagacagtgaactgtttgtgcctgaagaggggagcagcgagaaggagagcgaggacgcgccaaaaacatctcctccgacgcctgggaaacatggtttggaacagactggggaggaaaaagtgatggtgactgttcctgacaaaaatccaccttgtccttgctgtggtacccgggtaaactctgtgttgaatctgattgaacatctgaaagtgtcacacgggaaaaggggggtttgttttcggtgtgcaaaatgtggaaaggaaaatagtaactatcacagtgttgtttgtcattttaagaaatgcaggggtccagagacggagaaagccccagctggggagtggatttgtgaggtatgcaacagagattttacaaccaaaattggcctgggacaacacaagagattggcacacccagcagtgagaaatcaggaaaggatcgttgcttcccaaccgaaagaaacatcaaatagaggtgctcacaaaaggtgctggacaaaggaggaggaagaattactaataagactggaggctcagttcgagggaaacaaaaatattaataagcttattgcagaacacataaccaccaaaacagctaagcagatcagtgacaaaaggcgattgctgtccagaaagccagcagaggagccacgtgaggagcctggaacgtgtcatcacaccaggagagcagctgcgagcctgagaacggagcctgagatgagtcatcacgcccaggcagaggacagagataatggacctgggagacgccctctgccaggcagggcagctgccggagggagaacaatggacgagataagacgccaccctgataagggcaacggacagcagagacccaccaagcaaaaatcagaagaacagctgcaggcttactataaaaagacactagaggaacgactttcagctggggcacttaacaccttcccccgagcattcaagcaggtaatggaaggccgggatataaagctagtaatcaatcagacagcgcaggactgcttcggatgcctggaatccataagccaaataagaacggcaacccgagataaaaaggacacggtgacccgggagaaacacccaaagaaaccttttcagaagtggatgaagaagagagcaatcaaaaaaggtaattatcttcggttccagcgtttattttatcttgatagagggaaactggctaaaatcattttagatgatattgaatgcttgtcttgtgacataccactcagtgaaatttattcggtttttaaaacaagatgggaaacaactggtagctttaaaagccttggggactttaaaacttacgggaaggctgacaacactgccttcagagaattaattacggctaaagaaattgagaaaaatgtgcaggaaatgagcaaaggctcggctcccggtccagacgggattactcttggggacgtcgtaaagatggatcccgagttttcccggaccatggagattttcaatttatggttaacaactggtaaaatcccggacatggtgagggggtgcagaaccgttttgattccaaaatcatcaaagccggatcgtttgaaagacattaataactggagacctatcacgatcggttccatcttgctgagactgttctccaggattgtaacagctaggctgagcaaagcgtgccccctgaacccaaggcaaagaggctttatcagagcggcgggatgctctgaaaacttaaaactcctgcaaactataatttggtcggccaaaagagaacacagaccactgggtgttgtattcgtggacatcgccaaggcttttgacaccgtaagccaccagcacatcattcatgctttgcagcaaagagaggtggatccccacatcgtcggtctggtgagcaatatgtacgagaacatcagtacgtatatcaccacaaagaggaacacacacacagacaaaatccagatccgggttggagtaaagcagggtgacccgatgtcgccccttttatttaacctggcaatggaccctctattatgcaagctggaagagagtggcaaaggataccaccgaggacagagcagcatcacagcgatggcatttgcagacgatctggttttgctgagcgactcctgggaaaatatgaatacaaatattagcatactggagaccttctgcaatctgaccggactcaaaacacaggggcaaaagtgccacggcttttacatcaagccgacaaagaagtcttacaccatcaatgactgcgctgcctggactatcaacggcacacccctgaacatgatcgaccccggcgaatctgagaaatacctcggcctgcagtttgacccgtggattggaatagcaaggtccggtctctccacaaaactagatttttggcttcagcggatcgatcaagcaccacttaaacctctgcagaaaactgatattctcaaaacatacaccatccctcggctgatctacatagctgaccactcagaagtgaaaagcgcactactcgaaacccttgaccagaagatccggacagcggtcaaggaatggcttcacctacctccgtgcacctgcgatgccatcctgtactcgagcacgagagacggcggtttgggcatcaccaaattggcaggactgatccccagcgtgcaggcccgtagactgcatcggatcgcacagtcatctgacgatacgatgaaatgcttcatggaaaaagagaaaatggaacagctgcataagaaattgtggattcaagctggaggggacagagagaacataccctcgatttgggaagcaccaccgtcgagtgaaccaccaaacaacgtgagcacaaattcggaatgggaagcaccgacccagaaagataaatttccaaagccttgcaattggaggaaaaacgaattcaaaaaatggaccaaattggcatcccaaggccgcggaattgtaaattttgaaagagacaaaattagtaaccattggatccaatactacagacgcatacctcacaggaaactcctcactgcactacaactcagggccaacgtttaccccacgagagaatttctagccaggggtagacaagaccaatacatcaaggcgtgtaggcactgcgatgcggacaacgaatcctgcgcccacatcatcggcaactgcccagtgacacaggacgcccgaatcaagaggcacaattacatctgcgaactgcttctcgaggaggcgaagaagaaggactgggtagtgttcaaggaaccgcacataagggattccaacaaggaactgtacaaacctgacctgatatttgtgaaggatgggcgtgcacttgtcgtggatgtgacagtacggtatgaagcagccaaatcatcgctggaggaagccgctgcagagaaagtgagaaagtacaaacacctggaaacggaagtaagacatctcacgaatgcaaaggacgttacttttgtgggctttcccctaggagcgcgggggaaatggcaccaagataactttaaacttttgactgagcttggcctctccaaatcgaggcaagtgaaaatggcagagactttttccacagtagcgctcttttcatctgtggacattgtacatatgtttgccagtagggccagaaaatctatggttatgtgataataggctgccttctgcggggcttgccttctggccatgcccttcttctctcccttgcacctgtacctcttggtctttgaataaagcctgagtaggaaggaccggtaaaaaaaaaaaaaaaaaaaaaaaaaaaaaaacgttgactaaaaaaaaaaaaaaaaaaaaaaaaaaaaaaaaaaaaaaaaaaaaaaaaaaaaaaaaaaaaaaaaaaaaaa

SEQ ID NO: 10831 - DNA, 5264 bp, synthetic construct
  source 1..5264: mol_type = other DNA
gaaataagagagaaaagaagagtaagaagaaatataagagaattcgccaccatggcccctaagaaaaagcggaaggtgaatatcagcggctctagctgcggcagccccaacagcgccgacaccagcagcgacttcaaggacctgtggaccaagctgaaggaatgccacgaccgggaagtgcagggactccaggtgaaggtcaccaaactcaagcaagaaagaatcctggacgcccagagactggaagaattcttcaccaagaaccagcagctgagagagcagcagaaagtgctgcacgagacaatcaaggttctggaagatagactgcgggccggcctgtgcgacagatgcgccgtgaccgaggaacacatgcgcaaaaagcagcaggagttcgagaacattagacagcaaaatctgaaattgatcacagagctgatgaacgagagaaacacactgcaggaggagaacaagaagctgagcgagcagctgcaacagaagatcgagaatgatcagcaacaccaggccgctgagctggaatgtgaagaggacgtgatccccgacagcccaatcacagctttcagcttttctggcgtgaacagactgaggcggaaggaaaacccccacgtgcggtacatcgagcagacccataccaagctggaacacagcgtgtgtgccaacgagatgagaaaggtgtccaagtcctccacccatccccagcacaaccctaacgaaaatgagatcctggtggctgatacctacgaccagtctcagagccctatggccaaggcccacggcaccagctcttatacccctgataagagctccttcaacctggccaccgtggtggccgagacactgggcctgggcgtgcaggaggaaagcgagacacagggcccaatgagccctctgggagatgagctgtaccactgcctggaaggcaaccacaagaaacagccttttgagtccggctccgagactcctggaacaagcgagagcgctacacctgagggcagccctaagagaaaggtgtccagcgccgagggcgctgccaaggaagagcctaaacggagaagcgccagactgagcgccaagccccccgccaaggtggaagccaagcctaagaaggccgccgctaaggacaagagcagcgataagaaagtccagaccaagggcaagcggggcgccaaaggcaaacaggccgaggtggccaaccaggagacaaaggaagatctgcctgctgagaacggcgaaaccaagaccgaggaatctccagcttctgacgaggccggagagaaggaggccaaaagcgacagcggctctgagacacctggaacaagcgagagcgccaccccggaatcctatgaacaacttgcaccacaaccgtgtgtgggagaaactttacattctagactcccacgagacagtgaactgtttgtgcctgaagaggggagcagcgagaaggagagcgaggacgcgccaaaaacatctcctccgacgcctgggaaacatggtttggaacagactggggaggaaaaagtgatggtgactgttcctgacaaaaatccaccttgtccttgctgtggtacccgggtaaactctgtgttgaatctgattgaacatctgaaagtgtcacacgggaaaaggggggtttgttttcggtgtgcaaaatgtggaaaggaaaatagtaactatcacagtgttgtttgtcattttaagaaatgcaggggtccagagacggagaaagccccagctggggagtggatttgtgaggtatgcaacagagattttacaaccaaaattggcctgggacaacacaagagattggcacacccagcagtgagaaatcaggaaaggatcgttgcttcccaaccgaaagaaacatcaaatagaggtgctcacaaaaggtgctggacaaaggaggaggaagaattactaataagactggaggctcagttcgagggaaacaaaaatattaataagcttattgcagaacacataaccaccaaaacagctaagcagatcagtgacaaaaggcgattgctgtccagaaagccagcagaggagccacgtgaggagcctggaacgtgtcatcacaccaggagagcagctgcgagcctgagaacggagcctgagatgagtcatcacgcccaggcagaggacagagataatggacctgggagacgccctctgccaggcagggcagctgccggagggagaacaatggacgagataagacgccaccctgataagggcaacggacagcagagacccaccaagcaaaaatcagaagaacagctgcaggcttactataaaaagacactagaggaacgactttcagctggggcacttaacaccttcccccgagcattcaagcaggtaatggaaggccgggatataaagctagtaatcaatcagacagcgcaggactgcttcggatgcctggaatccataagccaaataagaacggcaacccgagataaaaaggacacggtgacccgggagaaacacccaaagaaaccttttcagaagtggatgaagaagagagcaatcaaaaaaggtaattatcttcggttccagcgtttattttatcttgatagagggaaactggctaaaatcattttagatgatattgaatgcttgtcttgtgacataccactcagtgaaatttattcggtttttaaaacaagatgggaaacaactggtagctttaaaagccttggggactttaaaacttacgggaaggctgacaacactgccttcagagaattaattacggctaaagaaattgagaaaaatgtgcaggaaatgagcaaaggctcggctcccggtccagacgggattactcttggggacgtcgtaaagatggatcccgagttttcccggaccatggagattttcaatttatggttaacaactggtaaaatcccggacatggtgagggggtgcagaaccgttttgattccaaaatcatcaaagccggatcgtttgaaagacattaataactggagacctatcacgatcggttccatcttgctgagactgttctccaggattgtaacagctaggctgagcaaagcgtgccccctgaacccaaggcaaagaggctttatcagagcggcgggatgctctgaaaacttaaaactcctgcaaactataatttggtcggccaaaagagaacacagaccactgggtgttgtattcgtggacatcgccaaggcttttgacaccgtaagccaccagcacatcattcatgctttgcagcaaagagaggtggatccccacatcgtcggtctggtgagcaatatgtacgagaacatcagtacgtatatcaccacaaagaggaacacacacacagacaaaatccagatccgggttggagtaaagcagggtgacccgatgtcgccccttttatttaacctggcaatggaccctctattatgcaagctggaagagagtggcaaaggataccaccgaggacagagcagcatcacagcgatggcatttgcagacgatctggttttgctgagcgactcctgggaaaatatgaatacaaatattagcatactggagaccttctgcaatctgaccggactcaaaacacaggggcaaaagtgccacggcttttacatcaagccgacaaagaagtcttacaccatcaatgactgcgctgcctggactatcaacggcacacccctgaacatgatcgaccccggcgaatctgagaaatacctcggcctgcagtttgacccgtggattggaatagcaaggtccggtctctccacaaaactagatttttggcttcagcggatcgatcaagcaccacttaaacctctgcagaaaactgatattctcaaaacatacaccatccctcggctgatctacatagctgaccactcagaagtgaaaagcgcactactcgaaacccttgaccagaagatccggacagcggtcaaggaatggcttcacctacctccgtgcacctgcgatgccatcctgtactcgagcacgagagacggcggtttgggcatcaccaaattggcaggactgatccccagcgtgcaggcccgtagactgcatcggatcgcacagtcatctgacgatacgatgaaatgcttcatggaaaaagagaaaatggaacagctgcataagaaattgtggattcaagctggaggggacagagagaacataccctcgatttgggaagcaccaccgtcgagtgaaccaccaaacaacgtgagcacaaattcggaatgggaagcaccgacccagaaagataaatttccaaagccttgcaattggaggaaaaacgaattcaaaaaatggaccaaattggcatcccaaggccgcggaattgtaaattttgaaagagacaaaattagtaaccattggatccaatactacagacgcatacctcacaggaaactcctcactgcactacaactcagggccaacgtttaccccacgagagaatttctagccaggggtagacaagaccaatacatcaaggcgtgtaggcactgcgatgcggacaacgaatcctgcgcccacatcatcggcaactgcccagtgacacaggacgcccgaatcaagaggcacaattacatctgcgaactgcttctcgaggaggcgaagaagaaggactgggtagtgttcaaggaaccgcacataagggattccaacaaggaactgtacaaacctgacctgatatttgtgaaggatgggcgtgcacttgtcgtggatgtgacagtacggtatgaagcagccaaatcatcgctggaggaagccgctgcagagaaagtgagaaagtacaaacacctggaaacggaagtaagacatctcacgaatgcaaaggacgttacttttgtgggctttcccctaggagcgcgggggaaatggcaccaagataactttaaacttttgactgagcttggcctctccaaatcgaggcaagtgaaaatggcagagactttttccacagtagcgctcttttcatctgtggacattgtacatatgtttgccagtagggccagaaaatctatggttatgtgataataggctgccttctgcggggcttgccttctggccatgcccttcttctctcccttgcacctgtacctcttggtctttgaataaagcctgagtaggaaggaccggtaaaaaaaaaaaaaaaaaaaaaaaaaaaaaaacgttgactaaaaaaaaaaaaaaaaaaaaaaaaaaaaaaaaaaaaaaaaaaaaaaaaaaaaaaaaaaaaaaaaaaaaaa

SEQ ID NO: 10832 - DNA, 5264 bp, synthetic construct
  source 1..5264: mol_type = other DNA
gaaataagagagaaaagaagagtaagaagaaatataagagaattcgccaccatggcccctaagaaaaagcggaaggtgaatatcagcggctctagctgcggcagccccaacagcgccgacaccagcagcgacttcaaggacctgtggaccaagctgaaggaatgccacgaccgggaagtgcagggactccaggtgaaggtcaccaaactcaagcaagaaagaatcctggacgcccagagactggaagaattcttcaccaagaaccagcagctgagagagcagcagaaagtgctgcacgagacaatcaaggttctggaagatagactgcgggccggcctgtgcgacagatgcgccgtgaccgaggaacacatgcgcaaaaagcagcaggagttcgagaacattagacagcaaaatctgaaattgatcacagagctgatgaacgagagaaacacactgcaggaggagaacaagaagctgagcgagcagctgcaacagaagatcgagaatgatcagcaacaccaggccgctgagctggaatgtgaagaggacgtgatccccgacagcccaatcacagctttcagcttttctggcgtgaacagactgaggcggaaggaaaacccccacgtgcggtacatcgagcagacccataccaagctggaacacagcgtgtgtgccaacgagatgagaaaggtgtccaagtcctccacccatccccagcacaaccctaacgaaaatgagatcctggtggctgatacctacgaccagtctcagagccctatggccaaggcccacggcaccagctcttatacccctgataagagctccttcaacctggccaccgtggtggccgagacactgggcctgggcgtgcaggaggaaagcgagacacagggcccaatgagccctctgggagatgagctgtaccactgcctggaaggcaaccacaagaaacagccttttgagtccggctccgagactcctggaacaagcgagagcgctacacctgagggcagccctaagagaaaggtgtccagcgccgagggcgctgccaaggaagagcctaaacggagaagcgccagactgagcgccaagccccccgccaaggtggaagccaagcctaagaaggccgccgctaaggacaagagcagcgataagaaagtccagaccaagggcaagcggggcgccaaaggcaaacaggccgaggtggccaaccaggagacaaaggaagatctgcctgctgagaacggcgaaaccaagaccgaggaatctccagcttctgacgaggccggagagaaggaggccaaaagcgacagcggctctgagacacctggaacaagcgagagcgccaccccggaatcctatgaacaacttgcaccacaaccgtgtgtgaaggaaactttacattctagcctcccacgagacagtgaactgtttgtgcctgaagaggggagcagcgagaaggagagcgaggacgcgccaaaaacatctcctccgacgcctgggaaacatggtttggaacagactggggaggaaaaagtgatggtgactgttcctgacaaaaatccaccttgtccttgctgtggtacccgggtaaactctgtgttgaatctgattgaacatctgaaagtgtcacacgggaaaaggggggtttgttttcggtgtgcaaaatgtggaaaggaaaatagtaactatcacagtgttgtttgtcattttaagaaatgcaggggtccagagacggagaaagccccagctggggagtggatttgtgaggtatgcaacagagattttacaaccaaaattggcctgggacaacacaagagattggcacacccagcagtgagaaatcaggaaaggatcgttgcttcccaaccgaaagaaacatcaaatagaggtgctcacaaaaggtgctggacaaaggaggaggaagaattactaataagactggaggctcagttcgagggaaacaaaaatattaataagcttattgcagaacacataaccaccaaaacagctaagcagatcagtgacaaaaggcgattgctgtccagaaagccagcagaggagccacgtgaggagcctggaacgtgtcatcacaccaggagagcagctgcgagcctgagaacggagcctgagatgagtcatcacgcccaggcagaggacagagataatggacctgggagacgccctctgccaggcagggcagctgccggagggagaacaatggacgagataagacgccaccctgataagggcaacggacagcagagacccaccaagcaaaaatcagaagaacagctgcaggcttactataaaaagacactagaggaacgactttcagctggggcacttaacaccttcccccgagcattcaagcaggtaatggaaggccgggatataaagctagtaatcaatcagacagcgcaggactgcttcggatgcctggaatccataagccaaataagaacggcaacccgagataaaaaggacacggtgacccgggagaaacacccaaagaaaccttttcagaagtggatgaagaagagagcaatcaaaaaaggtaattatcttcggttccagcgtttattttatcttgatagagggaaactggctaaaatcattttagatgatattgaatgcttgtcttgtgacataccactcagtgaaatttattcggtttttaaaacaagatgggaaacaactggtagctttaaaagccttggggactttaaaacttacgggaaggctgacaacactgccttcagagaattaattacggctaaagaaattgagaaaaatgtgcaggaaatgagcaaaggctcggctcccggtccagacgggattactcttggggacgtcgtaaagatggatcccgagttttcccggaccatggagattttcaatttatggttaacaactggtaaaatcccggacatggtgagggggtgcagaaccgttttgattccaaaatcatcaaagccggatcgtttgaaagacattaataactggagacctatcacgatcggttccatcttgctgagactgttctccaggattgtaacagctaggctgagcaaagcgtgccccctgaacccaaggcaaagaggctttatcagagcggcgggatgctctgaaaacttaaaactcctgcaaactataatttggtcggccaaaagagaacacagaccactgggtgttgtattcgtggacatcgccaaggcttttgacaccgtaagccaccagcacatcattcatgctttgcagcaaagagaggtggatccccacatcgtcggtctggtgagcaatatgtacgagaacatcagtacgtatatcaccacaaagaggaacacacacacagacaaaatccagatccgggttggagtaaagcagggtgacccgatgtcgccccttttatttaacctggcaatggaccctctattatgcaagctggaagagagtggcaaaggataccaccgaggacagagcagcatcacagcgatggcatttgcagacgatctggttttgctgagcgactcctgggaaaatatgaatacaaatattagcatactggagaccttctgcaatctgaccggactcaaaacacaggggcaaaagtgccacggcttttacatcaagccgacaaagaagtcttacaccatcaatgactgcgctgcctggactatcaacggcacacccctgaacatgatcgaccccggcgaatctgagaaatacctcggcctgcagtttgacccgtggattggaatagcaaggtccggtctctccacaaaactagatttttggcttcagcggatcgatcaagcaccacttaaacctctgcagaaaactgatattctcaaaacatacaccatccctcggctgatctacatagctgaccactcagaagtgaaaagcgcactactcgaaacccttgaccagaagatccggacagcggtcaaggaatggcttcacctacctccgtgcacctgcgatgccatcctgtactcgagcacgagagacggcggtttgggcatcaccaaattggcaggactgatccccagcgtgcaggcccgtagactgcatcggatcgcacagtcatctgacgatacgatgaaatgcttcatggaaaaagagaaaatggaacagctgcataagaaattgtggattcaagctggaggggacagagagaacataccctcgatttgggaagcaccaccgtcgagtgaaccaccaaacaacgtgagcacaaattcggaatgggaagcaccgacccagaaagataaatttccaaagccttgcaattggaggaaaaacgaattcaaaaaatggaccaaattggcatcccaaggccgcggaattgtaaattttgaaagagacaaaattagtaaccattggatccaatactacagacgcatacctcacaggaaactcctcactgcactacaactcagggccaacgtttaccccacgagagaatttctagccaggggtagacaagaccaatacatcaaggcgtgtaggcactgcgatgcggacaacgaatcctgcgcccacatcatcggcaactgcccagtgacacaggacgcccgaatcaagaggcacaattacatctgcgaactgcttctcgaggaggcgaagaagaaggactgggtagtgttcaaggaaccgcacataagggattccaacaaggaactgtacaaacctgacctgatatttgtgaaggatgggcgtgcacttgtcgtggatgtgacagtacggtatgaagcagccaaatcatcgctggaggaagccgctgcagagaaagtgagaaagtacaaacacctggaaacggaagtaagacatctcacgaatgcaaaggacgttacttttgtgggctttcccctaggagcgcgggggaaatggcaccaagataactttaaacttttgactgagcttggcctctccaaatcgaggcaagtgaaaatggcagagactttttccacagtagcgctcttttcatctgtggacattgtacatatgtttgccagtagggccagaaaatctatggttatgtgataataggctgccttctgcggggcttgccttctggccatgcccttcttctctcccttgcacctgtacctcttggtctttgaataaagcctgagtaggaaggaccggtaaaaaaaaaaaaaaaaaaaaaaaaaaaaaaacgttgactaaaaaaaaaaaaaaaaaaaaaaaaaaaaaaaaaaaaaaaaaaaaaaaaaaaaaaaaaaaaaaaaaaaaaa

SEQ ID NO: 10833 - DNA, 5264 bp, synthetic construct
  source 1..5264: mol_type = other DNA
gaaataagagagaaaagaagagtaagaagaaatataagagaattcgccaccatggcccctaagaaaaagcggaaggtgaatatcagcggctctagctgcggcagccccaacagcgccgacaccagcagcgacttcaaggacctgtggaccaagctgaaggaatgccacgaccgggaagtgcagggactccaggtgaaggtcaccaaactcaagcaagaaagaatcctggacgcccagagactggaagaattcttcaccaagaaccagcagctgagagagcagcagaaagtgctgcacgagacaatcaaggttctggaagatagactgcgggccggcctgtgcgacagatgcgccgtgaccgaggaacacatgcgcaaaaagcagcaggagttcgagaacattagacagcaaaatctgaaattgatcacagagctgatgaacgagagaaacacactgcaggaggagaacaagaagctgagcgagcagctgcaacagaagatcgagaatgatcagcaacaccaggccgctgagctggaatgtgaagaggacgtgatccccgacagcccaatcacagctttcagcttttctggcgtgaacagactgaggcggaaggaaaacccccacgtgcggtacatcgagcagacccataccaagctggaacacagcgtgtgtgccaacgagatgagaaaggtgtccaagtcctccacccatccccagcacaaccctaacgaaaatgagatcctggtggctgatacctacgaccagtctcagagccctatggccaaggcccacggcaccagctcttatacccctgataagagctccttcaacctggccaccgtggtggccgagacactgggcctgggcgtgcaggaggaaagcgagacacagggcccaatgagccctctgggagatgagctgtaccactgcctggaaggcaaccacaagaaacagccttttgagtccggctccgagactcctggaacaagcgagagcgctacacctgagggcagccctaagagaaaggtgtccagcgccgagggcgctgccaaggaagagcctaaacggagaagcgccagactgagcgccaagccccccgccaaggtggaagccaagcctaagaaggccgccgctaaggacaagagcagcgataagaaagtccagaccaagggcaagcggggcgccaaaggcaaacaggccgaggtggccaaccaggagacaaaggaagatctgcctgctgagaacggcgaaaccaagaccgaggaatctccagcttctgacgaggccggagagaaggaggccaaaagcgacagcggctctgagacacctggaacaagcgagagcgccaccccggaatcctatgaacaacttgcaccacaaccgtgtgtgggagaaactttacattggagcctcccacgagacagtgaactgtttgtgcctgaagaggggagcagcgagaaggagagcgaggacgcgccaaaaacatctcctccgacgcctgggaaacatggtttggaacagactggggaggaaaaagtgatggtgactgttcctgacaaaaatccaccttgtccttgctgtggtacccgggtaaactctgtgttgaatctgattgaacatctgaaagtgtcacacgggaaaaggggggtttgttttcggtgtgcaaaatgtggaaaggaaaatagtaactatcacagtgttgtttgtcattttaagaaatgcaggggtccagagacggagaaagccccagctggggagtggatttgtgaggtatgcaacagagattttacaaccaaaattggcctgggacaacacaagagattggcacacccagcagtgagaaatcaggaaaggatcgttgcttcccaaccgaaagaaacatcaaatagaggtgctcacaaaaggtgctggacaaaggaggaggaagaattactaataagactggaggctcagttcgagggaaacaaaaatattaataagcttattgcagaacacataaccaccaaaacagctaagcagatcagtgacaaaaggcgattgctgtccagaaagccagcagaggagccacgtgaggagcctggaacgtgtcatcacaccaggagagcagctgcgagcctgagaacggagcctgagatgagtcatcacgcccaggcagaggacagagataatggacctgggagacgccctctgccaggcagggcagctgccggagggagaacaatggacgagataagacgccaccctgataagggcaacggacagcagagacccaccaagcaaaaatcagaagaacagctgcaggcttactataaaaagacactagaggaacgactttcagctggggcacttaacaccttcccccgagcattcaagcaggtaatggaaggccgggatataaagctagtaatcaatcagacagcgcaggactgcttcggatgcctggaatccataagccaaataagaacggcaacccgagataaaaaggacacggtgacccgggagaaacacccaaagaaaccttttcagaagtggatgaagaagagagcaatcaaaaaaggtaattatcttcggttccagcgtttattttatcttgatagagggaaactggctaaaatcattttagatgatattgaatgcttgtcttgtgacataccactcagtgaaatttattcggtttttaaaacaagatgggaaacaactggtagctttaaaagccttggggactttaaaacttacgggaaggctgacaacactgccttcagagaattaattacggctaaagaaattgagaaaaatgtgcaggaaatgagcaaaggctcggctcccggtccagacgggattactcttggggacgtcgtaaagatggatcccgagttttcccggaccatggagattttcaatttatggttaacaactggtaaaatcccggacatggtgagggggtgcagaaccgttttgattccaaaatcatcaaagccggatcgtttgaaagacattaataactggagacctatcacgatcggttccatcttgctgagactgttctccaggattgtaacagctaggctgagcaaagcgtgccccctgaacccaaggcaaagaggctttatcagagcggcgggatgctctgaaaacttaaaactcctgcaaactataatttggtcggccaaaagagaacacagaccactgggtgttgtattcgtggacatcgccaaggcttttgacaccgtaagccaccagcacatcattcatgctttgcagcaaagagaggtggatccccacatcgtcggtctggtgagcaatatgtacgagaacatcagtacgtatatcaccacaaagaggaacacacacacagacaaaatccagatccgggttggagtaaagcagggtgacccgatgtcgccccttttatttaacctggcaatggaccctctattatgcaagctggaagagagtggcaaaggataccaccgaggacagagcagcatcacagcgatggcatttgcagacgatctggttttgctgagcgactcctgggaaaatatgaatacaaatattagcatactggagaccttctgcaatctgaccggactcaaaacacaggggcaaaagtgccacggcttttacatcaagccgacaaagaagtcttacaccatcaatgactgcgctgcctggactatcaacggcacacccctgaacatgatcgaccccggcgaatctgagaaatacctcggcctgcagtttgacccgtggattggaatagcaaggtccggtctctccacaaaactagatttttggcttcagcggatcgatcaagcaccacttaaacctctgcagaaaactgatattctcaaaacatacaccatccctcggctgatctacatagctgaccactcagaagtgaaaagcgcactactcgaaacccttgaccagaagatccggacagcggtcaaggaatggcttcacctacctccgtgcacctgcgatgccatcctgtactcgagcacgagagacggcggtttgggcatcaccaaattggcaggactgatccccagcgtgcaggcccgtagactgcatcggatcgcacagtcatctgacgatacgatgaaatgcttcatggaaaaagagaaaatggaacagctgcataagaaattgtggattcaagctggaggggacagagagaacataccctcgatttgggaagcaccaccgtcgagtgaaccaccaaacaacgtgagcacaaattcggaatgggaagcaccgacccagaaagataaatttccaaagccttgcaattggaggaaaaacgaattcaaaaaatggaccaaattggcatcccaaggccgcggaattgtaaattttgaaagagacaaaattagtaaccattggatccaatactacagacgcatacctcacaggaaactcctcactgcactacaactcagggccaacgtttaccccacgagagaatttctagccaggggtagacaagaccaatacatcaaggcgtgtaggcactgcgatgcggacaacgaatcctgcgcccacatcatcggcaactgcccagtgacacaggacgcccgaatcaagaggcacaattacatctgcgaactgcttctcgaggaggcgaagaagaaggactgggtagtgttcaaggaaccgcacataagggattccaacaaggaactgtacaaacctgacctgatatttgtgaaggatgggcgtgcacttgtcgtggatgtgacagtacggtatgaagcagccaaatcatcgctggaggaagccgctgcagagaaagtgagaaagtacaaacacctggaaacggaagtaagacatctcacgaatgcaaaggacgttacttttgtgggctttcccctaggagcgcgggggaaatggcaccaagataactttaaacttttgactgagcttggcctctccaaatcgaggcaagtgaaaatggcagagactttttccacagtagcgctcttttcatctgtggacattgtacatatgtttgccagtagggccagaaaatctatggttatgtgataataggctgccttctgcggggcttgccttctggccatgcccttcttctctcccttgcacctgtacctcttggtctttgaataaagcctgagtaggaaggaccggtaaaaaaaaaaaaaaaaaaaaaaaaaaaaaaacgttgactaaaaaaaaaaaaaaaaaaaaaaaaaaaaaaaaaaaaaaaaaaaaaaaaaaaaaaaaaaaaaaaaaaaaaa

SEQ ID NO: 10834 - DNA, 5264 bp, synthetic construct
  source 1..5264: mol_type = other DNA
gaaataagagagaaaagaagagtaagaagaaatataagagaattcgccaccatggcccctaagaaaaagcggaaggtgaatatcagcggctctagctgcggcagccccaacagcgccgacaccagcagcgacttcaaggacctgtggaccaagctgaaggaatgccacgaccgggaagtgcagggactccaggtgaaggtcaccaaactcaagcaagaaagaatcctggacgcccagagactggaagaattcttcaccaagaaccagcagctgagagagcagcagaaagtgctgcacgagacaatcaaggttctggaagatagactgcgggccggcctgtgcgacagatgcgccgtgaccgaggaacacatgcgcaaaaagcagcaggagttcgagaacattagacagcaaaatctgaaattgatcacagagctgatgaacgagagaaacacactgcaggaggagaacaagaagctgagcgagcagctgcaacagaagatcgagaatgatcagcaacaccaggccgctgagctggaatgtgaagaggacgtgatccccgacagcccaatcacagctttcagcttttctggcgtgaacagactgaggcggaaggaaaacccccacgtgcggtacatcgagcagacccataccaagctggaacacagcgtgtgtgccaacgagatgagaaaggtgtccaagtcctccacccatccccagcacaaccctaacgaaaatgagatcctggtggctgatacctacgaccagtctcagagccctatggccaaggcccacggcaccagctcttatacccctgataagagctccttcaacctggccaccgtggtggccgagacactgggcctgggcgtgcaggaggaaagcgagacacagggcccaatgagccctctgggagatgagctgtaccactgcctggaaggcaaccacaagaaacagccttttgagtccggctccgagactcctggaacaagcgagagcgctacacctgagggcagccctaagagaaaggtgtccagcgccgagggcgctgccaaggaagagcctaaacggagaagcgccagactgagcgccaagccccccgccaaggtggaagccaagcctaagaaggccgccgctaaggacaagagcagcgataagaaagtccagaccaagggcaagcggggcgccaaaggcaaacaggccgaggtggccaaccaggagacaaaggaagatctgcctgctgagaacggcgaaaccaagaccgaggaatctccagcttctgacgaggccggagagaaggaggccaaaagcgacagcggctctgagacacctggaacaagcgagagcgccaccccggaatcctatgaacaacttgcaccacaaccgtgtgtgggagaaactttacattctagcctcccacgagacagtgaactgtttgtgcctgaagaggggagcagcgagaaggagagcgaggacgcgccaaaaacatctcctccgacgcctgggaaacatggtttggaacagactggggaggaaaaagtgatggtgactgttcctgacaaaaatccaccttgtccttgctgtggtacccgggtaaactctgtgttgaatctgattgaacatctgaaagtgtcacacgggaaaaggggggtttgttttcggtgtgcaaaatgtggaaaggaaaatagtaactatcacagtgttgtttgtcattttaagaaatgcaggggtccagagacggagaaagccccagctggggagtggatttgtgaggtatgcaacagagattttacaaccaaaattggcctgggacaacacaagagattggcacacccagcagtgagaaatcaggaaaggatcgttgcttcccaaccgaaagaaacatcaaatagaggtgctcacaaaaggtgctggacaaaggaggaggaagaattactaataagactggaggctcagttcgagggaaacaaaaatattaataagcttattgcagaacacataaccaccaaaacagctaagcagatcagtgacaaaaggcgattgctgtccagaaagccagcagaggagccacgtgaggagcctggaacgtgtcatcacaccaggagagcagctgcgagcctgagaacggagcctgagatgagtcatcacgcccaggcagaggacagagataatggacctgggagacgccctctgccaggcagggcagctgccggagggagaacaatggacgagataagacgccaccctgataagggcaacggacagcagagacccaccaagcaaaaatcagaagaacagctgcaggcttactataaaaagacactagaggaacgactttcagctggggcacttaacaccttcccccgagcattcaagcaggtaatggaaggccgggatataaagctagtaatcaatcagacagcgcaggactgcttcggatgcctggaatccataagccaaataagaacggcaacccgagataaaaaggacacggtgacccgggagaaaagaccaaagaaaccttttcagaagtggatgaagaagagagcaatcaaaaaaggtaattatcttcggttccagcgtttattttatcttgatagagggaaactggctaaaatcattttagatgatattgaatgcttgtcttgtgacataccactcagtgaaatttattcggtttttaaaacaagatgggaaacaactggtagctttaaaagccttggggactttaaaacttacgggaaggctgacaacactgccttcagagaattaattacggctaaagaaattgagaaaaatgtgcaggaaatgagcaaaggctcggctcccggtccagacgggattactcttggggacgtcgtaaagatggatcccgagttttcccggaccatggagattttcaatttatggttaacaactggtaaaatcccggacatggtgagggggtgcagaaccgttttgattccaaaatcatcaaagccggatcgtttgaaagacattaataactggagacctatcacgatcggttccatcttgctgagactgttctccaggattgtaacagctaggctgagcaaagcgtgccccctgaacccaaggcaaagaggctttatcagagcggcgggatgctctgaaaacttaaaactcctgcaaactataatttggtcggccaaaagagaacacagaccactgggtgttgtattcgtggacatcgccaaggcttttgacaccgtaagccaccagcacatcattcatgctttgcagcaaagagaggtggatccccacatcgtcggtctggtgagcaatatgtacgagaacatcagtacgtatatcaccacaaagaggaacacacacacagacaaaatccagatccgggttggagtaaagcagggtgacccgatgtcgccccttttatttaacctggcaatggaccctctattatgcaagctggaagagagtggcaaaggataccaccgaggacagagcagcatcacagcgatggcatttgcagacgatctggttttgctgagcgactcctgggaaaatatgaatacaaatattagcatactggagaccttctgcaatctgaccggactcaaaacacaggggcaaaagtgccacggcttttacatcaagccgacaaagaagtcttacaccatcaatgactgcgctgcctggactatcaacggcacacccctgaacatgatcgaccccggcgaatctgagaaatacctcggcctgcagtttgacccgtggattggaatagcaaggtccggtctctccacaaaactagatttttggcttcagcggatcgatcaagcaccacttaaacctctgcagaaaactgatattctcaaaacatacaccatccctcggctgatctacatagctgaccactcagaagtgaaaagcgcactactcgaaacccttgaccagaagatccggacagcggtcaaggaatggcttcacctacctccgtgcacctgcgatgccatcctgtactcgagcacgagagacggcggtttgggcatcaccaaattggcaggactgatccccagcgtgcaggcccgtagactgcatcggatcgcacagtcatctgacgatacgatgaaatgcttcatggaaaaagagaaaatggaacagctgcataagaaattgtggattcaagctggaggggacagagagaacataccctcgatttgggaagcaccaccgtcgagtgaaccaccaaacaacgtgagcacaaattcggaatgggaagcaccgacccagaaagataaatttccaaagccttgcaattggaggaaaaacgaattcaaaaaatggaccaaattggcatcccaaggccgcggaattgtaaattttgaaagagacaaaattagtaaccattggatccaatactacagacgcatacctcacaggaaactcctcactgcactacaactcagggccaacgtttaccccacgagagaatttctagccaggggtagacaagaccaatacatcaaggcgtgtaggcactgcgatgcggacaacgaatcctgcgcccacatcatcggcaactgcccagtgacacaggacgcccgaatcaagaggcacaattacatctgcgaactgcttctcgaggaggcgaagaagaaggactgggtagtgttcaaggaaccgcacataagggattccaacaaggaactgtacaaacctgacctgatatttgtgaaggatgggcgtgcacttgtcgtggatgtgacagtacggtatgaagcagccaaatcatcgctggaggaagccgctgcagagaaagtgagaaagtacaaacacctggaaacggaagtaagacatctcacgaatgcaaaggacgttacttttgtgggctttcccctaggagcgcgggggaaatggcaccaagataactttaaacttttgactgagcttggcctctccaaatcgaggcaagtgaaaatggcagagactttttccacagtagcgctcttttcatctgtggacattgtacatatgtttgccagtagggccagaaaatctatggttatgtgataataggctgccttctgcggggcttgccttctggccatgcccttcttctctcccttgcacctgtacctcttggtctttgaataaagcctgagtaggaaggaccggtaaaaaaaaaaaaaaaaaaaaaaaaaaaaaaacgttgactaaaaaaaaaaaaaaaaaaaaaaaaaaaaaaaaaaaaaaaaaaaaaaaaaaaaaaaaaaaaaaaaaaaaaa

SEQ ID NO: 10835 - DNA, 5264 bp, synthetic construct
  source 1..5264: mol_type = other DNA
gaaataagagagaaaagaagagtaagaagaaatataagagaattcgccaccatggcccctaagaaaaagcggaaggtgaatatcagcggctctagctgcggcagccccaacagcgccgacaccagcagcgacttcaaggacctgtggaccaagctgaaggaatgccacgaccgggaagtgcagggactccaggtgaaggtcaccaaactcaagcaagaaagaatcctggacgcccagagactggaagaattcttcaccaagaaccagcagctgagagagcagcagaaagtgctgcacgagacaatcaaggttctggaagatagactgcgggccggcctgtgcgacagatgcgccgtgaccgaggaacacatgcgcaaaaagcagcaggagttcgagaacattagacagcaaaatctgaaattgatcacagagctgatgaacgagagaaacacactgcaggaggagaacaagaagctgagcgagcagctgcaacagaagatcgagaatgatcagcaacaccaggccgctgagctggaatgtgaagaggacgtgatccccgacagcccaatcacagctttcagcttttctggcgtgaacagactgaggcggaaggaaaacccccacgtgcggtacatcgagcagacccataccaagctggaacacagcgtgtgtgccaacgagatgagaaaggtgtccaagtcctccacccatccccagcacaaccctaacgaaaatgagatcctggtggctgatacctacgaccagtctcagagccctatggccaaggcccacggcaccagctcttatacccctgataagagctccttcaacctggccaccgtggtggccgagacactgggcctgggcgtgcaggaggaaagcgagacacagggcccaatgagccctctgggagatgagctgtaccactgcctggaaggcaaccacaagaaacagccttttgagtccggctccgagactcctggaacaagcgagagcgctacacctgagggcagccctaagagaaaggtgtccagcgccgagggcgctgccaaggaagagcctaaacggagaagcgccagactgagcgccaagccccccgccaaggtggaagccaagcctaagaaggccgccgctaaggacaagagcagcgataagaaagtccagaccaagggcaagcggggcgccaaaggcaaacaggccgaggtggccaaccaggagacaaaggaagatctgcctgctgagaacggcgaaaccaagaccgaggaatctccagcttctgacgaggccggagagaaggaggccaaaagcgacagcggctctgagacacctggaacaagcgagagcgccaccccggaatcctatgaacaacttgcaccacaaccgtgtgtgggagaaactttacattctagcctcccacgagacagtgaactgtttgtgcctgaagaggggagcagcgagaaggagagcgaggacgcgccaaaaacatctcctccgacgcctgggaaacatggtttggaacagactggggaggaaaaagtgatggtgactgttcctgacaaaaatccaccttgtccttgctgtggtacccgggtaaactctgtgttgaatctgattgaacatctgaaagtgtcacacgggaaaaggggggtttgttttcggtgtgcaaaatgtggaaaggaaaatagtaactatcacagtgttgtttgtcattttaagaaatgcaggggtccagagacggagaaagccccagctggggagtggatttgtgaggtatgcaacagagattttacaaccaaaattggcctgggacaacacaagagattggcacacccagcagtgagaaatcaggaaaggatcgttgcttcccaaccgaaagaaacatcaaatagaggtgctcacaaaaggtgctggacaaaggaggaggaagaattactaataagactggaggctcagttcgagggaaacaaaaatattaataagcttattgcagaacacataaccaccaaaacagctaagcagatcagtgacaaaaggcgattgctgtccagaaagccagcagaggagccacgtgaggagcctggaacgtgtcatcacaccaggagagcagctgcgagcctgagaacggagcctgagatgagtcatcacgcccaggcagaggacagagataatggacctgggagacgccctctgccaggcagggcagctgccggagggagaacaatggacgagataagacgccaccctgataagggcaacggacagcagagacccaccaagcaaaaatcagaagaacagctgcaggcttactataaaaagacactagaggaacgactttcagctggggcacttaacaccttcccccgagcattcaagcaggtaatggaaggccgggatataaagctagtaatcaatcagacagcgcaggactgcttcggatgcctggaatccataagccaaataagaacggcaacccgagataaaaaggacacggtgacccgggagaaacacccaaagaaaccttttcagaagtggatgaagaagagagcaatcaaaaaaggtaattatcttcggttccagcgtttattttatcttgatagacacaaactggctaaaatcattttagatgatattgaatgcttgtcttgtgacataccactcagtgaaatttattcggtttttaaaacaagatgggaaacaactggtagctttaaaagccttggggactttaaaacttacgggaaggctgacaacactgccttcagagaattaattacggctaaagaaattgagaaaaatgtgcaggaaatgagcaaaggctcggctcccggtccagacgggattactcttggggacgtcgtaaagatggatcccgagttttcccggaccatggagattttcaatttatggttaacaactggtaaaatcccggacatggtgagggggtgcagaaccgttttgattccaaaatcatcaaagccggatcgtttgaaagacattaataactggagacctatcacgatcggttccatcttgctgagactgttctccaggattgtaacagctaggctgagcaaagcgtgccccctgaacccaaggcaaagaggctttatcagagcggcgggatgctctgaaaacttaaaactcctgcaaactataatttggtcggccaaaagagaacacagaccactgggtgttgtattcgtggacatcgccaaggcttttgacaccgtaagccaccagcacatcattcatgctttgcagcaaagagaggtggatccccacatcgtcggtctggtgagcaatatgtacgagaacatcagtacgtatatcaccacaaagaggaacacacacacagacaaaatccagatccgggttggagtaaagcagggtgacccgatgtcgccccttttatttaacctggcaatggaccctctattatgcaagctggaagagagtggcaaaggataccaccgaggacagagcagcatcacagcgatggcatttgcagacgatctggttttgctgagcgactcctgggaaaatatgaatacaaatattagcatactggagaccttctgcaatctgaccggactcaaaacacaggggcaaaagtgccacggcttttacatcaagccgacaaagaagtcttacaccatcaatgactgcgctgcctggactatcaacggcacacccctgaacatgatcgaccccggcgaatctgagaaatacctcggcctgcagtttgacccgtggattggaatagcaaggtccggtctctccacaaaactagatttttggcttcagcggatcgatcaagcaccacttaaacctctgcagaaaactgatattctcaaaacatacaccatccctcggctgatctacatagctgaccactcagaagtgaaaagcgcactactcgaaacccttgaccagaagatccggacagcggtcaaggaatggcttcacctacctccgtgcacctgcgatgccatcctgtactcgagcacgagagacggcggtttgggcatcaccaaattggcaggactgatccccagcgtgcaggcccgtagactgcatcggatcgcacagtcatctgacgatacgatgaaatgcttcatggaaaaagagaaaatggaacagctgcataagaaattgtggattcaagctggaggggacagagagaacataccctcgatttgggaagcaccaccgtcgagtgaaccaccaaacaacgtgagcacaaattcggaatgggaagcaccgacccagaaagataaatttccaaagccttgcaattggaggaaaaacgaattcaaaaaatggaccaaattggcatcccaaggccgcggaattgtaaattttgaaagagacaaaattagtaaccattggatccaatactacagacgcatacctcacaggaaactcctcactgcactacaactcagggccaacgtttaccccacgagagaatttctagccaggggtagacaagaccaatacatcaaggcgtgtaggcactgcgatgcggacaacgaatcctgcgcccacatcatcggcaactgcccagtgacacaggacgcccgaatcaagaggcacaattacatctgcgaactgcttctcgaggaggcgaagaagaaggactgggtagtgttcaaggaaccgcacataagggattccaacaaggaactgtacaaacctgacctgatatttgtgaaggatgggcgtgcacttgtcgtggatgtgacagtacggtatgaagcagccaaatcatcgctggaggaagccgctgcagagaaagtgagaaagtacaaacacctggaaacggaagtaagacatctcacgaatgcaaaggacgttacttttgtgggctttcccctaggagcgcgggggaaatggcaccaagataactttaaacttttgactgagcttggcctctccaaatcgaggcaagtgaaaatggcagagactttttccacagtagcgctcttttcatctgtggacattgtacatatgtttgccagtagggccagaaaatctatggttatgtgataataggctgccttctgcggggcttgccttctggccatgcccttcttctctcccttgcacctgtacctcttggtctttgaataaagcctgagtaggaaggaccggtaaaaaaaaaaaaaaaaaaaaaaaaaaaaaaacgttgactaaaaaaaaaaaaaaaaaaaaaaaaaaaaaaaaaaaaaaaaaaaaaaaaaaaaaaaaaaaaaaaaaaaaaa

SEQ ID NO: 10836 - DNA, 5264 bp, synthetic construct
  source 1..5264: mol_type = other DNA
gaaataagagagaaaagaagagtaagaagaaatataagagaattcgccaccatggcccctaagaaaaagcggaaggtgaatatcagcggctctagctgcggcagccccaacagcgccgacaccagcagcgacttcaaggacctgtggaccaagctgaaggaatgccacgaccgggaagtgcagggactccaggtgaaggtcaccaaactcaagcaagaaagaatcctggacgcccagagactggaagaattcttcaccaagaaccagcagctgagagagcagcagaaagtgctgcacgagacaatcaaggttctggaagatagactgcgggccggcctgtgcgacagatgcgccgtgaccgaggaacacatgcgcaaaaagcagcaggagttcgagaacattagacagcaaaatctgaaattgatcacagagctgatgaacgagagaaacacactgcaggaggagaacaagaagctgagcgagcagctgcaacagaagatcgagaatgatcagcaacaccaggccgctgagctggaatgtgaagaggacgtgatccccgacagcccaatcacagctttcagcttttctggcgtgaacagactgaggcggaaggaaaacccccacgtgcggtacatcgagcagacccataccaagctggaacacagcgtgtgtgccaacgagatgagaaaggtgtccaagtcctccacccatccccagcacaaccctaacgaaaatgagatcctggtggctgatacctacgaccagtctcagagccctatggccaaggcccacggcaccagctcttatacccctgataagagctccttcaacctggccaccgtggtggccgagacactgggcctgggcgtgcaggaggaaagcgagacacagggcccaatgagccctctgggagatgagctgtaccactgcctggaaggcaaccacaagaaacagccttttgagtccggctccgagactcctggaacaagcgagagcgctacacctgagggcagccctaagagaaaggtgtccagcgccgagggcgctgccaaggaagagcctaaacggagaagcgccagactgagcgccaagccccccgccaaggtggaagccaagcctaagaaggccgccgctaaggacaagagcagcgataagaaagtccagaccaagggcaagcggggcgccaaaggcaaacaggccgaggtggccaaccaggagacaaaggaagatctgcctgctgagaacggcgaaaccaagaccgaggaatctccagcttctgacgaggccggagagaaggaggccaaaagcgacagcggctctgagacacctggaacaagcgagagcgccaccccggaatcctatgaacaacttgcaccacaaccgtgtgtgggagaaactttacattctagcctcccacgagacagtgaactgtttgtgcctgaagaggggagcagcgagaaggagagcgaggacgcgccaaaaacatctcctccgacgcctgggaaacatggtttggaacagactggggaggaaaaagtgatggtgactgttcctgacaaaaatccaccttgtccttgctgtggtacccgggtaaactctgtgttgaatctgattgaacatctgaaagtgtcacacgggaaaaggggggtttgttttcggtgtgcaaaatgtggaaaggaaaatagtaactatcacagtgttgtttgtcattttaagaaatgcaggggtccagagacggagaaagccccagctggggagtggatttgtgaggtatgcaacagagattttacaaccaaaattggcctgggacaacacaagagattggcacacccagcagtgagaaatcaggaaaggatcgttgcttcccaaccgaaagaaacatcaaatagaggtgctcacaaaaggtgctggacaaaggaggaggaagaattactaataagactggaggctcagttcgagggaaacaaaaatattaataagcttattgcagaacacataaccaccaaaacagctaagcagatcagtgacaaaaggcgattgctgtccagaaagccagcagaggagccacgtgaggagcctggaacgtgtcatcacaccaggagagcagctgcgagcctgagaacggagcctgagatgagtcatcacgcccaggcagaggacagagataatggacctgggagacgccctctgccaggcagggcagctgccggagggagaacaatggacgagataagacgccaccctgataagggcaacggacagcagagacccaccaagcaaaaatcagaagaacagctgcaggcttactataaaaagacactagaggaacgactttcagctggggcacttaacaccttcccccgagcattcaagcaggtaatggaaggccgggatataaagctagtaatcaatcagacagcgcaggactgcttcggatgcctggaatccataagccaaataagaacggcaacccgagataaaaaggacacggtgacccgggagaaacacccaaagaaaccttttcagaagtggatgaagaagagagcaatcaaaaaaggtaattatcttcggttccagcgtttattttatcttgatagagggaaactggctaaaatcattttagatgatattgaatgcttgtcttgtgacataccactcagtgaaatttattcggtttttaaaacaagatgggaaacaactggtagctttaaaagccttggggactttaaaacttacgggaaggctgacaacactgccttcagagaattaattacggctaaagaaattgagaaaaatgtgcaggaaatgagcaaaggctcggctcccggtccagacgggattactcttggggacgtcgtaaagatggatcccgagttttcccggaccatggagattttcaatttatggttaacaactggtaaaatcccggacatggtgagggggtgcagaaccgttttgattccaaaatcatcaaagccggatcgtttgaaagacattaataactggagacctatcacgatcggttccatcttgctgagactgttctccaggattgtaacagctaggctgagcaaagcgtgccccctgaacccaaggcaaagaggctttatcagagcggcgggatgctctgaaaacttaaaactcctgcaaactataatttggtcggccaaaagagaacacagaccactgggtgttgtattcgtggacatcgccaaggcttttgacaccgtaagccaccagcacatcattcatgctttgcagcaaagagaggtggatccccacatcgtcggtctggtgagcaatatgtacgagaacatcagtacgtatatcaccacaaagaggaacacacacacagacaaaatccagatccgggttggagtaaagcagggtgacccgatgtcgccccttttatttaacctggcaatggaccctctattatgcaagctggaagagagtggcaaaggataccaccgaggacagagcagcatcacagcgatggcatttgcagacgatctggttttgctgagcgactcctgggaaaatatgaatacaaatattagcatactggagaccttctgcaatctgaccggactcaaaacacaggggcaaaagtgccacggcttttacatcaagccgacaaagaagtcttacaccatcaatgactgcgctgcctggactatcaacggcacacccctgaacatgatcgaccccggcgaatctgagaaatacctcggcctgcagtttgacccgtggattggaatagcaaggtccggtctctccacaaaactagatttttggcttcagcggatcgatcaagcaccacttaaacctctgcagaaaactgatattctcaaaacatacaccatccctcggctgatctacatagctgaccactcagaagtgaaaagcgcactactcgaaacccttgaccagaagatccggacagcggtcaaggaatggcttcacctacctccgtgcacctgcgatgccatcctgtactcgagcacgagagacggcggtttgggcatcaccaaattggcaggactgatccccagcgtgcaggcccgtagactgcatcggatcgcacagtcatctgacgatacgatgaaatgcttcatggaaaaagagaaaatggaacagctgcataagaaattgtggattcaagctggaggggacagagagaacataccctcgatttgggaagcaccaccgtcgagtgaaccaccaaacaacgtgagcacaaattcggaatgggaagcaccgacccagaaagataaaaccccaaagccttgcaattggaggaaaaacgaattcaaaaaatggaccaaattggcatcccaaggccgcggaattgtaaattttgaaagagacaaaattagtaaccattggatccaatactacagacgcatacctcacaggaaactcctcactgcactacaactcagggccaacgtttaccccacgagagaatttctagccaggggtagacaagaccaatacatcaaggcgtgtaggcactgcgatgcggacaacgaatcctgcgcccacatcatcggcaactgcccagtgacacaggacgcccgaatcaagaggcacaattacatctgcgaactgcttctcgaggaggcgaagaagaaggactgggtagtgttcaaggaaccgcacataagggattccaacaaggaactgtacaaacctgacctgatatttgtgaaggatgggcgtgcacttgtcgtggatgtgacagtacggtatgaagcagccaaatcatcgctggaggaagccgctgcagagaaagtgagaaagtacaaacacctggaaacggaagtaagacatctcacgaatgcaaaggacgttacttttgtgggctttcccctaggagcgcgggggaaatggcaccaagataactttaaacttttgactgagcttggcctctccaaatcgaggcaagtgaaaatggcagagactttttccacagtagcgctcttttcatctgtggacattgtacatatgtttgccagtagggccagaaaatctatggttatgtgataataggctgccttctgcggggcttgccttctggccatgcccttcttctctcccttgcacctgtacctcttggtctttgaataaagcctgagtaggaaggaccggtaaaaaaaaaaaaaaaaaaaaaaaaaaaaaaacgttgactaaaaaaaaaaaaaaaaaaaaaaaaaaaaaaaaaaaaaaaaaaaaaaaaaaaaaaaaaaaaaaaaaaaaaa

SEQ ID NO: 10837 - DNA, 5264 bp, synthetic construct
  source 1..5264: mol_type = other DNA
gaaataagagagaaaagaagagtaagaagaaatataagagaattcgccaccatggcccctaagaaaaagcggaaggtgaatatcagcggctctagctgcggcagccccaacagcgccgacaccagcagcgacttcaaggacctgtggaccaagctgaaggaatgccacgaccgggaagtgcagggactccaggtgaaggtcaccaaactcaagcaagaaagaatcctggacgcccagagactggaagaattcttcaccaagaaccagcagctgagagagcagcagaaagtgctgcacgagacaatcaaggttctggaagatagactgcgggccggcctgtgcgacagatgcgccgtgaccgaggaacacatgcgcaaaaagcagcaggagttcgagaacattagacagcaaaatctgaaattgatcacagagctgatgaacgagagaaacacactgcaggaggagaacaagaagctgagcgagcagctgcaacagaagatcgagaatgatcagcaacaccaggccgctgagctggaatgtgaagaggacgtgatccccgacagcccaatcacagctttcagcttttctggcgtgaacagactgaggcggaaggaaaacccccacgtgcggtacatcgagcagacccataccaagctggaacacagcgtgtgtgccaacgagatgagaaaggtgtccaagtcctccacccatccccagcacaaccctaacgaaaatgagatcctggtggctgatacctacgaccagtctcagagccctatggccaaggcccacggcaccagctcttatacccctgataagagctccttcaacctggccaccgtggtggccgagacactgggcctgggcgtgcaggaggaaagcgagacacagggcccaatgagccctctgggagatgagctgtaccactgcctggaaggcaaccacaagaaacagccttttgagtccggctccgagactcctggaacaagcgagagcgctacacctgagggcagccctaagagaaaggtgtccagcgccgagggcgctgccaaggaagagcctaaacggagaagcgccagactgagcgccaagccccccgccaaggtggaagccaagcctaagaaggccgccgctaaggacaagagcagcgataagaaagtccagaccaagggcaagcggggcgccaaaggcaaacaggccgaggtggccaaccaggagacaaaggaagatctgcctgctgagaacggcgaaaccaagaccgaggaatctccagcttctgacgaggccggagagaaggaggccaaaagcgacagcggctctgagacacctggaacaagcgagagcgccaccccggaatcctatgaacaacttgcaccacaaccgtgtgtgggagaaactttacattctagcctcccacgagacagtgaactgtttgtgcctgaagaggggagcagcgagaaggagagcgaggacgcgccaaaaacatctcctccgacgcctgggaaacatggtttggaacagactggggaggaaaaagtgatggtgactgttcctgacaaaaatccaccttgtccttgctgtggtacccgggtaaactctgtgttgaatctgattgaacatctgaaagtgtcacacgggaaaaggggggtttgttttcggtgtgcaaaatgtggaaaggaaaatagtaactatcacagtgttgtttgtcattttaagaaatgcaggggtccagagacggagaaagccccagctggggagtggatttgtgaggtatgcaacagagattttacaaccaaaattggcctgggacaacacaagagattggcacacccagcagtgagaaatcaggaaaggatcgttgcttcccaaccgaaagaaacatcaaatagaggtgctcacaaaaggtgctggacaaaggaggaggaagaattactaataagactggaggctcagttcgagggaaacaaaaatattaataagcttattgcagaacacataaccaccaaaacagctaagcagatcagtgacaaaaggcgattgctgtccagaaagccagcagaggagccacgtgaggagcctggaacgtgtcatcacaccaggagagcagctgcgagcctgagaacggagcctgagatgagtcatcacgcccaggcagaggacagagataatggacctgggagacgccctctgccaggcagggcagctgccggagggagaacaatggacgagataagacgccaccctgataagggcaacggacagcagagacccaccaagcaaaaatcagaagaacagctgcaggcttactataaaaagacactagaggaacgactttcagctggggcacttaacaccttcccccgagcattcaagcaggtaatggaaggccgggatataaagctagtaatcaatcagacagcgcaggactgcttcggatgcctggaatccataagccaaataagaacggcaacccgagataaaaaggacacggtgacccgggagaaacacccaaagaaaccttttcagaagtggatgaagaagagagcaatcaaaaaaggtaattatcttcggttccagcgtttattttatcttgatagagggatgctggctaaaatcattttagatgatattgaatgcttgtcttgtgacataccactcagtgaaatttattcggtttttaaaacaagatgggaaacaactggtagctttaaaagccttggggactttaaaacttacgggaaggctgacaacactgccttcagagaattaattacggctaaagaaattgagaaaaatgtgcaggaaatgagcaaaggctcggctcccggtccagacgggattactcttggggacgtcgtaaagatggatcccgagttttcccggaccatggagattttcaatttatggttaacaactggtaaaatcccggacatggtgagggggtgcagaaccgttttgattccaaaatcatcaaagccggatcgtttgaaagacattaataactggagacctatcacgatcggttccatcttgctgagactgttctccaggattgtaacagctaggctgagcaaagcgtgccccctgaacccaaggcaaagaggctttatcagagcggcgggatgctctgaaaacttaaaactcctgcaaactataatttggtcggccaaaagagaacacagaccactgggtgttgtattcgtggacatcgccaaggcttttgacaccgtaagccaccagcacatcattcatgctttgcagcaaagagaggtggatccccacatcgtcggtctggtgagcaatatgtacgagaacatcagtacgtatatcaccacaaagaggaacacacacacagacaaaatccagatccgggttggagtaaagcagggtgacccgatgtcgccccttttatttaacctggcaatggaccctctattatgcaagctggaagagagtggcaaaggataccaccgaggacagagcagcatcacagcgatggcatttgcagacgatctggttttgctgagcgactcctgggaaaatatgaatacaaatattagcatactggagaccttctgcaatctgaccggactcaaaacacaggggcaaaagtgccacggcttttacatcaagccgacaaagaagtcttacaccatcaatgactgcgctgcctggactatcaacggcacacccctgaacatgatcgaccccggcgaatctgagaaatacctcggcctgcagtttgacccgtggattggaatagcaaggtccggtctctccacaaaactagatttttggcttcagcggatcgatcaagcaccacttaaacctctgcagaaaactgatattctcaaaacatacaccatccctcggctgatctacatagctgaccactcagaagtgaaaagcgcactactcgaaacccttgaccagaagatccggacagcggtcaaggaatggcttcacctacctccgtgcacctgcgatgccatcctgtactcgagcacgagagacggcggtttgggcatcaccaaattggcaggactgatccccagcgtgcaggcccgtagactgcatcggatcgcacagtcatctgacgatacgatgaaatgcttcatggaaaaagagaaaatggaacagctgcataagaaattgtggattcaagctggaggggacagagagaacataccctcgatttgggaagcaccaccgtcgagtgaaccaccaaacaacgtgagcacaaattcggaatgggaagcaccgacccagaaagataaatttccaaagccttgcaattggaggaaaaacgaattcaaaaaatggaccaaattggcatcccaaggccgcggaattgtaaattttgaaagagacaaaattagtaaccattggatccaatactacagacgcatacctcacaggaaactcctcactgcactacaactcagggccaacgtttaccccacgagagaatttctagccaggggtagacaagaccaatacatcaaggcgtgtaggcactgcgatgcggacaacgaatcctgcgcccacatcatcggcaactgcccagtgacacaggacgcccgaatcaagaggcacaattacatctgcgaactgcttctcgaggaggcgaagaagaaggactgggtagtgttcaaggaaccgcacataagggattccaacaaggaactgtacaaacctgacctgatatttgtgaaggatgggcgtgcacttgtcgtggatgtgacagtacggtatgaagcagccaaatcatcgctggaggaagccgctgcagagaaagtgagaaagtacaaacacctggaaacggaagtaagacatctcacgaatgcaaaggacgttacttttgtgggctttcccctaggagcgcgggggaaatggcaccaagataactttaaacttttgactgagcttggcctctccaaatcgaggcaagtgaaaatggcagagactttttccacagtagcgctcttttcatctgtggacattgtacatatgtttgccagtagggccagaaaatctatggttatgtgataataggctgccttctgcggggcttgccttctggccatgcccttcttctctcccttgcacctgtacctcttggtctttgaataaagcctgagtaggaaggaccggtaaaaaaaaaaaaaaaaaaaaaaaaaaaaaaacgttgactaaaaaaaaaaaaaaaaaaaaaaaaaaaaaaaaaaaaaaaaaaaaaaaaaaaaaaaaaaaaaaaaaaaaaa

SEQ ID NO: 10838 - DNA, 5264 bp, synthetic construct
  source 1..5264: mol_type = other DNA
gaaataagagagaaaagaagagtaagaagaaatataagagaattcgccaccatggcccctaagaaaaagcggaaggtgaatatcagcggctctagctgcggcagccccaacagcgccgacaccagcagcgacttcaaggacctgtggaccaagctgaaggaatgccacgaccgggaagtgcagggactccaggtgaaggtcaccaaactcaagcaagaaagaatcctggacgcccagagactggaagaattcttcaccaagaaccagcagctgagagagcagcagaaagtgctgcacgagacaatcaaggttctggaagatagactgcgggccggcctgtgcgacagatgcgccgtgaccgaggaacacatgcgcaaaaagcagcaggagttcgagaacattagacagcaaaatctgaaattgatcacagagctgatgaacgagagaaacacactgcaggaggagaacaagaagctgagcgagcagctgcaacagaagatcgagaatgatcagcaacaccaggccgctgagctggaatgtgaagaggacgtgatccccgacagcccaatcacagctttcagcttttctggcgtgaacagactgaggcggaaggaaaacccccacgtgcggtacatcgagcagacccataccaagctggaacacagcgtgtgtgccaacgagatgagaaaggtgtccaagtcctccacccatccccagcacaaccctaacgaaaatgagatcctggtggctgatacctacgaccagtctcagagccctatggccaaggcccacggcaccagctcttatacccctgataagagctccttcaacctggccaccgtggtggccgagacactgggcctgggcgtgcaggaggaaagcgagacacagggcccaatgagccctctgggagatgagctgtaccactgcctggaaggcaaccacaagaaacagccttttgagtccggctccgagactcctggaacaagcgagagcgctacacctgagggcagccctaagagaaaggtgtccagcgccgagggcgctgccaaggaagagcctaaacggagaagcgccagactgagcgccaagccccccgccaaggtggaagccaagcctaagaaggccgccgctaaggacaagagcagcgataagaaagtccagaccaagggcaagcggggcgccaaaggcaaacaggccgaggtggccaaccaggagacaaaggaagatctgcctgctgagaacggcgaaaccaagaccgaggaatctccagcttctgacgaggccggagagaaggaggccaaaagcgacagcggctctgagacacctggaacaagcgagagcgccaccccggaatcctatgaacaacttgcaccacaaccgtgtgtgggagaaactttacattctagcctcccacgagacagtgaactgtttgtgcctgaagaggggagcagcgagaaggagagcgaggacgcgccaaaaacatctcctccgacgcctgggaaacatggtttggaacagactggggaggaaaaagtgatggtgactgttcctgacaaaaatccaccttgtccttgctgtggtacccgggtaaactctgtgttgaatctgattgaacatctgaaagtgtcacacgggaaaaggggggtttgttttcggtgtgcaaaatgtggaaaggaaaatagtaactatcacagtgttgtttgtcattttaagaaatgcaggggtccagagacggagaaagccccagctggggagtggatttgtgaggtatgcaacagagattttacaaccaaaattggcctgggacaacacaagagattggcacacccagcagtgagaaatcaggaaaggatcgttgcttcccaaccgaaagaaacatcaaatagaggtgctcacaaaaggtgctggacaaaggaggaggaagaattactaataagactggaggctcagttcgagggaaacaaaaatattaataagcttattgcagaacacataaccaccaaaacagctaagcagatcagtgacaaaaggcgattgctgtccagaaagccagcagaggagccacgtgaggagcctggaacgtgtcatcacaccaggagagcagctgcgagcctgagaacggagcctgagatgagtcatcacgcccaggcagaggacagagataatggacctgggagacgccctctgccaggcagggcagctgccggagggagaacaatggacgagataagacgccaccctgataagggcaacggacagcagagacccaccaagcaaaaatcagaagaacagctgcaggcttactataaaaagacactagaggaacgactttcagctggggcacttaacaccttcccccgagcattcaagcaggtaatggaaggccgggatataaagctagtaatcaatcagacagcgcaggactgcttcggatgcctggaatccataagccaaataagaacggcaacccgagataaaaaggacacggtgacccgggagaaacacccaaagaaaccttttcagaagtggatgaagaagagagcaatcaaaaaaggtaattatcttcggttccagcgtttattttatcttgatagagggaaactggctaaaatcattttagatgatattgaatgcttgtcttgtgacataccactcagtgaaatttattcggtttttaaaacaagatgggaaacaactggtagctttaaaagccttggggactttaaaacttacgggaaggctgacaacactgccttcagagaattaattacggctaaagaaattgagaaaaatgtgcaggaaatgagcaaaggctcggctcccggtccagacgggattactcttggggacgtcgtaaagatggatcccgagttttcccggaccatggagattttcaatttatggttaacaactggtaaaatcccggacatggtgagggggtgcagaaccgttttgattccaaaatcatcaaagccggatcgtttgaaagacattaataactggagacctatcacgatcggttccatcttgctgagactgttctccaggattgtaacagctaggctgagcaaagcgtgccccctgaacccaaggcaaagaggctttatcagagcggcgggatgctctgaaaacttaaaactcctgcaaactataatttggtcggccaaaagagaacacagaccactgggtgttgtattcgtggacatcgccaaggcttgggacaccgtaagccaccagcacatcattcatgctttgcagcaaagagaggtggatccccacatcgtcggtctggtgagcaatatgtacgagaacatcagtacgtatatcaccacaaagaggaacacacacacagacaaaatccagatccgggttggagtaaagcagggtgacccgatgtcgccccttttatttaacctggcaatggaccctctattatgcaagctggaagagagtggcaaaggataccaccgaggacagagcagcatcacagcgatggcatttgcagacgatctggttttgctgagcgactcctgggaaaatatgaatacaaatattagcatactggagaccttctgcaatctgaccggactcaaaacacaggggcaaaagtgccacggcttttacatcaagccgacaaagaagtcttacaccatcaatgactgcgctgcctggactatcaacggcacacccctgaacatgatcgaccccggcgaatctgagaaatacctcggcctgcagtttgacccgtggattggaatagcaaggtccggtctctccacaaaactagatttttggcttcagcggatcgatcaagcaccacttaaacctctgcagaaaactgatattctcaaaacatacaccatccctcggctgatctacatagctgaccactcagaagtgaaaagcgcactactcgaaacccttgaccagaagatccggacagcggtcaaggaatggcttcacctacctccgtgcacctgcgatgccatcctgtactcgagcacgagagacggcggtttgggcatcaccaaattggcaggactgatccccagcgtgcaggcccgtagactgcatcggatcgcacagtcatctgacgatacgatgaaatgcttcatggaaaaagagaaaatggaacagctgcataagaaattgtggattcaagctggaggggacagagagaacataccctcgatttgggaagcaccaccgtcgagtgaaccaccaaacaacgtgagcacaaattcggaatgggaagcaccgacccagaaagataaatttccaaagccttgcaattggaggaaaaacgaattcaaaaaatggaccaaattggcatcccaaggccgcggaattgtaaattttgaaagagacaaaattagtaaccattggatccaatactacagacgcatacctcacaggaaactcctcactgcactacaactcagggccaacgtttaccccacgagagaatttctagccaggggtagacaagaccaatacatcaaggcgtgtaggcactgcgatgcggacaacgaatcctgcgcccacatcatcggcaactgcccagtgacacaggacgcccgaatcaagaggcacaattacatctgcgaactgcttctcgaggaggcgaagaagaaggactgggtagtgttcaaggaaccgcacataagggattccaacaaggaactgtacaaacctgacctgatatttgtgaaggatgggcgtgcacttgtcgtggatgtgacagtacggtatgaagcagccaaatcatcgctggaggaagccgctgcagagaaagtgagaaagtacaaacacctggaaacggaagtaagacatctcacgaatgcaaaggacgttacttttgtgggctttcccctaggagcgcgggggaaatggcaccaagataactttaaacttttgactgagcttggcctctccaaatcgaggcaagtgaaaatggcagagactttttccacagtagcgctcttttcatctgtggacattgtacatatgtttgccagtagggccagaaaatctatggttatgtgataataggctgccttctgcggggcttgccttctggccatgcccttcttctctcccttgcacctgtacctcttggtctttgaataaagcctgagtaggaaggaccggtaaaaaaaaaaaaaaaaaaaaaaaaaaaaaaacgttgactaaaaaaaaaaaaaaaaaaaaaaaaaaaaaaaaaaaaaaaaaaaaaaaaaaaaaaaaaaaaaaaaaaaaaa

SEQ ID NO: 10839 - DNA, 5264 bp, synthetic construct
  source 1..5264: mol_type = other DNA
gaaataagagagaaaagaagagtaagaagaaatataagagaattcgccaccatggcccctaagaaaaagcggaaggtgaatatcagcggctctagctgcggcagccccaacagcgccgacaccagcagcgacttcaaggacctgtggaccaagctgaaggaatgccacgaccgggaagtgcagggactccaggtgaaggtcaccaaactcaagcaagaaagaatcctggacgcccagagactggaagaattcttcaccaagaaccagcagctgagagagcagcagaaagtgctgcacgagacaatcaaggttctggaagatagactgcgggccggcctgtgcgacagatgcgccgtgaccgaggaacacatgcgcaaaaagcagcaggagttcgagaacattagacagcaaaatctgaaattgatcacagagctgatgaacgagagaaacacactgcaggaggagaacaagaagctgagcgagcagctgcaacagaagatcgagaatgatcagcaacaccaggccgctgagctggaatgtgaagaggacgtgatccccgacagcccaatcacagctttcagcttttctggcgtgaacagactgaggcggaaggaaaacccccacgtgcggtacatcgagcagacccataccaagctggaacacagcgtgtgtgccaacgagatgagaaaggtgtccaagtcctccacccatccccagcacaaccctaacgaaaatgagatcctggtggctgatacctacgaccagtctcagagccctatggccaaggcccacggcaccagctcttatacccctgataagagctccttcaacctggccaccgtggtggccgagacactgggcctgggcgtgcaggaggaaagcgagacacagggcccaatgagccctctgggagatgagctgtaccactgcctggaaggcaaccacaagaaacagccttttgagtccggctccgagactcctggaacaagcgagagcgctacacctgagggcagccctaagagaaaggtgtccagcgccgagggcgctgccaaggaagagcctaaacggagaagcgccagactgagcgccaagccccccgccaaggtggaagccaagcctaagaaggccgccgctaaggacaagagcagcgataagaaagtccagaccaagggcaagcggggcgccaaaggcaaacaggccgaggtggccaaccaggagacaaaggaagatctgcctgctgagaacggcgaaaccaagaccgaggaatctccagcttctgacgaggccggagagaaggaggccaaaagcgacagcggctctgagacacctggaacaagcgagagcgccaccccggaatcctatgaacaacttgcaccacaaccgtgtgtgggagaaactttacattctagcctcccacgagacagtgaactgtttgtgcctgaagaggggagcagcgagaaggagagcgaggacgcgccaaaaacatctcctccgacgcctgggaaacatggtttggaacagactggggaggaaaaagtgatggtgactgttcctgacaaaaatccaccttgtccttgctgtggtacccgggtaaactctgtgttgaatctgattgaacatctgaaagtgtcacacgggaaaaggggggtttgttttcggtgtgcaaaatgtggaaaggaaaatagtaactatcacagtgttgtttgtcattttaagaaatgcaggggtccagagacggagaaagccccagctggggagtggatttgtgaggtatgcaacagagattttacaaccaaaattggcctgggacaacacaagagattggcacacccagcagtgagaaatcaggaaaggatcgttgcttcccaaccgaaagaaacatcaaatagaggtgctcacaaaaggtgctggacaaaggaggaggaagaattactaataagactggaggctcagttcgagggaaacaaaaatattaataagcttattgcagaacacataaccaccaaaacagctaagcagatcagtgacaaaaggcgattgctgtccagaaagccagcagaggagccacgtgaggagcctggaacgtgtcatcacaccaggagagcagctgcgagcctgagaacggagcctgagatgagtcatcacgcccaggcagaggacagagataatggacctgggagacgccctctgccaggcagggcagctgccggagggagaacaatggacgagataagacgccaccctgataagggcaacggacagcagagacccaccaagcaaaaatcagaagaacagctgcaggcttactataaaaagacactagaggaacgactttcagctggggcacttaacaccttcccccgagcattcaagcaggtaatggaaggccgggatataaagctagtaatcaatcagacagcgcaggactgcttcggatgcctggaatccataagccaaataagaacggcaacccgagataaaaaggacacggtgacccgggagaaacacccaaagaaaccttttcagaagtggatgaagaagagagcaatcaaaaaaggtaattatcttcggttccagcgtttattttatcttgatagagggaaactggctaaaatcattttagatgatattgaatgcttgtcttgtgacataccactcagtgaaatttattcggtttttaaaacaagatgggaaacaactggtagctttaaaagccttggggactttaaaacttacgggaaggctgacaacactgccttcagagaattaattacggctaaagaaattgagaaaaatgtgcaggaaatgagcaaaggctcggctcccggtccagacgggattactcttggggacgtcgtaaagatggatcccgagttttcccggaccatggagattttcaatttatggttaacaactggtaaaatcccggacatggtgagggggtgcagaaccgttttgattccaaaatcatcaaagccggatcgtttgaaagacattaataactggagacctatcacgatcggttccatcttgctgagactgttctccaggattgtaacagctaggctgagcaaagcgtgccccctgaacccaaggcaaagaggctttatcagagcggcgggatgctctgaaaacttaaaactcctgcaaactataatttggtcggccaaaagagaacacagaccactgggtgttgtattcgtggacatcgccaaggcttttgacaccgtaagccaccagcacatcattcatgctttgcagcaaagagaggtggatccccacatcgtcggtctggtgagcaatatgtacgagaacatcagtacgtatatcaccacaaagaggaacacacacacagacaaaatccagatccgggttggagtaaagcagggtgacccgatgtcgccccttttatttaacctggcaatggaccctctattatgcaagctggaagagagtggcaaaggataccaccgaggacagagcagcatcacagcgatggcatttgcagacgatctggttttgctgagcgactcctgggaaaatatgaatacaaatattagcatactggagaccttctgcaatctgaccggactcaaaacacaggggcaaaagtgccacggcttttacatcaagccgacaaagaagtcttacaccatcaatgactgcgctgcctggactatcaacggcacacccctgaacatgatcgaccccggcgaatctgagaaatacctcggcctgcagtttgacccgtggattggaatagcaaggtccggtctctccacaaaactagatttttggcttcagcggatcgatcaagcaccacttaaacctctgcagaaaactgatattctcaaaacatacaccatccctcggctgatctacatagctgaccactcagaagtgaaaagcgcactactcgaaacccttgaccagaagatccggacagcggtcaaggaatggcttcacctacctccgtgcacctgcgatgccatcctgtactcgagcacgagagacggcggtttgggcatcaccaaattggcaggactgatccccagcgtgcaggcccgtagactgcatcggatcgcacagtcatctgacgatacgatgaaatgcttcatggaaaaagagaaaatggaacagctgcataagaaattgtggattcaagctggaggggacagagagaacataccctcgatttgggaagcaccaccgtcgagtgaaccaccaaacaacgtgagcacaaattcggaatgggaagcaccgacccagaaagataaatttccaaagccttgcagatggaggaaaaacgaattcaaaaaatggaccaaattggcatcccaaggccgcggaattgtaaattttgaaagagacaaaattagtaaccattggatccaatactacagacgcatacctcacaggaaactcctcactgcactacaactcagggccaacgtttaccccacgagagaatttctagccaggggtagacaagaccaatacatcaaggcgtgtaggcactgcgatgcggacaacgaatcctgcgcccacatcatcggcaactgcccagtgacacaggacgcccgaatcaagaggcacaattacatctgcgaactgcttctcgaggaggcgaagaagaaggactgggtagtgttcaaggaaccgcacataagggattccaacaaggaactgtacaaacctgacctgatatttgtgaaggatgggcgtgcacttgtcgtggatgtgacagtacggtatgaagcagccaaatcatcgctggaggaagccgctgcagagaaagtgagaaagtacaaacacctggaaacggaagtaagacatctcacgaatgcaaaggacgttacttttgtgggctttcccctaggagcgcgggggaaatggcaccaagataactttaaacttttgactgagcttggcctctccaaatcgaggcaagtgaaaatggcagagactttttccacagtagcgctcttttcatctgtggacattgtacatatgtttgccagtagggccagaaaatctatggttatgtgataataggctgccttctgcggggcttgccttctggccatgcccttcttctctcccttgcacctgtacctcttggtctttgaataaagcctgagtaggaaggaccggtaaaaaaaaaaaaaaaaaaaaaaaaaaaaaaacgttgactaaaaaaaaaaaaaaaaaaaaaaaaaaaaaaaaaaaaaaaaaaaaaaaaaaaaaaaaaaaaaaaaaaaaaa

SEQ ID NO: 10840 - DNA, 5264 bp, synthetic construct
  source 1..5264: mol_type = other DNA
gaaataagagagaaaagaagagtaagaagaaatataagagaattcgccaccatggcccctaagaaaaagcggaaggtgaatatcagcggctctagctgcggcagccccaacagcgccgacaccagcagcgacttcaaggacctgtggaccaagctgaaggaatgccacgaccgggaagtgcagggactccaggtgaaggtcaccaaactcaagcaagaaagaatcctggacgcccagagactggaagaattcttcaccaagaaccagcagctgagagagcagcagaaagtgctgcacgagacaatcaaggttctggaagatagactgcgggccggcctgtgcgacagatgcgccgtgaccgaggaacacatgcgcaaaaagcagcaggagttcgagaacattagacagcaaaatctgaaattgatcacagagctgatgaacgagagaaacacactgcaggaggagaacaagaagctgagcgagcagctgcaacagaagatcgagaatgatcagcaacaccaggccgctgagctggaatgtgaagaggacgtgatccccgacagcccaatcacagctttcagcttttctggcgtgaacagactgaggcggaaggaaaacccccacgtgcggtacatcgagcagacccataccaagctggaacacagcgtgtgtgccaacgagatgagaaaggtgtccaagtcctccacccatccccagcacaaccctaacgaaaatgagatcctggtggctgatacctacgaccagtctcagagccctatggccaaggcccacggcaccagctcttatacccctgataagagctccttcaacctggccaccgtggtggccgagacactgggcctgggcgtgcaggaggaaagcgagacacagggcccaatgagccctctgggagatgagctgtaccactgcctggaaggcaaccacaagaaacagccttttgagtccggctccgagactcctggaacaagcgagagcgctacacctgagggcagccctaagagaaaggtgtccagcgccgagggcgctgccaaggaagagcctaaacggagaagcgccagactgagcgccaagccccccgccaaggtggaagccaagcctaagaaggccgccgctaaggacaagagcagcgataagaaagtccagaccaagggcaagcggggcgccaaaggcaaacaggccgaggtggccaaccaggagacaaaggaagatctgcctgctgagaacggcgaaaccaagaccgaggaatctccagcttctgacgaggccggagagaaggaggccaaaagcgacagcggctctgagacacctggaacaagcgagagcgccaccccggaatcctatgaacaacttgcaccacaaccgtgtgtgggagaaactttacattctagcctcccacgagacagtgaactgtttgtgcctgaagaggggagcagcgagaaggagagcgaggacgcgccaaaaacatctcctccgacgcctgggaaacatggtttggaacagactggggaggaaaaagtgatggtgactgttcctgacaaaaatccaccttgtccttgctgtggtacccgggtaaactctgtgttgaatctgattgaacatctgaaagtgtcacacgggaaaaggggggtttgttttcggtgtgcaaaatgtggaaaggaaaatagtaactatcacagtgttgtttgtcattttaagaaatgcaggggtccagagacggagaaagccccagctggggagtggatttgtgaggtatgcaacagagattttacaaccaaaattggcctgggacaacacaagagattggcacacccagcagtgagaaatcaggaaaggatcgttgcttcccaaccgaaagaaacatcaaatagaggtgctcacaaaaggtgctggacaaaggaggaggaagaattactaataagactggaggctcagttcgagggaaacaaaaatattaataagcttattgcagaacacataaccaccaaaacagctaagcagatcagtgacaaaaggcgattgctgtccagaaagccagcagaggagccacgtgaggagcctggaacgtgtcatcacaccaggagagcagctgcgagcctgagaacggagcctgagatgagtcatcacgcccaggcagaggacagagataatggacctgggagacgccctctgccaggcagggcagctgccggagggagaacaatggacgagataagacgccaccctgataagggcaacggacagcagagacccaccaagcaaaaatcagaagaacagctgcaggcttactataaaaagacactagaggaacgactttcagctggggcacttaacaccttcccccgagcattcaagcaggtaatggaaggccgggatataaagctagtaatcaatcagacagcgcaggactgcttcggatgcctggaatccataagccaaataagaacggcaacccgagataaaaaggacacggtgacccgggagaaacacccaaagaaaccttttcagaagtggatgaagaagagagcaatcaaaaaaggtaattatcttcggttccagcgtttattttatcttgatagagggaaactggctaaaatcattttagatgatattgaatgcttgtcttgtgacataccactcagtgaaatttattcggtttttaaaacaagatgggaaacaactggtagctttaaaagccttggggactttaaaacttacgggaaggctgacaacactgccttcagagaattaattacggctaaagaaattgagaaaaatgtgcaggaaatgagcaaaggctcggctcccggtccagacgggattactcttggggacgtcgtaaagatggatcccgagttttcccggaccatggagattttcaatttatggttaacaactggtaaaatcccggacatggtgagggggtgcagaaccgttttgattccaaaatcatcaaagccggatcgtttgaaagacattaataactggagacctatcacgatcggttccatcttgctgagactgttctccaggattgtaacagctaggctgagcaaagcgtgccccctgaacccaaggcaaagaggctttatcagagcggcgggatgctctgaaaacttaaaactcctgcaaactataatttggtcggccaaaagagaacacagaccactgggtgttgtattcgtggacatcgccaaggcttttgacaccgtaagccaccagcacatcattcatgctttgcagcaaagagaggtggatccccacatcgtcggtctggtgagcaatatgtacgagaacatcagtacgtatatcaccacaaagaggaacacacacacagacaaaatccagatccgggttggagtaaagcagggtgacccgatgtcgccccttttatttaacctggcaatggaccctctattatgcaagctggaagagagtggcaaaggataccaccgaggacagagcagcatcacagcgatggcatttgcagacgatctggttttgctgagcgactcctgggaaaatatgaatacaaatattagcatactggagaccttctgcaatctgaccggactcaaaacacaggggcaaaagtgccacggcttttacatcaagccgacaaagaagtcttacaccatcaatgactgcgctgcctggactatcaacggcacacccctgaacatgatcgaccccggcgaatctgagaaatacctcggcctgcagtttgacccgtggattggaatagcaaggtccggtctctccacaaaactagatttttggcttcagcggatcgatcaagcaccacttaaacctctgcagaaaactgatattctcaaaacatacaccatccctcggctgatctacatagctgaccactcagaagtgaaaagcgcactactcgaaacccttgaccagaagatccggacagcggtcaaggaatggcttcacctacctccgtgcacctgcgatgccatcctgtactcgagcacgagagacggcggtttgggcatcaccaaattggcaggactgatccccagcgtgcaggcccgtagactgcatcggatcgcacagtcatctgacgatacgatgaaatgcttcatggaaaaagagaaaatggaacagctgcataagaaattgtggattcaagctggaggggacagagagaacataccctcgatttgggaagcaccaccgtcgagtgaaccaccaaacaacgtgagcacaaattcggaatgggaagcaccgacccagaaaagaaaatttccaaagccttgcaattggaggaaaaacgaattcaaaaaatggaccaaattggcatcccaaggccgcggaattgtaaattttgaaagagacaaaattagtaaccattggatccaatactacagacgcatacctcacaggaaactcctcactgcactacaactcagggccaacgtttaccccacgagagaatttctagccaggggtagacaagaccaatacatcaaggcgtgtaggcactgcgatgcggacaacgaatcctgcgcccacatcatcggcaactgcccagtgacacaggacgcccgaatcaagaggcacaattacatctgcgaactgcttctcgaggaggcgaagaagaaggactgggtagtgttcaaggaaccgcacataagggattccaacaaggaactgtacaaacctgacctgatatttgtgaaggatgggcgtgcacttgtcgtggatgtgacagtacggtatgaagcagccaaatcatcgctggaggaagccgctgcagagaaagtgagaaagtacaaacacctggaaacggaagtaagacatctcacgaatgcaaaggacgttacttttgtgggctttcccctaggagcgcgggggaaatggcaccaagataactttaaacttttgactgagcttggcctctccaaatcgaggcaagtgaaaatggcagagactttttccacagtagcgctcttttcatctgtggacattgtacatatgtttgccagtagggccagaaaatctatggttatgtgataataggctgccttctgcggggcttgccttctggccatgcccttcttctctcccttgcacctgtacctcttggtctttgaataaagcctgagtaggaaggaccggtaaaaaaaaaaaaaaaaaaaaaaaaaaaaaaacgttgactaaaaaaaaaaaaaaaaaaaaaaaaaaaaaaaaaaaaaaaaaaaaaaaaaaaaaaaaaaaaaaaaaaaaaa

SEQ ID NO: 10841 - DNA, 5264 bp, synthetic construct
  source 1..5264: mol_type = other DNA
gaaataagagagaaaagaagagtaagaagaaatataagagaattcgccaccatggcccctaagaaaaagcggaaggtgaatatcagcggctctagctgcggcagccccaacagcgccgacaccagcagcgacttcaaggacctgtggaccaagctgaaggaatgccacgaccgggaagtgcagggactccaggtgaaggtcaccaaactcaagcaagaaagaatcctggacgcccagagactggaagaattcttcaccaagaaccagcagctgagagagcagcagaaagtgctgcacgagacaatcaaggttctggaagatagactgcgggccggcctgtgcgacagatgcgccgtgaccgaggaacacatgcgcaaaaagcagcaggagttcgagaacattagacagcaaaatctgaaattgatcacagagctgatgaacgagagaaacacactgcaggaggagaacaagaagctgagcgagcagctgcaacagaagatcgagaatgatcagcaacaccaggccgctgagctggaatgtgaagaggacgtgatccccgacagcccaatcacagctttcagcttttctggcgtgaacagactgaggcggaaggaaaacccccacgtgcggtacatcgagcagacccataccaagctggaacacagcgtgtgtgccaacgagatgagaaaggtgtccaagtcctccacccatccccagcacaaccctaacgaaaatgagatcctggtggctgatacctacgaccagtctcagagccctatggccaaggcccacggcaccagctcttatacccctgataagagctccttcaacctggccaccgtggtggccgagacactgggcctgggcgtgcaggaggaaagcgagacacagggcccaatgagccctctgggagatgagctgtaccactgcctggaaggcaaccacaagaaacagccttttgagtccggctccgagactcctggaacaagcgagagcgctacacctgagggcagccctaagagaaaggtgtccagcgccgagggcgctgccaaggaagagcctaaacggagaagcgccagactgagcgccaagccccccgccaaggtggaagccaagcctaagaaggccgccgctaaggacaagagcagcgataagaaagtccagaccaagggcaagcggggcgccaaaggcaaacaggccgaggtggccaaccaggagacaaaggaagatctgcctgctgagaacggcgaaaccaagaccgaggaatctccagcttctgacgaggccggagagaaggaggccaaaagcgacagcggctctgagacacctggaacaagcgagagcgccaccccggaatcctatgaacaacttgcaccacaaccgtgtgtgggagaaactttacattctagcctcccacgagacagtgaactgtttgtgcctgaagaggggagcagcgagaaggagagcgaggacgcgccaaaaacatctcctccgacgcctgggaaacatggtttggaacagactggggaggaaaaagtgatggtgactgttcctgacaaaaatccaccttgtccttgctgtggtacccgggtaaactctgtgttgaatctgattgaacatctgaaagtgtcacacgggaaaaggggggtttgttttcggtgtgcaaaatgtggaaaggaaaatagtaactatcacagtgttgtttgtcattttaagaaatgcaggggtccagagacggagaaagccccagctggggagtggatttgtgaggtatgcaacagagattttacaaccaaaattggcctgggacaacacaagagattggcacacccagcagtgagaaatcaggaaaggatcgttgcttcccaaccgaaagaaacatcaaatagaggtgctcacaaaaggtgctggacaaaggaggaggaagaattactaataagactggaggctcagttcgagggaaacaaaaatattaataagcttattgcagaacacataaccaccaaaacagctaagcagatcagtgacaaaaggcgattgctgtccagaaagccagcagaggagccacgtgaggagcctggaacgtgtcatcacaccaggagagcagctgcgagcctgagaacggagcctgagatgagtcatcacgcccaggcagaggacagagataatggacctgggagacgccctctgccaggcagggcagctgccggagggagaacaatggacgagataagacgccaccctgataagggcaacggacagcagagacccaccaagcaaaaatcagaagaacagctgcaggcttactataaaaagacactagaggaacgactttcagctggggcacttaacaccttcccccgagcattcaagcaggtaatggaaggccgggatataaagctagtaatcaatcagacagcgcaggactgcttcggatgcctggaatccataagccaaataagaacggcaacccgagataaaaaggacacggtgacccgggagaaacacccaaagaaaccttttcagaagtggatgaagaagagagcaatcaaaaaaggtaattatcttcggttccagcgtttattttatcttgatagagggaaactggctaaaatcattttaagagatattgaatgcttgtcttgtgacataccactcagtgaaatttattcggtttttaaaacaagatgggaaacaactggtagctttaaaagccttggggactttaaaacttacgggaaggctgacaacactgccttcagagaattaattacggctaaagaaattgagaaaaatgtgcaggaaatgagcaaaggctcggctcccggtccagacgggattactcttggggacgtcgtaaagatggatcccgagttttcccggaccatggagattttcaatttatggttaacaactggtaaaatcccggacatggtgagggggtgcagaaccgttttgattccaaaatcatcaaagccggatcgtttgaaagacattaataactggagacctatcacgatcggttccatcttgctgagactgttctccaggattgtaacagctaggctgagcaaagcgtgccccctgaacccaaggcaaagaggctttatcagagcggcgggatgctctgaaaacttaaaactcctgcaaactataatttggtcggccaaaagagaacacagaccactgggtgttgtattcgtggacatcgccaaggcttttgacaccgtaagccaccagcacatcattcatgctttgcagcaaagagaggtggatccccacatcgtcggtctggtgagcaatatgtacgagaacatcagtacgtatatcaccacaaagaggaacacacacacagacaaaatccagatccgggttggagtaaagcagggtgacccgatgtcgccccttttatttaacctggcaatggaccctctattatgcaagctggaagagagtggcaaaggataccaccgaggacagagcagcatcacagcgatggcatttgcagacgatctggttttgctgagcgactcctgggaaaatatgaatacaaatattagcatactggagaccttctgcaatctgaccggactcaaaacacaggggcaaaagtgccacggcttttacatcaagccgacaaagaagtcttacaccatcaatgactgcgctgcctggactatcaacggcacacccctgaacatgatcgaccccggcgaatctgagaaatacctcggcctgcagtttgacccgtggattggaatagcaaggtccggtctctccacaaaactagatttttggcttcagcggatcgatcaagcaccacttaaacctctgcagaaaactgatattctcaaaacatacaccatccctcggctgatctacatagctgaccactcagaagtgaaaagcgcactactcgaaacccttgaccagaagatccggacagcggtcaaggaatggcttcacctacctccgtgcacctgcgatgccatcctgtactcgagcacgagagacggcggtttgggcatcaccaaattggcaggactgatccccagcgtgcaggcccgtagactgcatcggatcgcacagtcatctgacgatacgatgaaatgcttcatggaaaaagagaaaatggaacagctgcataagaaattgtggattcaagctggaggggacagagagaacataccctcgatttgggaagcaccaccgtcgagtgaaccaccaaacaacgtgagcacaaattcggaatgggaagcaccgacccagaaagataaatttccaaagccttgcaattggaggaaaaacgaattcaaaaaatggaccaaattggcatcccaaggccgcggaattgtaaattttgaaagagacaaaattagtaaccattggatccaatactacagacgcatacctcacaggaaactcctcactgcactacaactcagggccaacgtttaccccacgagagaatttctagccaggggtagacaagaccaatacatcaaggcgtgtaggcactgcgatgcggacaacgaatcctgcgcccacatcatcggcaactgcccagtgacacaggacgcccgaatcaagaggcacaattacatctgcgaactgcttctcgaggaggcgaagaagaaggactgggtagtgttcaaggaaccgcacataagggattccaacaaggaactgtacaaacctgacctgatatttgtgaaggatgggcgtgcacttgtcgtggatgtgacagtacggtatgaagcagccaaatcatcgctggaggaagccgctgcagagaaagtgagaaagtacaaacacctggaaacggaagtaagacatctcacgaatgcaaaggacgttacttttgtgggctttcccctaggagcgcgggggaaatggcaccaagataactttaaacttttgactgagcttggcctctccaaatcgaggcaagtgaaaatggcagagactttttccacagtagcgctcttttcatctgtggacattgtacatatgtttgccagtagggccagaaaatctatggttatgtgataataggctgccttctgcggggcttgccttctggccatgcccttcttctctcccttgcacctgtacctcttggtctttgaataaagcctgagtaggaaggaccggtaaaaaaaaaaaaaaaaaaaaaaaaaaaaaaacgttgactaaaaaaaaaaaaaaaaaaaaaaaaaaaaaaaaaaaaaaaaaaaaaaaaaaaaaaaaaaaaaaaaaaaaaa

SEQ ID NO: 10842 - DNA, 5264 bp, synthetic construct
  source 1..5264: mol_type = other DNA
gaaataagagagaaaagaagagtaagaagaaatataagagaattcgccaccatggcccctaagaaaaagcggaaggtgaatatcagcggctctagctgcggcagccccaacagcgccgacaccagcagcgacttcaaggacctgtggaccaagctgaaggaatgccacgaccgggaagtgcagggactccaggtgaaggtcaccaaactcaagcaagaaagaatcctggacgcccagagactggaagaattcttcaccaagaaccagcagctgagagagcagcagaaagtgctgcacgagacaatcaaggttctggaagatagactgcgggccggcctgtgcgacagatgcgccgtgaccgaggaacacatgcgcaaaaagcagcaggagttcgagaacattagacagcaaaatctgaaattgatcacagagctgatgaacgagagaaacacactgcaggaggagaacaagaagctgagcgagcagctgcaacagaagatcgagaatgatcagcaacaccaggccgctgagctggaatgtgaagaggacgtgatccccgacagcccaatcacagctttcagcttttctggcgtgaacagactgaggcggaaggaaaacccccacgtgcggtacatcgagcagacccataccaagctggaacacagcgtgtgtgccaacgagatgagaaaggtgtccaagtcctccacccatccccagcacaaccctaacgaaaatgagatcctggtggctgatacctacgaccagtctcagagccctatggccaaggcccacggcaccagctcttatacccctgataagagctccttcaacctggccaccgtggtggccgagacactgggcctgggcgtgcaggaggaaagcgagacacagggcccaatgagccctctgggagatgagctgtaccactgcctggaaggcaaccacaagaaacagccttttgagtccggctccgagactcctggaacaagcgagagcgctacacctgagggcagccctaagagaaaggtgtccagcgccgagggcgctgccaaggaagagcctaaacggagaagcgccagactgagcgccaagccccccgccaaggtggaagccaagcctaagaaggccgccgctaaggacaagagcagcgataagaaagtccagaccaagggcaagcggggcgccaaaggcaaacaggccgaggtggccaaccaggagacaaaggaagatctgcctgctgagaacggcgaaaccaagaccgaggaatctccagcttctgacgaggccggagagaaggaggccaaaagcgacagcggctctgagacacctggaacaagcgagagcgccaccccggaatcctatgaacaacttgcaccacaaccgtgtgtgggagaaactttacattctagcctcccacgagacagtgaactgtttgtgcctgaagaggggagcagcgagaaggagagcgaggacgcgccaaaaacatctcctccgacgcctgggaaacatggtttggaacagactggggaggaaaaagtgatggtgactgttcctgacaaaaatccaccttgtccttgctgtggtacccgggtaaactctgtgttgaatctgattgaacatctgaaagtgtcacacgggaaaaggggggtttgttttcggtgtgcaaaatgtggaaaggaaaatagtaactatcacagtgttgtttgtcattttaagaaatgcaggggtccagagacggagaaagccccagctggggagtggatttgtgaggtatgcaacagagattttacaaccaaaattggcctgggacaacacaagagattggcacacccagcagtgagaaatcaggaaaggatcgttgcttcccaaccgaaagaaacatcaaatagaggtgctcacaaaaggtgctggacaaaggaggaggaagaattactaataagactggaggctcagttcgagggaaacaaaaatattaataagcttattgcagaacacataaccaccaaaacagctaagcagatcagtgacaaaaggcgattgctgtccagaaagccagcagaggagccacgtgaggagcctggaacgtgtcatcacaccaggagagcagctgcgagcctgagaacggagcctgagatgagtcatcacgcccaggcagaggacagagataatggacctgggagacgccctctgccaggcagggcagctgccggagggagaacaatggacgagataagacgccaccctgataagggcaacggacagcagagacccaccaagcaaaaatcagaagaacagctgcaggcttactataaaaagacactagaggaacgactttcagctggggcacttaacaccttcccccgagcattcaagcaggtaatggaaggccgggatataaagctagtaatcaatcagacagcgcaggactgcttcggatgcctggaatccataagccaaataagaacggcaacccgagataaaaaggacacggtgacccgggagaaacacccaaagaaaccttttcagaagtggatgaagaagagagcaatcaaaaaaggtaattatcttcggttccagcgtttattttatcttgatagagggaaactggctaaaatcattttagatgatattgaatgcttgtcttgtgacataccactcagtgaaatttattcggtttttaaaacaagatgggaaacaactggtagctttaaaagccttggggactttaaaacttacgggaaggctgacaacactgccttcagagaattaattacggctaaagaaattgagaaaaatgtgcaggaaagaagcaaaggctcggctcccggtccagacgggattactcttggggacgtcgtaaagatggatcccgagttttcccggaccatggagattttcaatttatggttaacaactggtaaaatcccggacatggtgagggggtgcagaaccgttttgattccaaaatcatcaaagccggatcgtttgaaagacattaataactggagacctatcacgatcggttccatcttgctgagactgttctccaggattgtaacagctaggctgagcaaagcgtgccccctgaacccaaggcaaagaggctttatcagagcggcgggatgctctgaaaacttaaaactcctgcaaactataatttggtcggccaaaagagaacacagaccactgggtgttgtattcgtggacatcgccaaggcttttgacaccgtaagccaccagcacatcattcatgctttgcagcaaagagaggtggatccccacatcgtcggtctggtgagcaatatgtacgagaacatcagtacgtatatcaccacaaagaggaacacacacacagacaaaatccagatccgggttggagtaaagcagggtgacccgatgtcgccccttttatttaacctggcaatggaccctctattatgcaagctggaagagagtggcaaaggataccaccgaggacagagcagcatcacagcgatggcatttgcagacgatctggttttgctgagcgactcctgggaaaatatgaatacaaatattagcatactggagaccttctgcaatctgaccggactcaaaacacaggggcaaaagtgccacggcttttacatcaagccgacaaagaagtcttacaccatcaatgactgcgctgcctggactatcaacggcacacccctgaacatgatcgaccccggcgaatctgagaaatacctcggcctgcagtttgacccgtggattggaatagcaaggtccggtctctccacaaaactagatttttggcttcagcggatcgatcaagcaccacttaaacctctgcagaaaactgatattctcaaaacatacaccatccctcggctgatctacatagctgaccactcagaagtgaaaagcgcactactcgaaacccttgaccagaagatccggacagcggtcaaggaatggcttcacctacctccgtgcacctgcgatgccatcctgtactcgagcacgagagacggcggtttgggcatcaccaaattggcaggactgatccccagcgtgcaggcccgtagactgcatcggatcgcacagtcatctgacgatacgatgaaatgcttcatggaaaaagagaaaatggaacagctgcataagaaattgtggattcaagctggaggggacagagagaacataccctcgatttgggaagcaccaccgtcgagtgaaccaccaaacaacgtgagcacaaattcggaatgggaagcaccgacccagaaagataaatttccaaagccttgcaattggaggaaaaacgaattcaaaaaatggaccaaattggcatcccaaggccgcggaattgtaaattttgaaagagacaaaattagtaaccattggatccaatactacagacgcatacctcacaggaaactcctcactgcactacaactcagggccaacgtttaccccacgagagaatttctagccaggggtagacaagaccaatacatcaaggcgtgtaggcactgcgatgcggacaacgaatcctgcgcccacatcatcggcaactgcccagtgacacaggacgcccgaatcaagaggcacaattacatctgcgaactgcttctcgaggaggcgaagaagaaggactgggtagtgttcaaggaaccgcacataagggattccaacaaggaactgtacaaacctgacctgatatttgtgaaggatgggcgtgcacttgtcgtggatgtgacagtacggtatgaagcagccaaatcatcgctggaggaagccgctgcagagaaagtgagaaagtacaaacacctggaaacggaagtaagacatctcacgaatgcaaaggacgttacttttgtgggctttcccctaggagcgcgggggaaatggcaccaagataactttaaacttttgactgagcttggcctctccaaatcgaggcaagtgaaaatggcagagactttttccacagtagcgctcttttcatctgtggacattgtacatatgtttgccagtagggccagaaaatctatggttatgtgataataggctgccttctgcggggcttgccttctggccatgcccttcttctctcccttgcacctgtacctcttggtctttgaataaagcctgagtaggaaggaccggtaaaaaaaaaaaaaaaaaaaaaaaaaaaaaaacgttgactaaaaaaaaaaaaaaaaaaaaaaaaaaaaaaaaaaaaaaaaaaaaaaaaaaaaaaaaaaaaaaaaaaaaaa

SEQ ID NO: 10843 - DNA, 5264 bp, synthetic construct
  source 1..5264: mol_type = other DNA
gaaataagagagaaaagaagagtaagaagaaatataagagaattcgccaccatggcccctaagaaaaagcggaaggtgaatatcagcggctctagctgcggcagccccaacagcgccgacaccagcagcgacttcaaggacctgtggaccaagctgaaggaatgccacgaccgggaagtgcagggactccaggtgaaggtcaccaaactcaagcaagaaagaatcctggacgcccagagactggaagaattcttcaccaagaaccagcagctgagagagcagcagaaagtgctgcacgagacaatcaaggttctggaagatagactgcgggccggcctgtgcgacagatgcgccgtgaccgaggaacacatgcgcaaaaagcagcaggagttcgagaacattagacagcaaaatctgaaattgatcacagagctgatgaacgagagaaacacactgcaggaggagaacaagaagctgagcgagcagctgcaacagaagatcgagaatgatcagcaacaccaggccgctgagctggaatgtgaagaggacgtgatccccgacagcccaatcacagctttcagcttttctggcgtgaacagactgaggcggaaggaaaacccccacgtgcggtacatcgagcagacccataccaagctggaacacagcgtgtgtgccaacgagatgagaaaggtgtccaagtcctccacccatccccagcacaaccctaacgaaaatgagatcctggtggctgatacctacgaccagtctcagagccctatggccaaggcccacggcaccagctcttatacccctgataagagctccttcaacctggccaccgtggtggccgagacactgggcctgggcgtgcaggaggaaagcgagacacagggcccaatgagccctctgggagatgagctgtaccactgcctggaaggcaaccacaagaaacagccttttgagtccggctccgagactcctggaacaagcgagagcgctacacctgagggcagccctaagagaaaggtgtccagcgccgagggcgctgccaaggaagagcctaaacggagaagcgccagactgagcgccaagccccccgccaaggtggaagccaagcctaagaaggccgccgctaaggacaagagcagcgataagaaagtccagaccaagggcaagcggggcgccaaaggcaaacaggccgaggtggccaaccaggagacaaaggaagatctgcctgctgagaacggcgaaaccaagaccgaggaatctccagcttctgacgaggccggagagaaggaggccaaaagcgacagcggctctgagacacctggaacaagcgagagcgccaccccggaatcctatgaacaacttgcaccacaaccgtgtgtgggagaaactttacattctagcctcccacgagacagtgaactgtttgtgcctgaagaggggagcagcgagaaggagagcgaggacgcgccaaaaacatctcctccgacgcctgggaaacatggtttggaacagactggggaggaaaaagtgatggtgactgttcctgacaaaaatccaccttgtccttgctgtggtacccgggtaaactctgtgttgaatctgattgaacatctgaaagtgtcacacgggaaaaggggggtttgttttcggtgtgcaaaatgtggaaaggaaaatagtaactatcacagtgttgtttgtcattttaagaaatgcaggggtccagagacggagaaagccccagctggggagtggatttgtgaggtatgcaacagagattttacaaccaaaattggcctgggacaacacaagagattggcacacccagcagtgagaaatcaggaaaggatcgttgcttcccaaccgaaagaaacatcaaatagaggtgctcacaaaaggtgctggacaaaggaggaggaagaattactaataagactggaggctcagttcgagggaaacaaaaatattaataagcttattgcagaacacataaccaccaaaacagctaagcagatcagtgacaaaaggcgattgctgtccagaaagccagcagaggagccacgtgaggagcctggaacgtgtcatcacaccaggagagcagctgcgagcctgagaacggagcctgagatgagtcatcacgcccaggcagaggacagagataatggacctgggagacgccctctgccaggcagggcagctgccggagggagaacaatggacgagataagacgccaccctgataagggcaacggacagcagagacccaccaagcaaaaatcagaagaacagctgcaggcttactataaaaagacactagaggaacgactttcagctggggcacttaacaccttcccccgagcattcaagcaggtaatggaaggccgggatataaagctagtaatcaatcagacagcgcaggactgcttcggatgcctggaatccataagccaaataagaacggcaacccgagataaaaaggacacggtgacccgggagaaacacccaaagaaaccttttcagaagtggatgaagaagagagcaatcaaaaaaggtaattatcttcggttccagcgtttattttatcttgatagagggaaactggctaaaatcattttagatgatattgaatgcttgtcttgtgacataccactcagtgaaatttattcggtttttaaaacaagatgggaaacaactggtagctttaaaagccttggggactttaaaacttacgggaaggctgacaacactgccttcagagaattaattacggctaaagaaattgagaaaaatgtgcaggaaatgagcaaaggctcgagacccggtccagacgggattactcttggggacgtcgtaaagatggatcccgagttttcccggaccatggagattttcaatttatggttaacaactggtaaaatcccggacatggtgagggggtgcagaaccgttttgattccaaaatcatcaaagccggatcgtttgaaagacattaataactggagacctatcacgatcggttccatcttgctgagactgttctccaggattgtaacagctaggctgagcaaagcgtgccccctgaacccaaggcaaagaggctttatcagagcggcgggatgctctgaaaacttaaaactcctgcaaactataatttggtcggccaaaagagaacacagaccactgggtgttgtattcgtggacatcgccaaggcttttgacaccgtaagccaccagcacatcattcatgctttgcagcaaagagaggtggatccccacatcgtcggtctggtgagcaatatgtacgagaacatcagtacgtatatcaccacaaagaggaacacacacacagacaaaatccagatccgggttggagtaaagcagggtgacccgatgtcgccccttttatttaacctggcaatggaccctctattatgcaagctggaagagagtggcaaaggataccaccgaggacagagcagcatcacagcgatggcatttgcagacgatctggttttgctgagcgactcctgggaaaatatgaatacaaatattagcatactggagaccttctgcaatctgaccggactcaaaacacaggggcaaaagtgccacggcttttacatcaagccgacaaagaagtcttacaccatcaatgactgcgctgcctggactatcaacggcacacccctgaacatgatcgaccccggcgaatctgagaaatacctcggcctgcagtttgacccgtggattggaatagcaaggtccggtctctccacaaaactagatttttggcttcagcggatcgatcaagcaccacttaaacctctgcagaaaactgatattctcaaaacatacaccatccctcggctgatctacatagctgaccactcagaagtgaaaagcgcactactcgaaacccttgaccagaagatccggacagcggtcaaggaatggcttcacctacctccgtgcacctgcgatgccatcctgtactcgagcacgagagacggcggtttgggcatcaccaaattggcaggactgatccccagcgtgcaggcccgtagactgcatcggatcgcacagtcatctgacgatacgatgaaatgcttcatggaaaaagagaaaatggaacagctgcataagaaattgtggattcaagctggaggggacagagagaacataccctcgatttgggaagcaccaccgtcgagtgaaccaccaaacaacgtgagcacaaattcggaatgggaagcaccgacccagaaagataaatttccaaagccttgcaattggaggaaaaacgaattcaaaaaatggaccaaattggcatcccaaggccgcggaattgtaaattttgaaagagacaaaattagtaaccattggatccaatactacagacgcatacctcacaggaaactcctcactgcactacaactcagggccaacgtttaccccacgagagaatttctagccaggggtagacaagaccaatacatcaaggcgtgtaggcactgcgatgcggacaacgaatcctgcgcccacatcatcggcaactgcccagtgacacaggacgcccgaatcaagaggcacaattacatctgcgaactgcttctcgaggaggcgaagaagaaggactgggtagtgttcaaggaaccgcacataagggattccaacaaggaactgtacaaacctgacctgatatttgtgaaggatgggcgtgcacttgtcgtggatgtgacagtacggtatgaagcagccaaatcatcgctggaggaagccgctgcagagaaagtgagaaagtacaaacacctggaaacggaagtaagacatctcacgaatgcaaaggacgttacttttgtgggctttcccctaggagcgcgggggaaatggcaccaagataactttaaacttttgactgagcttggcctctccaaatcgaggcaagtgaaaatggcagagactttttccacagtagcgctcttttcatctgtggacattgtacatatgtttgccagtagggccagaaaatctatggttatgtgataataggctgccttctgcggggcttgccttctggccatgcccttcttctctcccttgcacctgtacctcttggtctttgaataaagcctgagtaggaaggaccggtaaaaaaaaaaaaaaaaaaaaaaaaaaaaaaacgttgactaaaaaaaaaaaaaaaaaaaaaaaaaaaaaaaaaaaaaaaaaaaaaaaaaaaaaaaaaaaaaaaaaaaaaa

SEQ ID NO: 10844 - DNA, 5264 bp, synthetic construct
  source 1..5264: mol_type = other DNA
gaaataagagagaaaagaagagtaagaagaaatataagagaattcgccaccatggcccctaagaaaaagcggaaggtgaatatcagcggctctagctgcggcagccccaacagcgccgacaccagcagcgacttcaaggacctgtggaccaagctgaaggaatgccacgaccgggaagtgcagggactccaggtgaaggtcaccaaactcaagcaagaaagaatcctggacgcccagagactggaagaattcttcaccaagaaccagcagctgagagagcagcagaaagtgctgcacgagacaatcaaggttctggaagatagactgcgggccggcctgtgcgacagatgcgccgtgaccgaggaacacatgcgcaaaaagcagcaggagttcgagaacattagacagcaaaatctgaaattgatcacagagctgatgaacgagagaaacacactgcaggaggagaacaagaagctgagcgagcagctgcaacagaagatcgagaatgatcagcaacaccaggccgctgagctggaatgtgaagaggacgtgatccccgacagcccaatcacagctttcagcttttctggcgtgaacagactgaggcggaaggaaaacccccacgtgcggtacatcgagcagacccataccaagctggaacacagcgtgtgtgccaacgagatgagaaaggtgtccaagtcctccacccatccccagcacaaccctaacgaaaatgagatcctggtggctgatacctacgaccagtctcagagccctatggccaaggcccacggcaccagctcttatacccctgataagagctccttcaacctggccaccgtggtggccgagacactgggcctgggcgtgcaggaggaaagcgagacacagggcccaatgagccctctgggagatgagctgtaccactgcctggaaggcaaccacaagaaacagccttttgagtccggctccgagactcctggaacaagcgagagcgctacacctgagggcagccctaagagaaaggtgtccagcgccgagggcgctgccaaggaagagcctaaacggagaagcgccagactgagcgccaagccccccgccaaggtggaagccaagcctaagaaggccgccgctaaggacaagagcagcgataagaaagtccagaccaagggcaagcggggcgccaaaggcaaacaggccgaggtggccaaccaggagacaaaggaagatctgcctgctgagaacggcgaaaccaagaccgaggaatctccagcttctgacgaggccggagagaaggaggccaaaagcgacagcggctctgagacacctggaacaagcgagagcgccaccccggaatcctatgaacaacttgcaccacaaccgtgtgtgggagaaactttacattctagcctcccacgagacagtgaactgtttgtgcctgaagaggggagcagcgagaaggagagcgaggacgcgccaaaaacatctcctccgacgcctgggaaacatggtttggaacagactggggaggaaaaagtgatggtgactgttcctgacaaaaatccaccttgtccttgctgtggtacccgggtaaactctgtgttgaatctgattgaacatctgaaagtgtcacacgggaaaaggggggtttgttttcggtgtgcaaaatgtggaaaggaaaatagtaactatcacagtgttgtttgtcattttaagaaatgcaggggtccagagacggagaaagccccagctggggagtggatttgtgaggtatgcaacagagattttacaaccaaaattggcctgggacaacacaagagattggcacacccagcagtgagaaatcaggaaaggatcgttgcttcccaaccgaaagaaacatcaaatagaggtgctcacaaaaggtgctggacaaaggaggaggaagaattactaataagactggaggctcagttcgagggaaacaaaaatattaataagcttattgcagaacacataaccaccaaaacagctaagcagatcagtgacaaaaggcgattgctgtccagaaagccagcagaggagccacgtgaggagcctggaacgtgtcatcacaccaggagagcagctgcgagcctgagaacggagcctgagatgagtcatcacgcccaggcagaggacagagataatggacctgggagacgccctctgccaggcagggcagctgccggagggagaacaatggacgagataagacgccaccctgataagggcaacggacagcagagacccaccaagcaaaaatcagaagaacagctgcaggcttactataaaaagacactagaggaacgactttcagctggggcacttaacaccttcccccgagcattcaagcaggtaatggaaggccgggatataaagctagtaatcaatcagacagcgcaggactgcttcggatgcctggaatccataagccaaataagaacggcaacccgagataaaaaggacacggtgacccgggagaaacacccaaagaaaccttttcagaagtggatgaagaagagagcaatcaaaaaaggtaattatcttcggttccagcgtttattttatcttgatagagggaaactggctaaaatcattttagatgatattgaatgcttgtcttgtgacataccactcagtgaaatttattcggtttttaaaacaagatgggaaacaactggtagctttaaaagccttggggactttaaaacttacgggaaggctgacaacactgccttcagagaattaattacggctaaagaaattgagaaaaatgtgcaggaaatgagcaaaggctcggctcccggtccagacgggattactcttggggacgtcgtaaagatggatcccgagttttcccggaccatggagattttcaatttatggttaacaactggtaaaatcccggacatggtgagggggtgcagaaccgttttgattccaaaatcatcaaagccggatcgtttgaaagacattaataactggagacctatcacgatcggttccatcttgctgagactgttctccaggattgtaacagctaggctgagcaaagcgtgccccctgaacccaaggcaaagaggctttatcagagcggcgggatgctctgaaaacttaaaactcctgcaaactataatttggtcggccaaaagagaacacagaccactgggtgttgtattcgtggacatcgccaaggcttttgacaccgtaagccaccagcacatcattcatgctttgcagcaaagagaggtggatccccacatcgtcggtctggtgagcaatatgtacgagaacatcagtacgtatatcaccacaaagaggaacacacacacagacaaaatccagatccgggttggagtaaagcagggtgacccgatgtcgccccttttatttaacctggcaatggaccctctattatgcaagctggaagagagtggcaaaggataccaccgaggacagagcagcatcacagcgatggcatttgcagacgatctggttttgctgagcgactcctgggaaaatatgaatacaaatattagcatactggagaccttctgcaatctgaccggactcaaaacacaggggcaaaagtgccacggcttttacatcaagccgacaaagaagtcttacaccatcaatgactgcgctgcctggactatcaacggcacacccctgaacatgatcgaccccggcgaatctgagaaatacctcggcctgcagtttgacccgtggattggaatagcaaggtccggtctctccacaaaactagatttttggcttcagcggatcgatcaagcaccacttaaacctctgcagaaaactgatattctcaaaacatacaccatccctcggctgatctacatagctgaccactcagaagtgaaaagcgcactactcgaaacccttgaccagaagatccggacagcggtcaaggaatggcttcacctacctccgtgcacctgcgatgccatcctgtactcgagcacgagagacggcggtttgggcatcaccaaattggcaggactgatccccagcgtgcaggcccgtagactgcatcggatcgcacagtcatctgacgatacgatgaaatgcttcatggaaaaagagaaaatggaacagctgcataagaaattgtggattcaagctggaggggacagagagaacataccctcgatttgggaagcaccaccgtcgagtgaaccaccaaacaacgtgagcacaaattcgagatgggaagcaccgacccagaaagataaatttccaaagccttgcaattggaggaaaaacgaattcaaaaaatggaccaaattggcatcccaaggccgcggaattgtaaattttgaaagagacaaaattagtaaccattggatccaatactacagacgcatacctcacaggaaactcctcactgcactacaactcagggccaacgtttaccccacgagagaatttctagccaggggtagacaagaccaatacatcaaggcgtgtaggcactgcgatgcggacaacgaatcctgcgcccacatcatcggcaactgcccagtgacacaggacgcccgaatcaagaggcacaattacatctgcgaactgcttctcgaggaggcgaagaagaaggactgggtagtgttcaaggaaccgcacataagggattccaacaaggaactgtacaaacctgacctgatatttgtgaaggatgggcgtgcacttgtcgtggatgtgacagtacggtatgaagcagccaaatcatcgctggaggaagccgctgcagagaaagtgagaaagtacaaacacctggaaacggaagtaagacatctcacgaatgcaaaggacgttacttttgtgggctttcccctaggagcgcgggggaaatggcaccaagataactttaaacttttgactgagcttggcctctccaaatcgaggcaagtgaaaatggcagagactttttccacagtagcgctcttttcatctgtggacattgtacatatgtttgccagtagggccagaaaatctatggttatgtgataataggctgccttctgcggggcttgccttctggccatgcccttcttctctcccttgcacctgtacctcttggtctttgaataaagcctgagtaggaaggaccggtaaaaaaaaaaaaaaaaaaaaaaaaaaaaaaacgttgactaaaaaaaaaaaaaaaaaaaaaaaaaaaaaaaaaaaaaaaaaaaaaaaaaaaaaaaaaaaaaaaaaaaaaa

SEQ ID NO: 10845 - DNA, 5264 bp, synthetic construct
  source 1..5264: mol_type = other DNA
gaaataagagagaaaagaagagtaagaagaaatataagagaattcgccaccatggcccctaagaaaaagcggaaggtgaatatcagcggctctagctgcggcagccccaacagcgccgacaccagcagcgacttcaaggacctgtggaccaagctgaaggaatgccacgaccgggaagtgcagggactccaggtgaaggtcaccaaactcaagcaagaaagaatcctggacgcccagagactggaagaattcttcaccaagaaccagcagctgagagagcagcagaaagtgctgcacgagacaatcaaggttctggaagatagactgcgggccggcctgtgcgacagatgcgccgtgaccgaggaacacatgcgcaaaaagcagcaggagttcgagaacattagacagcaaaatctgaaattgatcacagagctgatgaacgagagaaacacactgcaggaggagaacaagaagctgagcgagcagctgcaacagaagatcgagaatgatcagcaacaccaggccgctgagctggaatgtgaagaggacgtgatccccgacagcccaatcacagctttcagcttttctggcgtgaacagactgaggcggaaggaaaacccccacgtgcggtacatcgagcagacccataccaagctggaacacagcgtgtgtgccaacgagatgagaaaggtgtccaagtcctccacccatccccagcacaaccctaacgaaaatgagatcctggtggctgatacctacgaccagtctcagagccctatggccaaggcccacggcaccagctcttatacccctgataagagctccttcaacctggccaccgtggtggccgagacactgggcctgggcgtgcaggaggaaagcgagacacagggcccaatgagccctctgggagatgagctgtaccactgcctggaaggcaaccacaagaaacagccttttgagtccggctccgagactcctggaacaagcgagagcgctacacctgagggcagccctaagagaaaggtgtccagcgccgagggcgctgccaaggaagagcctaaacggagaagcgccagactgagcgccaagccccccgccaaggtggaagccaagcctaagaaggccgccgctaaggacaagagcagcgataagaaagtccagaccaagggcaagcggggcgccaaaggcaaacaggccgaggtggccaaccaggagacaaaggaagatctgcctgctgagaacggcgaaaccaagaccgaggaatctccagcttctgacgaggccggagagaaggaggccaaaagcgacagcggctctgagacacctggaacaagcgagagcgccaccccggaatcctatgaacaacttgcaccacaaccgtgtgtgggagaaactttacattctagcctcccacgagacagtgaactgtttgtgcctgaagaggggagcagcgagaaggagagcgaggacgcgccaaaaacatctcctccgacgcctgggaaacatggtttggaacagactggggaggaaaaagtgatggtgactgttcctgacaaaaatccaccttgtccttgctgtggtacccgggtaaactctgtgttgaatctgattgaacatctgaaagtgtcacacgggaaaaggggggtttgttttcggtgtgcaaaatgtggaaaggaaaatagtaactatcacagtgttgtttgtcattttaagaaatgcaggggtccagagacggagaaagccccagctggggagtggatttgtgaggtatgcaacagagattttacaaccaaaattggcctgggacaacacaagagattggcacacccagcagtgagaaatcaggaaaggatcgttgcttcccaaccgaaagaaacatcaaatagaggtgctcacaaaaggtgctggacaaaggaggaggaagaattactaataagactggaggctcagttcgagggaaacaaaaatattaataagcttattgcagaacacataaccaccaaaacagctaagcagatcagtgacaaaaggcgattgctgtccagaaagccagcagaggagccacgtgaggagcctggaacgtgtcatcacaccaggagagcagctgcgagcctgagaacggagcctgagatgagtcatcacgcccaggcagaggacagagataatggacctgggagacgccctctgccaggcagggcagctgccggagggagaacaatggacgagataagacgccaccctgataagggcaacggacagcagagacccaccaagcaaaaatcagaagaacagctgcaggcttactataaaaagacactagaggaacgactttcagctggggcacttaacaccttcccccgagcattcaagcaggtaatggaaggccgggatataaagctagtaatcaatcagacagcgcaggactgcttcggatgcctggaatccataagccaaataagaacggcaacccgagataaaaaggacacggtgacccgggagaaacacccaaagaaaccttttcagaagtggatgaagaagagagcaatcaaaaaaggtaattatcttcggttccagcgtttattttatcttgatagagggaaactggctaaaatcattttagatgatattgaatgcttgtcttgtgacataccactcagtgaaatttattcggtttttaaaacaagatgggaaacaactggtagctttaaaagccttggggactttaaaacttacgggaaggctgacaacactgccttcagagaattaattacggctaaagaaattgagaaaaatgtgcaggaaatgagcaaaggctcggctcccggtccagacgggattactcttggggacgtcgtaaagatggatcccgagttttcccggaccatggagattttcaatttatggttaacaactggtaaaatcccggacatggtgagggggtgcagaaccgttttgattccaaaatcatcaaagccggatcgtttgaaagacattaataactggagacctatcacgatcggttccatcttgctgagactgttctccaggattgtaacagctaggctgagcaaagcgtgccccctgaacccaaggcaaagaggctttatcagagcggcgggatgctctgaaaacttaaaactcctgcaaactataatttggtcggccaaaagagaacacagaccactgggtgttgtattcgtggacatcgccaaggcttttgacaccgtaagccaccagcacatcattcatgctttgcagcaaagagaggtggatccccacatcgtcggtctggtgagcaatatgtacgagaacatcagtacgtatatcaccacaaagaggaacacacacacagacaaaatccagatccgggttggagtaaagcagggtgacccgatgtcgagacttttatttaacctggcaatggaccctctattatgcaagctggaagagagtggcaaaggataccaccgaggacagagcagcatcacagcgatggcatttgcagacgatctggttttgctgagcgactcctgggaaaatatgaatacaaatattagcatactggagaccttctgcaatctgaccggactcaaaacacaggggcaaaagtgccacggcttttacatcaagccgacaaagaagtcttacaccatcaatgactgcgctgcctggactatcaacggcacacccctgaacatgatcgaccccggcgaatctgagaaatacctcggcctgcagtttgacccgtggattggaatagcaaggtccggtctctccacaaaactagatttttggcttcagcggatcgatcaagcaccacttaaacctctgcagaaaactgatattctcaaaacatacaccatccctcggctgatctacatagctgaccactcagaagtgaaaagcgcactactcgaaacccttgaccagaagatccggacagcggtcaaggaatggcttcacctacctccgtgcacctgcgatgccatcctgtactcgagcacgagagacggcggtttgggcatcaccaaattggcaggactgatccccagcgtgcaggcccgtagactgcatcggatcgcacagtcatctgacgatacgatgaaatgcttcatggaaaaagagaaaatggaacagctgcataagaaattgtggattcaagctggaggggacagagagaacataccctcgatttgggaagcaccaccgtcgagtgaaccaccaaacaacgtgagcacaaattcggaatgggaagcaccgacccagaaagataaatttccaaagccttgcaattggaggaaaaacgaattcaaaaaatggaccaaattggcatcccaaggccgcggaattgtaaattttgaaagagacaaaattagtaaccattggatccaatactacagacgcatacctcacaggaaactcctcactgcactacaactcagggccaacgtttaccccacgagagaatttctagccaggggtagacaagaccaatacatcaaggcgtgtaggcactgcgatgcggacaacgaatcctgcgcccacatcatcggcaactgcccagtgacacaggacgcccgaatcaagaggcacaattacatctgcgaactgcttctcgaggaggcgaagaagaaggactgggtagtgttcaaggaaccgcacataagggattccaacaaggaactgtacaaacctgacctgatatttgtgaaggatgggcgtgcacttgtcgtggatgtgacagtacggtatgaagcagccaaatcatcgctggaggaagccgctgcagagaaagtgagaaagtacaaacacctggaaacggaagtaagacatctcacgaatgcaaaggacgttacttttgtgggctttcccctaggagcgcgggggaaatggcaccaagataactttaaacttttgactgagcttggcctctccaaatcgaggcaagtgaaaatggcagagactttttccacagtagcgctcttttcatctgtggacattgtacatatgtttgccagtagggccagaaaatctatggttatgtgataataggctgccttctgcggggcttgccttctggccatgcccttcttctctcccttgcacctgtacctcttggtctttgaataaagcctgagtaggaaggaccggtaaaaaaaaaaaaaaaaaaaaaaaaaaaaaaacgttgactaaaaaaaaaaaaaaaaaaaaaaaaaaaaaaaaaaaaaaaaaaaaaaaaaaaaaaaaaaaaaaaaaaaaaa

SEQ ID NO: 10846 - DNA, 5264 bp, synthetic construct
  source 1..5264: mol_type = other DNA
gaaataagagagaaaagaagagtaagaagaaatataagagaattcgccaccatggcccctaagaaaaagcggaaggtgaatatcagcggctctagctgcggcagccccaacagcgccgacaccagcagcgacttcaaggacctgtggaccaagctgaaggaatgccacgaccgggaagtgcagggactccaggtgaaggtcaccaaactcaagcaagaaagaatcctggacgcccagagactggaagaattcttcaccaagaaccagcagctgagagagcagcagaaagtgctgcacgagacaatcaaggttctggaagatagactgcgggccggcctgtgcgacagatgcgccgtgaccgaggaacacatgcgcaaaaagcagcaggagttcgagaacattagacagcaaaatctgaaattgatcacagagctgatgaacgagagaaacacactgcaggaggagaacaagaagctgagcgagcagctgcaacagaagatcgagaatgatcagcaacaccaggccgctgagctggaatgtgaagaggacgtgatccccgacagcccaatcacagctttcagcttttctggcgtgaacagactgaggcggaaggaaaacccccacgtgcggtacatcgagcagacccataccaagctggaacacagcgtgtgtgccaacgagatgagaaaggtgtccaagtcctccacccatccccagcacaaccctaacgaaaatgagatcctggtggctgatacctacgaccagtctcagagccctatggccaaggcccacggcaccagctcttatacccctgataagagctccttcaacctggccaccgtggtggccgagacactgggcctgggcgtgcaggaggaaagcgagacacagggcccaatgagccctctgggagatgagctgtaccactgcctggaaggcaaccacaagaaacagccttttgagtccggctccgagactcctggaacaagcgagagcgctacacctgagggcagccctaagagaaaggtgtccagcgccgagggcgctgccaaggaagagcctaaacggagaagcgccagactgagcgccaagccccccgccaaggtggaagccaagcctaagaaggccgccgctaaggacaagagcagcgataagaaagtccagaccaagggcaagcggggcgccaaaggcaaacaggccgaggtggccaaccaggagacaaaggaagatctgcctgctgagaacggcgaaaccaagaccgaggaatctccagcttctgacgaggccggagagaaggaggccaaaagcgacagcggctctgagacacctggaacaagcgagagcgccaccccggaatcctatgaacaacttgcaccacaaccgtgtgtgggagaaactttacattctagcctcccacgagacagtgaactgtttgtgcctgaagaggggagcagcgagaaggagagcgaggacgcgccaaaaacatctcctccgacgcctgggaaacatggtttggaacagactggggaggaaaaagtgatggtgactgttcctgacaaaaatccaccttgtccttgctgtggtacccgggtaaactctgtgttgaatctgattgaacatctgaaagtgtcacacgggaaaaggggggtttgttttcggtgtgcaaaatgtggaaaggaaaatagtaactatcacagtgttgtttgtcattttaagaaatgcaggggtccagagacggagaaagccccagctggggagtggatttgtgaggtatgcaacagagattttacaaccaaaattggcctgggacaacacaagagattggcacacccagcagtgagaaatcaggaaaggatcgttgcttcccaaccgaaagaaacatcaaatagaggtgctcacaaaaggtgctggacaaaggaggaggaagaattactaataagactggaggctcagttcgagggaaacaaaaatattaataagcttattgcagaacacataaccaccaaaacagctaagcagatcagtgacaaaaggcgattgctgtccagaaagccagcagaggagccacgtgaggagcctggaacgtgtcatcacaccaggagagcagctgcgagcctgagaacggagcctgagatgagtcatcacgcccaggcagaggacagagataatggacctgggagacgccctctgccaggcagggcagctgccggagggagaacaatggacgagataagacgccaccctgataagggcaacggacagcagagacccaccaagcaaaaatcagaagaacagctgcaggcttactataaaaagacactagaggaacgactttcagctggggcacttaacaccttcccccgagcattcaagcaggtaatggaaggccgggatataaagctagtaatcaatcagacagcgcaggactgcttcggatgcctggaatccataagccaaataagaacggcaacccgagataaaaaggacacggtgacccgggagaaacacccaaagaaaccttttcagaagtggatgaagaagagagcaatcaaaaaaggtaattatcttcggttccagcgtttattttatcttgatagagggaaactggctaaaatcattttagatgatattgaatgcttgtcttgtgacataccactcagtgaaatttattcggtttttaaaacaagatgggaaacaactggtagctttaaaagccttggggactttaaaacttacgggaaggctgacaacactgccttcagagaattaattacggctaaagaaattgagaaaaatgtgcaggaaatgagcaaaggctcggctcccggtccagacgggattactcttggggacgtcgtaaagatggatcccgagttttcccggaccatggagattttcaatttatggttaacaactggtaaaatcccggacatggtgagggggtgcagaaccgttttgattccaaaatcatcaaagccggatcgtttgaaagacattaataactggagacctatcacgatcggttccatcttgctgagactgttctccaggattgtaacagctaggctgagcaaagcgtgccccctgaacccaaggcaaagaggctttatcagagcggcgggatgctctgaaaacttaaaactcctgcaaactataatttggtcggccaaaagagaacacagaccactgggtgttgtattcgtggacatcgccaaggcttttgacaccgtaagccaccagcacatcattcatgctttgcagcaaagagaggtggatccccacatcgtcggtctggtgagcaatatgtacgagaacatcagtacgtatatcaccacaaagaggaacacacacacagacaaaatccagatccgggttggagtaaagcagggtgacccgatgtcgccccttttatttaacctggcaatggaccctctattatgcaagctggaagagagtggcaaaggataccaccgaggacagagcagcatcacagcgatggcatttgcagacgatctggttttgctgagcgactcctgggaaaatatgaatacaaatattagcatactggagaccttctgcaatctgaccggactcaaaacacaggggcaaaagtgccacggcttttacatcaagccgacaaagaagtcttacaccatcaatgactgcgctgcctggactatcaacggcacacccctgaacatgatcgaccccggcgaatctgagaaatacctcggcctgcagtttgacccgtggattggaatagcaaggtccggtctctccacaaaactagatttttggcttcagcggatcgatcaagcaccacttaaacctctgcagaaaactgatattctcaaaacatacaccatccctcggctgatctacatagctgaccactcagaagtgaaaagcgcactactcgaaacccttgaccagaagatccggacagcggtcaaggaatggcttcacctacctccgtgcacctgcgatgccatcctgtactcgagcacgagagacggcggtttgggcatcaccaaattggcaggactgatccccagcgtgcaggcccgtagactgcatcggatcgcacagtcatctgacgatacgatgaaatgcttcatggaaaaagagaaaatggaacagctgcataagaaattgtggattcaagctggaggggacagagagaacataccctcgatttgggaagcaccaccgtcgagtgaaccaccaaacaacgtgagcacaaattcggaatgggaagcaccgacccagaaagataaatacccaaagccttgcaattggaggaaaaacgaattcaaaaaatggaccaaattggcatcccaaggccgcggaattgtaaattttgaaagagacaaaattagtaaccattggatccaatactacagacgcatacctcacaggaaactcctcactgcactacaactcagggccaacgtttaccccacgagagaatttctagccaggggtagacaagaccaatacatcaaggcgtgtaggcactgcgatgcggacaacgaatcctgcgcccacatcatcggcaactgcccagtgacacaggacgcccgaatcaagaggcacaattacatctgcgaactgcttctcgaggaggcgaagaagaaggactgggtagtgttcaaggaaccgcacataagggattccaacaaggaactgtacaaacctgacctgatatttgtgaaggatgggcgtgcacttgtcgtggatgtgacagtacggtatgaagcagccaaatcatcgctggaggaagccgctgcagagaaagtgagaaagtacaaacacctggaaacggaagtaagacatctcacgaatgcaaaggacgttacttttgtgggctttcccctaggagcgcgggggaaatggcaccaagataactttaaacttttgactgagcttggcctctccaaatcgaggcaagtgaaaatggcagagactttttccacagtagcgctcttttcatctgtggacattgtacatatgtttgccagtagggccagaaaatctatggttatgtgataataggctgccttctgcggggcttgccttctggccatgcccttcttctctcccttgcacctgtacctcttggtctttgaataaagcctgagtaggaaggaccggtaaaaaaaaaaaaaaaaaaaaaaaaaaaaaaacgttgactaaaaaaaaaaaaaaaaaaaaaaaaaaaaaaaaaaaaaaaaaaaaaaaaaaaaaaaaaaaaaaaaaaaaaa

SEQ ID NO: 10847 - DNA, 5264 bp, synthetic construct
  source 1..5264: mol_type = other DNA
gaaataagagagaaaagaagagtaagaagaaatataagagaattcgccaccatggcccctaagaaaaagcggaaggtgaatatcagcggctctagctgcggcagccccaacagcgccgacaccagcagcgacttcaaggacctgtggaccaagctgaaggaatgccacgaccgggaagtgcagggactccaggtgaaggtcaccaaactcaagcaagaaagaatcctggacgcccagagactggaagaattcttcaccaagaaccagcagctgagagagcagcagaaagtgctgcacgagacaatcaaggttctggaagatagactgcgggccggcctgtgcgacagatgcgccgtgaccgaggaacacatgcgcaaaaagcagcaggagttcgagaacattagacagcaaaatctgaaattgatcacagagctgatgaacgagagaaacacactgcaggaggagaacaagaagctgagcgagcagctgcaacagaagatcgagaatgatcagcaacaccaggccgctgagctggaatgtgaagaggacgtgatccccgacagcccaatcacagctttcagcttttctggcgtgaacagactgaggcggaaggaaaacccccacgtgcggtacatcgagcagacccataccaagctggaacacagcgtgtgtgccaacgagatgagaaaggtgtccaagtcctccacccatccccagcacaaccctaacgaaaatgagatcctggtggctgatacctacgaccagtctcagagccctatggccaaggcccacggcaccagctcttatacccctgataagagctccttcaacctggccaccgtggtggccgagacactgggcctgggcgtgcaggaggaaagcgagacacagggcccaatgagccctctgggagatgagctgtaccactgcctggaaggcaaccacaagaaacagccttttgagtccggctccgagactcctggaacaagcgagagcgctacacctgagggcagccctaagagaaaggtgtccagcgccgagggcgctgccaaggaagagcctaaacggagaagcgccagactgagcgccaagccccccgccaaggtggaagccaagcctaagaaggccgccgctaaggacaagagcagcgataagaaagtccagaccaagggcaagcggggcgccaaaggcaaacaggccgaggtggccaaccaggagacaaaggaagatctgcctgctgagaacggcgaaaccaagaccgaggaatctccagcttctgacgaggccggagagaaggaggccaaaagcgacagcggctctgagacacctggaacaagcgagagcgccaccccggaatcctatgaacaacttgcaccacaaccgtgtgtgggagaaactttacattctagcctcccacgagacagtgaactgtttgtgcctgaagaggggagcagcgagaaggagagcgaggacgcgccaaaaacatctcctccgacgcctgggaaacatggtttggaacagactggggaggaaaaagtgatggtgactgttcctgacaaaaatccaccttgtccttgctgtggtacccgggtaaactctgtgttgaatctgattgaacatctgaaagtgtcacacgggaaaaggggggtttgttttcggtgtgcaaaatgtggaaaggaaaatagtaactatcacagtgttgtttgtcattttaagaaatgcaggggtccagagacggagaaagccccagctggggagtggatttgtgaggtatgcaacagagattttacaaccaaaattggcctgggacaacacaagagattggcacacccagcagtgagaaatcaggaaaggatcgttgcttcccaaccgaaagaaacatcaaatagaggtgctcacaaaaggtgctggacaaaggaggaggaagaattactaataagactggaggctcagttcgagggaaacaaaaatattaataagcttattgcagaacacataaccaccaaaacagctaagcagatcagtgacaaaaggcgattgctgtccagaaagccagcagaggagccacgtgaggagcctggaacgtgtcatcacaccaggagagcagctgcgagcctgagaacggagcctgagatgagtcatcacgcccaggcagaggacagagataatggacctgggagacgccctctgccaggcagggcagctgccggagggagaacaatggacgagataagacgccaccctgataagggcaacggacagcagagacccaccaagcaaaaatcagaagaacagctgcaggcttactataaaaagacactagaggaacgactttcagctggggcacttaacaccttcccccgagcattcaagcaggtaatggaaggccgggatataaagctagtaatcaatcagacagcgcaggactgcttcggatgcctggaatccataagccaaataagaacggcaacccgagataaaaaggacacggtgacccgggagaaacacccaaagaaaccttttcagaagtggatgaagaagagagcaatcaaaaaaggtaattatcttcggttccagcgtttattttatcttgatagagggaaactggctaaaatcattttagatgatattgaatgcttgtcttgtgacataccactcagtgaaatttattcggtttttaaaacaagatgggaaacaactggtagctttaaaagccttggggactttaaaacttacgggaaggctgacaacactgccttcagagaattaattacggctaaagaaattgagaaaaatgtgcaggaaatgagcaaaggctcggctcccggtccagacgggattactcttggggacgtcgtaaagatggatcccgagttttcccggaccatggagattttcaatttatggttaacaactggtaaaatcccggacatggtgagggggtgcagaaccgttttgattccaaaatcatcaaagccggatcgtttgaaagacattaataactggagacctatcacgatcggttccatcttgctgagactgttctccaggattgtaacagctaggctgagcaaagcgtgccccctgaacccaaggcaaagaggctttatcagagcggcgggaaagtctgaaaacttaaaactcctgcaaactataatttggtcggccaaaagagaacacagaccactgggtgttgtattcgtggacatcgccaaggcttttgacaccgtaagccaccagcacatcattcatgctttgcagcaaagagaggtggatccccacatcgtcggtctggtgagcaatatgtacgagaacatcagtacgtatatcaccacaaagaggaacacacacacagacaaaatccagatccgggttggagtaaagcagggtgacccgatgtcgccccttttatttaacctggcaatggaccctctattatgcaagctggaagagagtggcaaaggataccaccgaggacagagcagcatcacagcgatggcatttgcagacgatctggttttgctgagcgactcctgggaaaatatgaatacaaatattagcatactggagaccttctgcaatctgaccggactcaaaacacaggggcaaaagtgccacggcttttacatcaagccgacaaagaagtcttacaccatcaatgactgcgctgcctggactatcaacggcacacccctgaacatgatcgaccccggcgaatctgagaaatacctcggcctgcagtttgacccgtggattggaatagcaaggtccggtctctccacaaaactagatttttggcttcagcggatcgatcaagcaccacttaaacctctgcagaaaactgatattctcaaaacatacaccatccctcggctgatctacatagctgaccactcagaagtgaaaagcgcactactcgaaacccttgaccagaagatccggacagcggtcaaggaatggcttcacctacctccgtgcacctgcgatgccatcctgtactcgagcacgagagacggcggtttgggcatcaccaaattggcaggactgatccccagcgtgcaggcccgtagactgcatcggatcgcacagtcatctgacgatacgatgaaatgcttcatggaaaaagagaaaatggaacagctgcataagaaattgtggattcaagctggaggggacagagagaacataccctcgatttgggaagcaccaccgtcgagtgaaccaccaaacaacgtgagcacaaattcggaatgggaagcaccgacccagaaagataaatttccaaagccttgcaattggaggaaaaacgaattcaaaaaatggaccaaattggcatcccaaggccgcggaattgtaaattttgaaagagacaaaattagtaaccattggatccaatactacagacgcatacctcacaggaaactcctcactgcactacaactcagggccaacgtttaccccacgagagaatttctagccaggggtagacaagaccaatacatcaaggcgtgtaggcactgcgatgcggacaacgaatcctgcgcccacatcatcggcaactgcccagtgacacaggacgcccgaatcaagaggcacaattacatctgcgaactgcttctcgaggaggcgaagaagaaggactgggtagtgttcaaggaaccgcacataagggattccaacaaggaactgtacaaacctgacctgatatttgtgaaggatgggcgtgcacttgtcgtggatgtgacagtacggtatgaagcagccaaatcatcgctggaggaagccgctgcagagaaagtgagaaagtacaaacacctggaaacggaagtaagacatctcacgaatgcaaaggacgttacttttgtgggctttcccctaggagcgcgggggaaatggcaccaagataactttaaacttttgactgagcttggcctctccaaatcgaggcaagtgaaaatggcagagactttttccacagtagcgctcttttcatctgtggacattgtacatatgtttgccagtagggccagaaaatctatggttatgtgataataggctgccttctgcggggcttgccttctggccatgcccttcttctctcccttgcacctgtacctcttggtctttgaataaagcctgagtaggaaggaccggtaaaaaaaaaaaaaaaaaaaaaaaaaaaaaaacgttgactaaaaaaaaaaaaaaaaaaaaaaaaaaaaaaaaaaaaaaaaaaaaaaaaaaaaaaaaaaaaaaaaaaaaaa

SEQ ID NO: 10848 - DNA, 5264 bp, synthetic construct
  source 1..5264: mol_type = other DNA
gaaataagagagaaaagaagagtaagaagaaatataagagaattcgccaccatggcccctaagaaaaagcggaaggtgaatatcagcggctctagctgcggcagccccaacagcgccgacaccagcagcgacttcaaggacctgtggaccaagctgaaggaatgccacgaccgggaagtgcagggactccaggtgaaggtcaccaaactcaagcaagaaagaatcctggacgcccagagactggaagaattcttcaccaagaaccagcagctgagagagcagcagaaagtgctgcacgagacaatcaaggttctggaagatagactgcgggccggcctgtgcgacagatgcgccgtgaccgaggaacacatgcgcaaaaagcagcaggagttcgagaacattagacagcaaaatctgaaattgatcacagagctgatgaacgagagaaacacactgcaggaggagaacaagaagctgagcgagcagctgcaacagaagatcgagaatgatcagcaacaccaggccgctgagctggaatgtgaagaggacgtgatccccgacagcccaatcacagctttcagcttttctggcgtgaacagactgaggcggaaggaaaacccccacgtgcggtacatcgagcagacccataccaagctggaacacagcgtgtgtgccaacgagatgagaaaggtgtccaagtcctccacccatccccagcacaaccctaacgaaaatgagatcctggtggctgatacctacgaccagtctcagagccctatggccaaggcccacggcaccagctcttatacccctgataagagctccttcaacctggccaccgtggtggccgagacactgggcctgggcgtgcaggaggaaagcgagacacagggcccaatgagccctctgggagatgagctgtaccactgcctggaaggcaaccacaagaaacagccttttgagtccggctccgagactcctggaacaagcgagagcgctacacctgagggcagccctaagagaaaggtgtccagcgccgagggcgctgccaaggaagagcctaaacggagaagcgccagactgagcgccaagccccccgccaaggtggaagccaagcctaagaaggccgccgctaaggacaagagcagcgataagaaagtccagaccaagggcaagcggggcgccaaaggcaaacaggccgaggtggccaaccaggagacaaaggaagatctgcctgctgagaacggcgaaaccaagaccgaggaatctccagcttctgacgaggccggagagaaggaggccaaaagcgacagcggctctgagacacctggaacaagcgagagcgccaccccggaatcctatgaacaacttgcaccacaaccgtgtgtgggagaaactttacattctagcctcccacgagacagtgaactgtttgtgcctgaagaggggagcagcgagaaggagagcgaggacgcgccaaaaacatctcctccgacgcctgggaaacatggtttggaacagactggggaggaaaaagtgatggtgactgttcctgacaaaaatccaccttgtccttgctgtggtacccgggtaaactctgtgttgaatctgattgaacatctgaaagtgtcacacgggaaaaggggggtttgttttcggtgtgcaaaatgtggaaaggaaaatagtaactatcacagtgttgtttgtcattttaagaaatgcaggggtccagagacggagaaagccccagctggggagtggatttgtgaggtatgcaacagagattttacaaccaaaattggcctgggacaacacaagagattggcacacccagcagtgagaaatcaggaaaggatcgttgcttcccaaccgaaagaaacatcaaatagaggtgctcacaaaaggtgctggacaaaggaggaggaagaattactaataagactggaggctcagttcgagggaaacaaaaatattaataagcttattgcagaacacataaccaccaaaacagctaagcagatcagtgacaaaaggcgattgctgtccagaaagccagcagaggagccacgtgaggagcctggaacgtgtcatcacaccaggagagcagctgcgagcctgagaacggagcctgagatgagtcatcacgcccaggcagaggacagagataatggacctgggagacgccctctgccaggcagggcagctgccggagggagaacaatggacgagataagacgccaccctgataagggcaacggacagcagagacccaccaagcaaaaatcagaagaacagctgcaggcttactataaaaagacactagaggaacgactttcagctggggcacttaacaccttcccccgagcattcaagcaggtaatggaaggccgggatataaagctagtaatcaatcagacagcgcaggactgcttcggatgcctggaatccataagccaaataagaacggcaacccgagataaaaaggacacggtgacccgggagaaacacccaaagaaaccttttcagaagtggatgaagaagagagcaatcaaaaaaggtaattatcttcggttccagcgtttattttatcttgatagagggaaactggctaaaatcattttagatgatattgaatgcttgtcttgtgacataccactcagtgaaatttattcggtttttaaaacaagatgggaaacaactggtagctttaaaagccttggggactttaaaacttacgggaaggctgacaacactgccttcagagaattaattacggctaaagaaattgagaaaaatgtgcaggaaatgagcaaaggctcggctcccggtccagacgggattactcttggggacgtcgtaaagatggatcccgagttttcccggaccatggagattttcaatttatggttaacaactggtaaaatcccggacatggtgagggggtgcagaaccgttttgattccaaaatcatcaaagccggatcgtttgaaagacattaataactggagacctatcacgatcggttccatcttgctgagactgttctccaggattgtaacagctaggctgagcaaagcgtgccccctgaacccaaggcaaagaggctttatcagagcggcgggatgctctgaaaacttaaaactcctgcaaactataatttggtcggccaaaagagaacacagaccactgggtgttgtattcgtggacatcgccaaggcttttgacaccgtaagccaccagcacatcattcatgctttgcagcaaagagaggtggatccccacatcgtcggtctggtgagcaatatgtacgagaacatcagtacgtatatcaccacaaagaggaacacacacacagacaaaatccagatccgggttggagtaaagcagggtgacccgatgtcgccccttttatttaacctggcaatggaccctctattatgcaagctggaagagagtggcaaaggataccaccgaggacagagcagcatcacagcgatggcatttgcagacgatctggttttgctgagcgactcctgggaaaatatgaatacaaatattagcatactggagaccttctgcaatctgaccggactcaaaacacaggggcaaaagtgccacggcttttacatcaagccgacaaagaagtcttacaccatcaatgactgcgctgcctggactatcaacggcacacccctgaacatgatcgaccccggcgaatctgagaaatacctcggcctgcagtttgacccgtggattggaatagcaaggtccggtctctccacaaaactagatttttggcttcagcggatcgatcaagcaccacttaaacctctgcagaaaactgatattctcaaaacatacaccatccctcggctgatctacatagctgaccactcagaagtgaaaagcgcactactcgaaacccttgaccagaagatccggacagcggtcaaggaatggcttcacctacctccgtgcacctgcgatgccatcctgtactcgagcacgagagacggcggtttgggcatcaccaaattggcaggactgatccccagcgtgcaggcccgtagactgcatcggatcgcacagtcatctgacgatacgatgaaatgcttcatggaaaaagagaaaatggaacagctgcataagaaattgtggattcaagctggaggggacagagagaacataccctcgatttgggaagcaccaccgtcgagtgaaccaccaaacaacgtgagcacaaattcggaatgggaagcaccgacccagaaagataaaagaccaaagccttgcaattggaggaaaaacgaattcaaaaaatggaccaaattggcatcccaaggccgcggaattgtaaattttgaaagagacaaaattagtaaccattggatccaatactacagacgcatacctcacaggaaactcctcactgcactacaactcagggccaacgtttaccccacgagagaatttctagccaggggtagacaagaccaatacatcaaggcgtgtaggcactgcgatgcggacaacgaatcctgcgcccacatcatcggcaactgcccagtgacacaggacgcccgaatcaagaggcacaattacatctgcgaactgcttctcgaggaggcgaagaagaaggactgggtagtgttcaaggaaccgcacataagggattccaacaaggaactgtacaaacctgacctgatatttgtgaaggatgggcgtgcacttgtcgtggatgtgacagtacggtatgaagcagccaaatcatcgctggaggaagccgctgcagagaaagtgagaaagtacaaacacctggaaacggaagtaagacatctcacgaatgcaaaggacgttacttttgtgggctttcccctaggagcgcgggggaaatggcaccaagataactttaaacttttgactgagcttggcctctccaaatcgaggcaagtgaaaatggcagagactttttccacagtagcgctcttttcatctgtggacattgtacatatgtttgccagtagggccagaaaatctatggttatgtgataataggctgccttctgcggggcttgccttctggccatgcccttcttctctcccttgcacctgtacctcttggtctttgaataaagcctgagtaggaaggaccggtaaaaaaaaaaaaaaaaaaaaaaaaaaaaaaacgttgactaaaaaaaaaaaaaaaaaaaaaaaaaaaaaaaaaaaaaaaaaaaaaaaaaaaaaaaaaaaaaaaaaaaaaa

SEQ ID NO: 10849 - DNA, 5264 bp, synthetic construct
  source 1..5264: mol_type = other DNA
gaaataagagagaaaagaagagtaagaagaaatataagagaattcgccaccatggcccctaagaaaaagcggaaggtgaatatcagcggctctagctgcggcagccccaacagcgccgacaccagcagcgacttcaaggacctgtggaccaagctgaaggaatgccacgaccgggaagtgcagggactccaggtgaaggtcaccaaactcaagcaagaaagaatcctggacgcccagagactggaagaattcttcaccaagaaccagcagctgagagagcagcagaaagtgctgcacgagacaatcaaggttctggaagatagactgcgggccggcctgtgcgacagatgcgccgtgaccgaggaacacatgcgcaaaaagcagcaggagttcgagaacattagacagcaaaatctgaaattgatcacagagctgatgaacgagagaaacacactgcaggaggagaacaagaagctgagcgagcagctgcaacagaagatcgagaatgatcagcaacaccaggccgctgagctggaatgtgaagaggacgtgatccccgacagcccaatcacagctttcagcttttctggcgtgaacagactgaggcggaaggaaaacccccacgtgcggtacatcgagcagacccataccaagctggaacacagcgtgtgtgccaacgagatgagaaaggtgtccaagtcctccacccatccccagcacaaccctaacgaaaatgagatcctggtggctgatacctacgaccagtctcagagccctatggccaaggcccacggcaccagctcttatacccctgataagagctccttcaacctggccaccgtggtggccgagacactgggcctgggcgtgcaggaggaaagcgagacacagggcccaatgagccctctgggagatgagctgtaccactgcctggaaggcaaccacaagaaacagccttttgagtccggctccgagactcctggaacaagcgagagcgctacacctgagggcagccctaagagaaaggtgtccagcgccgagggcgctgccaaggaagagcctaaacggagaagcgccagactgagcgccaagccccccgccaaggtggaagccaagcctaagaaggccgccgctaaggacaagagcagcgataagaaagtccagaccaagggcaagcggggcgccaaaggcaaacaggccgaggtggccaaccaggagacaaaggaagatctgcctgctgagaacggcgaaaccaagaccgaggaatctccagcttctgacgaggccggagagaaggaggccaaaagcgacagcggctctgagacacctggaacaagcgagagcgccaccccggaatcctatgaacaacttgcaccacaaccgtgtgtgggagaaactttacattctagcctcccacgagacagtgaactgtttgtgcctgaagaggggagcagcgagaaggagagcgaggacgcgccaaaaacatctcctccgacgcctgggaaacatggtttggaacagactggggaggaaaaagtgatggtgactgttcctgacaaaaatccaccttgtccttgctgtggtacccgggtaaactctgtgttgaatctgattgaacatctgaaagtgtcacacgggaaaaggggggtttgttttcggtgtgcaaaatgtggaaaggaaaatagtaactatcacagtgttgtttgtcattttaagaaatgcaggggtccagagacggagaaagccccagctggggagtggatttgtgaggtatgcaacagagattttacaaccaaaattggcctgggacaacacaagagattggcacacccagcagtgagaaatcaggaaaggatcgttgcttcccaaccgaaagaaacatcaaatagaggtgctcacaaaaggtgctggacaaaggaggaggaagaattactaataagactggaggctcagttcgagggaaacaaaaatattaataagcttattgcagaacacataaccaccaaaacagctaagcagatcagtgacaaaaggcgattgctgtccagaaagccagcagaggagccacgtgaggagcctggaacgtgtcatcacaccaggagagcagctgcgagcctgagaacggagcctgagatgagtcatcacgcccaggcagaggacagagataatggacctgggagacgccctctgccaggcagggcagctgccggagggagaacaatggacgagataagacgccaccctgataagggcaacggacagcagagacccaccaagcaaaaatcagaagaacagctgcaggcttactataaaaagacactagaggaacgactttcagctggggcacttaacaccttcccccgagcattcaagcaggtaatggaaggccgggatataaagctagtaatcaatcagacagcgcaggactgcttcggatgcctggaatccataagccaaataagaacggcaacccgagataaaaaggacacggtgacccgggagaaacacccaaagaaaccttttcagaagtggatgaagaagagagcaatcaaaaaaggtaattatcttcggttccagcgtttattttatcttgatagagggaaactggctaaaatcattttagatgatattgaatgcttgtcttgtgacataccactcagtgaaatttattcggtttttaaaacaagatgggaaacaactggtagctttaaaagccttggggactttaaaacttacgggaaggctgacaacactgccttcagagaattaattacggctaaagaaattgagaaaaatgtgcaggaaatgagcaaaggctcggctcccggtccagacgggattactcttggggacgtcgtaaagatggatcccgagttttcccggaccatggagattttcaatttatggttaacaactggtaaaatcccggacatggtgagggggtgcagaaccgttttgattccaaaatcatcaaagccggatcgtttgaaagacattaataactggagacctatcacgatcggttccatcttgctgagactgttctccaggattgtaacagctaggctgagcaaagcgtgccccctgaacccaaggcaaagaggctttatcagagcggcgggatgctctgaaaacttaaaactcctgcaaactataatttggtcggccaaaagagaacacagaccactgggtgttgtattcgtggacatcgccaaggcttttgacaccgtaagccaccagcacatcattcatgctttgcagcaaagagaggtggatccccacatcgtcggtctggtgagcaatatgtacgagaacatcagtacgtatatcaccacaaagaggaacacacacacagacaaaatccagatccgggttggagtaaagcagggtgacccgatgtcgccccttttatttaacctggcaatggaccctctattatgcaagctggaagagagtggcaaaggataccaccgaggacagagcagcatcacagcgatggcatttgcagacgatctggttttgctgagcgactcctgggaaaatatgaatacaaatattagcatactggagaccttctgcaatctgaccggactcaaaacacaggggcaaaagtgccacggcttttacatcaagccgacaaagaagtcttacaccatcaatgactgcgctgcctggactatcaacggcacacccctgaacatgatcgaccccggcgaatctgagaaatacctcggcctgcagtttgacccgtggattggaatagcaaggtccggtctctccacaaaactagatttttggcttcagcggatcgatcaagcaccacttaaacctctgcagaaaactgatattctcaaaacatacaccatccctcggctgatctacatagctgaccactcagaagtgaaaagcgcactactcgaaacccttgaccagaagatccggacagcggtcaaggaatggcttcacctacctccgtgcacctgcgatgccatcctgtactcgagcacgagagacggcggtttgggcatcaccaaattggcaggaagaatccccagcgtgcaggcccgtagactgcatcggatcgcacagtcatctgacgatacgatgaaatgcttcatggaaaaagagaaaatggaacagctgcataagaaattgtggattcaagctggaggggacagagagaacataccctcgatttgggaagcaccaccgtcgagtgaaccaccaaacaacgtgagcacaaattcggaatgggaagcaccgacccagaaagataaatttccaaagccttgcaattggaggaaaaacgaattcaaaaaatggaccaaattggcatcccaaggccgcggaattgtaaattttgaaagagacaaaattagtaaccattggatccaatactacagacgcatacctcacaggaaactcctcactgcactacaactcagggccaacgtttaccccacgagagaatttctagccaggggtagacaagaccaatacatcaaggcgtgtaggcactgcgatgcggacaacgaatcctgcgcccacatcatcggcaactgcccagtgacacaggacgcccgaatcaagaggcacaattacatctgcgaactgcttctcgaggaggcgaagaagaaggactgggtagtgttcaaggaaccgcacataagggattccaacaaggaactgtacaaacctgacctgatatttgtgaaggatgggcgtgcacttgtcgtggatgtgacagtacggtatgaagcagccaaatcatcgctggaggaagccgctgcagagaaagtgagaaagtacaaacacctggaaacggaagtaagacatctcacgaatgcaaaggacgttacttttgtgggctttcccctaggagcgcgggggaaatggcaccaagataactttaaacttttgactgagcttggcctctccaaatcgaggcaagtgaaaatggcagagactttttccacagtagcgctcttttcatctgtggacattgtacatatgtttgccagtagggccagaaaatctatggttatgtgataataggctgccttctgcggggcttgccttctggccatgcccttcttctctcccttgcacctgtacctcttggtctttgaataaagcctgagtaggaaggaccggtaaaaaaaaaaaaaaaaaaaaaaaaaaaaaaacgttgactaaaaaaaaaaaaaaaaaaaaaaaaaaaaaaaaaaaaaaaaaaaaaaaaaaaaaaaaaaaaaaaaaaaaaa

SEQ ID NO: 10850 - DNA, 5264 bp, synthetic construct
  source 1..5264: mol_type = other DNA
gaaataagagagaaaagaagagtaagaagaaatataagagaattcgccaccatggcccctaagaaaaagcggaaggtgaatatcagcggctctagctgcggcagccccaacagcgccgacaccagcagcgacttcaaggacctgtggaccaagctgaaggaatgccacgaccgggaagtgcagggactccaggtgaaggtcaccaaactcaagcaagaaagaatcctggacgcccagagactggaagaattcttcaccaagaaccagcagctgagagagcagcagaaagtgctgcacgagacaatcaaggttctggaagatagactgcgggccggcctgtgcgacagatgcgccgtgaccgaggaacacatgcgcaaaaagcagcaggagttcgagaacattagacagcaaaatctgaaattgatcacagagctgatgaacgagagaaacacactgcaggaggagaacaagaagctgagcgagcagctgcaacagaagatcgagaatgatcagcaacaccaggccgctgagctggaatgtgaagaggacgtgatccccgacagcccaatcacagctttcagcttttctggcgtgaacagactgaggcggaaggaaaacccccacgtgcggtacatcgagcagacccataccaagctggaacacagcgtgtgtgccaacgagatgagaaaggtgtccaagtcctccacccatccccagcacaaccctaacgaaaatgagatcctggtggctgatacctacgaccagtctcagagccctatggccaaggcccacggcaccagctcttatacccctgataagagctccttcaacctggccaccgtggtggccgagacactgggcctgggcgtgcaggaggaaagcgagacacagggcccaatgagccctctgggagatgagctgtaccactgcctggaaggcaaccacaagaaacagccttttgagtccggctccgagactcctggaacaagcgagagcgctacacctgagggcagccctaagagaaaggtgtccagcgccgagggcgctgccaaggaagagcctaaacggagaagcgccagactgagcgccaagccccccgccaaggtggaagccaagcctaagaaggccgccgctaaggacaagagcagcgataagaaagtccagaccaagggcaagcggggcgccaaaggcaaacaggccgaggtggccaaccaggagacaaaggaagatctgcctgctgagaacggcgaaaccaagaccgaggaatctccagcttctgacgaggccggagagaaggaggccaaaagcgacagcggctctgagacacctggaacaagcgagagcgccaccccggaatcctatgaacaacttgcaccacaaccgtgtgtgggagaaactttacattctagcctcccacgagacagtgaactgtttgtgcctgaagaggggagcagcgagaaggagagcgaggacgcgccaaaaacatctcctccgacgcctgggaaacatggtttggaacagactggggaggaaaaagtgatggtgactgttcctgacaaaaatccaccttgtccttgctgtggtacccgggtaaactctgtgttgaatctgattgaacatctgaaagtgtcacacgggaaaaggggggtttgttttcggtgtgcaaaatgtggaaaggaaaatagtaactatcacagtgttgtttgtcattttaagaaatgcaggggtccagagacggagaaagccccagctggggagtggatttgtgaggtatgcaacagagattttacaaccaaaattggcctgggacaacacaagagattggcacacccagcagtgagaaatcaggaaaggatcgttgcttcccaaccgaaagaaacatcaaatagaggtgctcacaaaaggtgctggacaaaggaggaggaagaattactaataagactggaggctcagttcgagggaaacaaaaatattaataagcttattgcagaacacataaccaccaaaacagctaagcagatcagtgacaaaaggcgattgctgtccagaaagccagcagaggagccacgtgaggagcctggaacgtgtcatcacaccaggagagcagctgcgagcctgagaacggagcctgagatgagtcatcacgcccaggcagaggacagagataatggacctgggagacgccctctgccaggcagggcagctgccggagggagaacaatggacgagataagacgccaccctgataagggcaacggacagcagagacccaccaagcaaaaatcagaagaacagctgcaggcttactataaaaagacactagaggaacgactttcagctggggcacttaacaccttcccccgagcattcaagcaggtaatggaaggccgggatataaagctagtaatcaatcagacagcgcaggactgcttcggatgcctggaatccataagccaaataagaacggcaacccgagataaaaaggacacggtgacccgggagaaacacccaaagaaaccttttcagaagtggatgaagaagagagcaatcaaaaaaggtaattatcttcggttccagcgtttattttatcttgatagagggaaactggctaaaatcattttagatgatattgaatgcttgtcttgtgacataccactcagtgaaatttattcggtttttaaaacaagatgggaaacaactggtagctttaaaagccttggggactttaaaacttacgggaaggctgacaacactgccttcagagaattaattacggctaaagaaattgagaaaaatgtgcaggaaatgagcaaaggctcggctcccggtccagacgggattactcttggggacgtcgtaaagatggatcccgagttttcccggaccatggagattttcaatttatggttaacaactggtaaaatcccggacatggtgagggggtgcagaaccgttttgattccaaaatcatcaaagccggatcgtttgaaagacattaataactggagacctatcacgatcggttccatcttgctgagactgttctccaggattgtaacagctaggctgagcaaagcgtgccccctgaacccaaggcaaagaggctttatcagagcggcgggatgctctgaaaacttaaaactcctgcaaactataatttggtcggccaaaagagaacacagaccactgggtgttgtattcgtggacatcgccaaggcttttgacaccgtaagccaccagcacatcattcatgctttgcagcaaagagaggtggatccccacatcgtcggtctggtgagcaatatgtacgagaacatcagtacgtatatcaccacaaagaggaacacacacacagacaaaatccagatccgggttggagtaaagcagggtgacccgatgtcgccccttttatttaacctggcaatggaccctctattatgcaagctggaagagagtggcaaaggataccaccgaggacagagcagcatcacagcgatggcatttgcagacgatctggttttgctgagcgactcctgggaaaatatgaatacaaatattagcatactggagaccttctgcaatctgaccggactcaaaacacaggggcaaaagtgccacggcttttacatcaagccgacaaagaagtcttacaccatcaatgactgcgctgcctggactatcaacggcacacccctgaacatgatcgaccccggcgaatctgagaaatacctcggcctgcagtttgacccgtggattggaatagcaaggtccggtctctccacaaaactagatttttggcttcagcggatcgatcaagcaccacttaaacctctgcagaaaactgatattctcaaaacatacaccatccctcggctgatctacatagctgacaagtcagaagtgaaaagcgcactactcgaaacccttgaccagaagatccggacagcggtcaaggaatggcttcacctacctccgtgcacctgcgatgccatcctgtactcgagcacgagagacggcggtttgggcatcaccaaattggcaggactgatccccagcgtgcaggcccgtagactgcatcggatcgcacagtcatctgacgatacgatgaaatgcttcatggaaaaagagaaaatggaacagctgcataagaaattgtggattcaagctggaggggacagagagaacataccctcgatttgggaagcaccaccgtcgagtgaaccaccaaacaacgtgagcacaaattcggaatgggaagcaccgacccagaaagataaatttccaaagccttgcaattggaggaaaaacgaattcaaaaaatggaccaaattggcatcccaaggccgcggaattgtaaattttgaaagagacaaaattagtaaccattggatccaatactacagacgcatacctcacaggaaactcctcactgcactacaactcagggccaacgtttaccccacgagagaatttctagccaggggtagacaagaccaatacatcaaggcgtgtaggcactgcgatgcggacaacgaatcctgcgcccacatcatcggcaactgcccagtgacacaggacgcccgaatcaagaggcacaattacatctgcgaactgcttctcgaggaggcgaagaagaaggactgggtagtgttcaaggaaccgcacataagggattccaacaaggaactgtacaaacctgacctgatatttgtgaaggatgggcgtgcacttgtcgtggatgtgacagtacggtatgaagcagccaaatcatcgctggaggaagccgctgcagagaaagtgagaaagtacaaacacctggaaacggaagtaagacatctcacgaatgcaaaggacgttacttttgtgggctttcccctaggagcgcgggggaaatggcaccaagataactttaaacttttgactgagcttggcctctccaaatcgaggcaagtgaaaatggcagagactttttccacagtagcgctcttttcatctgtggacattgtacatatgtttgccagtagggccagaaaatctatggttatgtgataataggctgccttctgcggggcttgccttctggccatgcccttcttctctcccttgcacctgtacctcttggtctttgaataaagcctgagtaggaaggaccggtaaaaaaaaaaaaaaaaaaaaaaaaaaaaaaacgttgactaaaaaaaaaaaaaaaaaaaaaaaaaaaaaaaaaaaaaaaaaaaaaaaaaaaaaaaaaaaaaaaaaaaaaa

SEQ ID NO: 10851 - DNA, 5264 bp, synthetic construct
  source 1..5264: mol_type = other DNA
gaaataagagagaaaagaagagtaagaagaaatataagagaattcgccaccatggcccctaagaaaaagcggaaggtgaatatcagcggctctagctgcggcagccccaacagcgccgacaccagcagcgacttcaaggacctgtggaccaagctgaaggaatgccacgaccgggaagtgcagggactccaggtgaaggtcaccaaactcaagcaagaaagaatcctggacgcccagagactggaagaattcttcaccaagaaccagcagctgagagagcagcagaaagtgctgcacgagacaatcaaggttctggaagatagactgcgggccggcctgtgcgacagatgcgccgtgaccgaggaacacatgcgcaaaaagcagcaggagttcgagaacattagacagcaaaatctgaaattgatcacagagctgatgaacgagagaaacacactgcaggaggagaacaagaagctgagcgagcagctgcaacagaagatcgagaatgatcagcaacaccaggccgctgagctggaatgtgaagaggacgtgatccccgacagcccaatcacagctttcagcttttctggcgtgaacagactgaggcggaaggaaaacccccacgtgcggtacatcgagcagacccataccaagctggaacacagcgtgtgtgccaacgagatgagaaaggtgtccaagtcctccacccatccccagcacaaccctaacgaaaatgagatcctggtggctgatacctacgaccagtctcagagccctatggccaaggcccacggcaccagctcttatacccctgataagagctccttcaacctggccaccgtggtggccgagacactgggcctgggcgtgcaggaggaaagcgagacacagggcccaatgagccctctgggagatgagctgtaccactgcctggaaggcaaccacaagaaacagccttttgagtccggctccgagactcctggaacaagcgagagcgctacacctgagggcagccctaagagaaaggtgtccagcgccgagggcgctgccaaggaagagcctaaacggagaagcgccagactgagcgccaagccccccgccaaggtggaagccaagcctaagaaggccgccgctaaggacaagagcagcgataagaaagtccagaccaagggcaagcggggcgccaaaggcaaacaggccgaggtggccaaccaggagacaaaggaagatctgcctgctgagaacggcgaaaccaagaccgaggaatctccagcttctgacgaggccggagagaaggaggccaaaagcgacagcggctctgagacacctggaacaagcgagagcgccaccccggaatcctatgaacaacttgcaccacaaccgtgtgtgggagaaactttacattctagcctcccacgagacagtgaactgtttgtgcctgaagaggggagcagcgagaaggagagcgaggacgcgccaaaaacatctcctccgacgcctgggaaacatggtttggaacagactggggaggaaaaagtgatggtgactgttcctgacaaaaatccaccttgtccttgctgtggtacccgggtaaactctgtgttgaatctgattgaacatctgaaagtgtcacacgggaaaaggggggtttgttttcggtgtgcaaaatgtggaaaggaaaatagtaactatcacagtgttgtttgtcattttaagaaatgcaggggtccagagacggagaaagccccagctggggagtggatttgtgaggtatgcaacagagattttacaaccaaaattggcctgggacaacacaagagattggcacacccagcagtgagaaatcaggaaaggatcgttgcttcccaaccgaaagaaacatcaaatagaggtgctcacaaaaggtgctggacaaaggaggaggaagaattactaataagactggaggctcagttcgagggaaacaaaaatattaataagcttattgcagaacacataaccaccaaaacagctaagcagatcagtgacaaaaggcgattgctgtccagaaagccagcagaggagccacgtgaggagcctggaacgtgtcatcacaccaggagagcagctgcgagcctgagaacggagcctgagatgagtcatcacgcccaggcagaggacagagataatggacctgggagacgccctctgccaggcagggcagctgccggagggagaacaatggacgagataagacgccaccctgataagggcaacggacagcagagacccaccaagcaaaaatcagaagaacagctgcaggcttactataaaaagacactagaggaacgactttcagctggggcacttaacaccttcccccgagcattcaagcaggtaatggaaggccgggatataaagctagtaatcaatcagacagcgcaggactgcttcggatgcctggaatccataagccaaataagaacggcaacccgagataaaaaggacacggtgacccgggagaaacacccaaagaaaccttttcagaagtggatgaagaagagagcaatcaaaaaaggtaattatcttcggttccagcgtttattttatcttgatagagggaaactggctaaaatcattaaggatgatattgaatgcttgtcttgtgacataccactcagtgaaatttattcggtttttaaaacaagatgggaaacaactggtagctttaaaagccttggggactttaaaacttacgggaaggctgacaacactgccttcagagaattaattacggctaaagaaattgagaaaaatgtgcaggaaatgagcaaaggctcggctcccggtccagacgggattactcttggggacgtcgtaaagatggatcccgagttttcccggaccatggagattttcaatttatggttaacaactggtaaaatcccggacatggtgagggggtgcagaaccgttttgattccaaaatcatcaaagccggatcgtttgaaagacattaataactggagacctatcacgatcggttccatcttgctgagactgttctccaggattgtaacagctaggctgagcaaagcgtgccccctgaacccaaggcaaagaggctttatcagagcggcgggatgctctgaaaacttaaaactcctgcaaactataatttggtcggccaaaagagaacacagaccactgggtgttgtattcgtggacatcgccaaggcttttgacaccgtaagccaccagcacatcattcatgctttgcagcaaagagaggtggatccccacatcgtcggtctggtgagcaatatgtacgagaacatcagtacgtatatcaccacaaagaggaacacacacacagacaaaatccagatccgggttggagtaaagcagggtgacccgatgtcgccccttttatttaacctggcaatggaccctctattatgcaagctggaagagagtggcaaaggataccaccgaggacagagcagcatcacagcgatggcatttgcagacgatctggttttgctgagcgactcctgggaaaatatgaatacaaatattagcatactggagaccttctgcaatctgaccggactcaaaacacaggggcaaaagtgccacggcttttacatcaagccgacaaagaagtcttacaccatcaatgactgcgctgcctggactatcaacggcacacccctgaacatgatcgaccccggcgaatctgagaaatacctcggcctgcagtttgacccgtggattggaatagcaaggtccggtctctccacaaaactagatttttggcttcagcggatcgatcaagcaccacttaaacctctgcagaaaactgatattctcaaaacatacaccatccctcggctgatctacatagctgaccactcagaagtgaaaagcgcactactcgaaacccttgaccagaagatccggacagcggtcaaggaatggcttcacctacctccgtgcacctgcgatgccatcctgtactcgagcacgagagacggcggtttgggcatcaccaaattggcaggactgatccccagcgtgcaggcccgtagactgcatcggatcgcacagtcatctgacgatacgatgaaatgcttcatggaaaaagagaaaatggaacagctgcataagaaattgtggattcaagctggaggggacagagagaacataccctcgatttgggaagcaccaccgtcgagtgaaccaccaaacaacgtgagcacaaattcggaatgggaagcaccgacccagaaagataaatttccaaagccttgcaattggaggaaaaacgaattcaaaaaatggaccaaattggcatcccaaggccgcggaattgtaaattttgaaagagacaaaattagtaaccattggatccaatactacagacgcatacctcacaggaaactcctcactgcactacaactcagggccaacgtttaccccacgagagaatttctagccaggggtagacaagaccaatacatcaaggcgtgtaggcactgcgatgcggacaacgaatcctgcgcccacatcatcggcaactgcccagtgacacaggacgcccgaatcaagaggcacaattacatctgcgaactgcttctcgaggaggcgaagaagaaggactgggtagtgttcaaggaaccgcacataagggattccaacaaggaactgtacaaacctgacctgatatttgtgaaggatgggcgtgcacttgtcgtggatgtgacagtacggtatgaagcagccaaatcatcgctggaggaagccgctgcagagaaagtgagaaagtacaaacacctggaaacggaagtaagacatctcacgaatgcaaaggacgttacttttgtgggctttcccctaggagcgcgggggaaatggcaccaagataactttaaacttttgactgagcttggcctctccaaatcgaggcaagtgaaaatggcagagactttttccacagtagcgctcttttcatctgtggacattgtacatatgtttgccagtagggccagaaaatctatggttatgtgataataggctgccttctgcggggcttgccttctggccatgcccttcttctctcccttgcacctgtacctcttggtctttgaataaagcctgagtaggaaggaccggtaaaaaaaaaaaaaaaaaaaaaaaaaaaaaaacgttgactaaaaaaaaaaaaaaaaaaaaaaaaaaaaaaaaaaaaaaaaaaaaaaaaaaaaaaaaaaaaaaaaaaaaaa

SEQ ID NO: 10852 - DNA, 5264 bp, synthetic construct
  source 1..5264: mol_type = other DNA
gaaataagagagaaaagaagagtaagaagaaatataagagaattcgccaccatggcccctaagaaaaagcggaaggtgaatatcagcggctctagctgcggcagccccaacagcgccgacaccagcagcgacttcaaggacctgtggaccaagctgaaggaatgccacgaccgggaagtgcagggactccaggtgaaggtcaccaaactcaagcaagaaagaatcctggacgcccagagactggaagaattcttcaccaagaaccagcagctgagagagcagcagaaagtgctgcacgagacaatcaaggttctggaagatagactgcgggccggcctgtgcgacagatgcgccgtgaccgaggaacacatgcgcaaaaagcagcaggagttcgagaacattagacagcaaaatctgaaattgatcacagagctgatgaacgagagaaacacactgcaggaggagaacaagaagctgagcgagcagctgcaacagaagatcgagaatgatcagcaacaccaggccgctgagctggaatgtgaagaggacgtgatccccgacagcccaatcacagctttcagcttttctggcgtgaacagactgaggcggaaggaaaacccccacgtgcggtacatcgagcagacccataccaagctggaacacagcgtgtgtgccaacgagatgagaaaggtgtccaagtcctccacccatccccagcacaaccctaacgaaaatgagatcctggtggctgatacctacgaccagtctcagagccctatggccaaggcccacggcaccagctcttatacccctgataagagctccttcaacctggccaccgtggtggccgagacactgggcctgggcgtgcaggaggaaagcgagacacagggcccaatgagccctctgggagatgagctgtaccactgcctggaaggcaaccacaagaaacagccttttgagtccggctccgagactcctggaacaagcgagagcgctacacctgagggcagccctaagagaaaggtgtccagcgccgagggcgctgccaaggaagagcctaaacggagaagcgccagactgagcgccaagccccccgccaaggtggaagccaagcctaagaaggccgccgctaaggacaagagcagcgataagaaagtccagaccaagggcaagcggggcgccaaaggcaaacaggccgaggtggccaaccaggagacaaaggaagatctgcctgctgagaacggcgaaaccaagaccgaggaatctccagcttctgacgaggccggagagaaggaggccaaaagcgacagcggctctgagacacctggaacaagcgagagcgccaccccggaatcctatgaacaacttgcaccacaaccgtgtgtgggagaaactttacattctagcctcccacgagacagtgaactgtttgtgcctgaagaggggagcagcgagaaggagagcgaggacgcgccaaaaacatctcctccgacgcctgggaaacatggtttggaacagactggggaggaaaaagtgatggtgactgttcctgacaaaaatccaccttgtccttgctgtggtacccgggtaaactctgtgttgaatctgattgaacatctgaaagtgtcacacgggaaaaggggggtttgttttcggtgtgcaaaatgtggaaaggaaaatagtaactatcacagtgttgtttgtcattttaagaaatgcaggggtccagagacggagaaagccccagctggggagtggatttgtgaggtatgcaacagagattttacaaccaaaattggcctgggacaacacaagagattggcacacccagcagtgagaaatcaggaaaggatcgttgcttcccaaccgaaagaaacatcaaatagaggtgctcacaaaaggtgctggacaaaggaggaggaagaattactaataagactggaggctcagttcgagggaaacaaaaatattaataagcttattgcagaacacataaccaccaaaacagctaagcagatcagtgacaaaaggcgattgctgtccagaaagccagcagaggagccacgtgaggagcctggaacgtgtcatcacaccaggagagcagctgcgagcctgagaacggagcctgagatgagtcatcacgcccaggcagaggacagagataatggacctgggagacgccctctgccaggcagggcagctgccggagggagaacaatggacgagataagacgccaccctgataagggcaacggacagcagagacccaccaagcaaaaatcagaagaacagctgcaggcttactataaaaagacactagaggaacgactttcagctggggcacttaacaccttcccccgagcattcaagcaggtaatggaaggccgggatataaagctagtaatcaatcagacagcgcaggactgcttcggatgcctggaatccataagccaaataagaacggcaacccgagataaaaaggacacggtgacccgggagaaacacccaaagaaaccttttcagaagtggatgaagaagagagcaatcaaaaaaggtaattatcttcggttccagcgtttattttatcttgatagagggaaactggctaaaatcattttagatgatattgaatgcttgtcttgtgacataccactcagtgaaatttattcggtttttaaaacaagatgggaaacaactggtagctttaaaagccttggggactttaaaacttacgggaaggctgacaacactgccttcagagaattaattacggctaaagaaattgagaaaaatgtgcaggaaatgagcaaaggctcggctcccggtccagacgggattactcttggggacgtcgtaaagatggatcccgagttttcccggaccatggagattttcaatttatggttaacaactggtaaaatcccggacatggtgagggggtgcagaaccgttttgattccaaaatcatcaaagccggatcgtttgaaagacattaataactggagacctatcacgatcggttccatcttgctgagactgttctccaggattgtaacagctaggctgagcaaagcgtgccccctgaacccaaggcaaagaggctttatcagagcggcgggatgctctgaaaacttaaaactcctgcaaactataatttggtcggccaaaagagaacacagaccactgggtgttgtattcgtggacatcgccaaggcttttgacaccgtaagccaccagcacatcattcatgctttgcagcaaagagaggtggatccccacatcgtcggtctggtgagcaatatgtacgagaacatcagtacgtatatcaccacaaagaggaacacacacacagacaaaatccagatccgggttggagtaaagcagggtgacccgatgtcgccccttttatttaacctggcaatggaccctctattatgcaagctggaagagagtggcaaaggataccaccgaggacagagcagcatcacagcgatggcaagagcagacgatctggttttgctgagcgactcctgggaaaatatgaatacaaatattagcatactggagaccttctgcaatctgaccggactcaaaacacaggggcaaaagtgccacggcttttacatcaagccgacaaagaagtcttacaccatcaatgactgcgctgcctggactatcaacggcacacccctgaacatgatcgaccccggcgaatctgagaaatacctcggcctgcagtttgacccgtggattggaatagcaaggtccggtctctccacaaaactagatttttggcttcagcggatcgatcaagcaccacttaaacctctgcagaaaactgatattctcaaaacatacaccatccctcggctgatctacatagctgaccactcagaagtgaaaagcgcactactcgaaacccttgaccagaagatccggacagcggtcaaggaatggcttcacctacctccgtgcacctgcgatgccatcctgtactcgagcacgagagacggcggtttgggcatcaccaaattggcaggactgatccccagcgtgcaggcccgtagactgcatcggatcgcacagtcatctgacgatacgatgaaatgcttcatggaaaaagagaaaatggaacagctgcataagaaattgtggattcaagctggaggggacagagagaacataccctcgatttgggaagcaccaccgtcgagtgaaccaccaaacaacgtgagcacaaattcggaatgggaagcaccgacccagaaagataaatttccaaagccttgcaattggaggaaaaacgaattcaaaaaatggaccaaattggcatcccaaggccgcggaattgtaaattttgaaagagacaaaattagtaaccattggatccaatactacagacgcatacctcacaggaaactcctcactgcactacaactcagggccaacgtttaccccacgagagaatttctagccaggggtagacaagaccaatacatcaaggcgtgtaggcactgcgatgcggacaacgaatcctgcgcccacatcatcggcaactgcccagtgacacaggacgcccgaatcaagaggcacaattacatctgcgaactgcttctcgaggaggcgaagaagaaggactgggtagtgttcaaggaaccgcacataagggattccaacaaggaactgtacaaacctgacctgatatttgtgaaggatgggcgtgcacttgtcgtggatgtgacagtacggtatgaagcagccaaatcatcgctggaggaagccgctgcagagaaagtgagaaagtacaaacacctggaaacggaagtaagacatctcacgaatgcaaaggacgttacttttgtgggctttcccctaggagcgcgggggaaatggcaccaagataactttaaacttttgactgagcttggcctctccaaatcgaggcaagtgaaaatggcagagactttttccacagtagcgctcttttcatctgtggacattgtacatatgtttgccagtagggccagaaaatctatggttatgtgataataggctgccttctgcggggcttgccttctggccatgcccttcttctctcccttgcacctgtacctcttggtctttgaataaagcctgagtaggaaggaccggtaaaaaaaaaaaaaaaaaaaaaaaaaaaaaaacgttgactaaaaaaaaaaaaaaaaaaaaaaaaaaaaaaaaaaaaaaaaaaaaaaaaaaaaaaaaaaaaaaaaaaaaaa

SEQ ID NO: 10853 - DNA, 5264 bp, synthetic construct
  source 1..5264: mol_type = other DNA
gaaataagagagaaaagaagagtaagaagaaatataagagaattcgccaccatggcccctaagaaaaagcggaaggtgaatatcagcggctctagctgcggcagccccaacagcgccgacaccagcagcgacttcaaggacctgtggaccaagctgaaggaatgccacgaccgggaagtgcagggactccaggtgaaggtcaccaaactcaagcaagaaagaatcctggacgcccagagactggaagaattcttcaccaagaaccagcagctgagagagcagcagaaagtgctgcacgagacaatcaaggttctggaagatagactgcgggccggcctgtgcgacagatgcgccgtgaccgaggaacacatgcgcaaaaagcagcaggagttcgagaacattagacagcaaaatctgaaattgatcacagagctgatgaacgagagaaacacactgcaggaggagaacaagaagctgagcgagcagctgcaacagaagatcgagaatgatcagcaacaccaggccgctgagctggaatgtgaagaggacgtgatccccgacagcccaatcacagctttcagcttttctggcgtgaacagactgaggcggaaggaaaacccccacgtgcggtacatcgagcagacccataccaagctggaacacagcgtgtgtgccaacgagatgagaaaggtgtccaagtcctccacccatccccagcacaaccctaacgaaaatgagatcctggtggctgatacctacgaccagtctcagagccctatggccaaggcccacggcaccagctcttatacccctgataagagctccttcaacctggccaccgtggtggccgagacactgggcctgggcgtgcaggaggaaagcgagacacagggcccaatgagccctctgggagatgagctgtaccactgcctggaaggcaaccacaagaaacagccttttgagtccggctccgagactcctggaacaagcgagagcgctacacctgagggcagccctaagagaaaggtgtccagcgccgagggcgctgccaaggaagagcctaaacggagaagcgccagactgagcgccaagccccccgccaaggtggaagccaagcctaagaaggccgccgctaaggacaagagcagcgataagaaagtccagaccaagggcaagcggggcgccaaaggcaaacaggccgaggtggccaaccaggagacaaaggaagatctgcctgctgagaacggcgaaaccaagaccgaggaatctccagcttctgacgaggccggagagaaggaggccaaaagcgacagcggctctgagacacctggaacaagcgagagcgccaccccggaatcctatgaacaacttgcaccacaaccgtgtgtgggagaaactttacattctagcctcccacgagacagtgaactgtttgtgcctgaagaggggagcagcgagaaggagagcgaggacgcgccaaaaacatctcctccgacgcctgggaaacatggtttggaacagactggggaggaaaaagtgatggtgactgttcctgacaaaaatccaccttgtccttgctgtggtacccgggtaaactctgtgttgaatctgattgaacatctgaaagtgtcacacgggaaaaggggggtttgttttcggtgtgcaaaatgtggaaaggaaaatagtaactatcacagtgttgtttgtcattttaagaaatgcaggggtccagagacggagaaagccccagctggggagtggatttgtgaggtatgcaacagagattttacaaccaaaattggcctgggacaacacaagagattggcacacccagcagtgagaaatcaggaaaggatcgttgcttcccaaccgaaagaaacatcaaatagaggtgctcacaaaaggtgctggacaaaggaggaggaagaattactaataagactggaggctcagttcgagggaaacaaaaatattaataagcttattgcagaacacataaccaccaaaacagctaagcagatcagtgacaaaaggcgattgctgtccagaaagccagcagaggagccacgtgaggagcctggaacgtgtcatcacaccaggagagcagctgcgagcctgagaacggagcctgagatgagtcatcacgcccaggcagaggacagagataatggacctgggagacgccctctgccaggcagggcagctgccggagggagaacaatggacgagataagacgccaccctgataagggcaacggacagcagagacccaccaagcaaaaatcagaagaacagctgcaggcttactataaaaagacactagaggaacgactttcagctggggcacttaacaccttcccccgagcattcaagcaggtaatggaaggccgggatataaagctagtaatcaatcagacagcgcaggactgcttcggatgcctggaatccataagccaaataagaacggcaacccgagataaaaaggacacggtgacccgggagaaacacccaaagaaaccttttcagaagtggatgaagaagagagcaatcaaaaaaggtaattatcttcggttccagcgtttattttatcttgatagagggaaactggctaaaatcattttagatgatattgaatgcttgtcttgtgacataccactcagtgaaatttattcggtttttaaaacaagatgggaaacaactggtagctttaaaagccttggggactttaaaacttacgggaaggctgacaacactgccttcagagaattaattacggctaaagaaattgagaaaaatgtgcaggaaatgagcaaaggctcggctcccggtccagacgggattactcttggggacgtcgtaaagatggatcccgagttttcccggaccatggagattttcaatttatggttaacaactggtaaaatcccggacatggtgagggggtgcagaaccgttttgattccaaaatcatcaaagccggatcgtttgaaagacattaataactggagacctatcacgatcggttccatcttgctgagactgttctccaggattgtaaaggctaggctgagcaaagcgtgccccctgaacccaaggcaaagaggctttatcagagcggcgggatgctctgaaaacttaaaactcctgcaaactataatttggtcggccaaaagagaacacagaccactgggtgttgtattcgtggacatcgccaaggcttttgacaccgtaagccaccagcacatcattcatgctttgcagcaaagagaggtggatccccacatcgtcggtctggtgagcaatatgtacgagaacatcagtacgtatatcaccacaaagaggaacacacacacagacaaaatccagatccgggttggagtaaagcagggtgacccgatgtcgccccttttatttaacctggcaatggaccctctattatgcaagctggaagagagtggcaaaggataccaccgaggacagagcagcatcacagcgatggcatttgcagacgatctggttttgctgagcgactcctgggaaaatatgaatacaaatattagcatactggagaccttctgcaatctgaccggactcaaaacacaggggcaaaagtgccacggcttttacatcaagccgacaaagaagtcttacaccatcaatgactgcgctgcctggactatcaacggcacacccctgaacatgatcgaccccggcgaatctgagaaatacctcggcctgcagtttgacccgtggattggaatagcaaggtccggtctctccacaaaactagatttttggcttcagcggatcgatcaagcaccacttaaacctctgcagaaaactgatattctcaaaacatacaccatccctcggctgatctacatagctgaccactcagaagtgaaaagcgcactactcgaaacccttgaccagaagatccggacagcggtcaaggaatggcttcacctacctccgtgcacctgcgatgccatcctgtactcgagcacgagagacggcggtttgggcatcaccaaattggcaggactgatccccagcgtgcaggcccgtagactgcatcggatcgcacagtcatctgacgatacgatgaaatgcttcatggaaaaagagaaaatggaacagctgcataagaaattgtggattcaagctggaggggacagagagaacataccctcgatttgggaagcaccaccgtcgagtgaaccaccaaacaacgtgagcacaaattcggaatgggaagcaccgacccagaaagataaatttccaaagccttgcaattggaggaaaaacgaattcaaaaaatggaccaaattggcatcccaaggccgcggaattgtaaattttgaaagagacaaaattagtaaccattggatccaatactacagacgcatacctcacaggaaactcctcactgcactacaactcagggccaacgtttaccccacgagagaatttctagccaggggtagacaagaccaatacatcaaggcgtgtaggcactgcgatgcggacaacgaatcctgcgcccacatcatcggcaactgcccagtgacacaggacgcccgaatcaagaggcacaattacatctgcgaactgcttctcgaggaggcgaagaagaaggactgggtagtgttcaaggaaccgcacataagggattccaacaaggaactgtacaaacctgacctgatatttgtgaaggatgggcgtgcacttgtcgtggatgtgacagtacggtatgaagcagccaaatcatcgctggaggaagccgctgcagagaaagtgagaaagtacaaacacctggaaacggaagtaagacatctcacgaatgcaaaggacgttacttttgtgggctttcccctaggagcgcgggggaaatggcaccaagataactttaaacttttgactgagcttggcctctccaaatcgaggcaagtgaaaatggcagagactttttccacagtagcgctcttttcatctgtggacattgtacatatgtttgccagtagggccagaaaatctatggttatgtgataataggctgccttctgcggggcttgccttctggccatgcccttcttctctcccttgcacctgtacctcttggtctttgaataaagcctgagtaggaaggaccggtaaaaaaaaaaaaaaaaaaaaaaaaaaaaaaacgttgactaaaaaaaaaaaaaaaaaaaaaaaaaaaaaaaaaaaaaaaaaaaaaaaaaaaaaaaaaaaaaaaaaaaaaa

SEQ ID NO: 10854 - DNA, 5264 bp, synthetic construct
  source 1..5264: mol_type = other DNA
gaaataagagagaaaagaagagtaagaagaaatataagagaattcgccaccatggcccctaagaaaaagcggaaggtgaatatcagcggctctagctgcggcagccccaacagcgccgacaccagcagcgacttcaaggacctgtggaccaagctgaaggaatgccacgaccgggaagtgcagggactccaggtgaaggtcaccaaactcaagcaagaaagaatcctggacgcccagagactggaagaattcttcaccaagaaccagcagctgagagagcagcagaaagtgctgcacgagacaatcaaggttctggaagatagactgcgggccggcctgtgcgacagatgcgccgtgaccgaggaacacatgcgcaaaaagcagcaggagttcgagaacattagacagcaaaatctgaaattgatcacagagctgatgaacgagagaaacacactgcaggaggagaacaagaagctgagcgagcagctgcaacagaagatcgagaatgatcagcaacaccaggccgctgagctggaatgtgaagaggacgtgatccccgacagcccaatcacagctttcagcttttctggcgtgaacagactgaggcggaaggaaaacccccacgtgcggtacatcgagcagacccataccaagctggaacacagcgtgtgtgccaacgagatgagaaaggtgtccaagtcctccacccatccccagcacaaccctaacgaaaatgagatcctggtggctgatacctacgaccagtctcagagccctatggccaaggcccacggcaccagctcttatacccctgataagagctccttcaacctggccaccgtggtggccgagacactgggcctgggcgtgcaggaggaaagcgagacacagggcccaatgagccctctgggagatgagctgtaccactgcctggaaggcaaccacaagaaacagccttttgagtccggctccgagactcctggaacaagcgagagcgctacacctgagggcagccctaagagaaaggtgtccagcgccgagggcgctgccaaggaagagcctaaacggagaagcgccagactgagcgccaagccccccgccaaggtggaagccaagcctaagaaggccgccgctaaggacaagagcagcgataagaaagtccagaccaagggcaagcggggcgccaaaggcaaacaggccgaggtggccaaccaggagacaaaggaagatctgcctgctgagaacggcgaaaccaagaccgaggaatctccagcttctgacgaggccggagagaaggaggccaaaagcgacagcggctctgagacacctggaacaagcgagagcgccaccccggaatcctatgaacaacttgcaccacaaccgtgtgtgggagaaactttacattctagcctcccacgagacagtgaactgtttgtgcctgaagaggggagcagcgagaaggagagcgaggacgcgccaaaaacatctcctccgacgcctgggaaacatggtttggaacagactggggaggaaaaagtgatggtgactgttcctgacaaaaatccaccttgtccttgctgtggtacccgggtaaactctgtgttgaatctgattgaacatctgaaagtgtcacacgggaaaaggggggtttgttttcggtgtgcaaaatgtggaaaggaaaatagtaactatcacagtgttgtttgtcattttaagaaatgcaggggtccagagacggagaaagccccagctggggagtggatttgtgaggtatgcaacagagattttacaaccaaaattggcctgggacaacacaagagattggcacacccagcagtgagaaatcaggaaaggatcgttgcttcccaaccgaaagaaacatcaaatagaggtgctcacaaaaggtgctggacaaaggaggaggaagaattactaataagactggaggctcagttcgagggaaacaaaaatattaataagcttattgcagaacacataaccaccaaaacagctaagcagatcagtgacaaaaggcgattgctgtccagaaagccagcagaggagccacgtgaggagcctggaacgtgtcatcacaccaggagagcagctgcgagcctgagaacggagcctgagatgagtcatcacgcccaggcagaggacagagataatggacctgggagacgccctctgccaggcagggcagctgccggagggagaacaatggacgagataagacgccaccctgataagggcaacggacagcagagacccaccaagcaaaaatcagaagaacagctgcaggcttactataaaaagacactagaggaacgactttcagctggggcacttaacaccttcccccgagcattcaagcaggtaatggaaggccgggatataaagctagtaatcaatcagacagcgcaggactgcttcggatgcctggaatccataagccaaataagaacggcaacccgagataaaaaggacacggtgacccgggagaaacacccaaagaaaccttttcagaagtggatgaagaagagagcaatcaaaaaaggtaattatcttcggttccagcgtttattttatcttgatagagggaaactggctaaaatcattttagatgatattgaatgcttgtcttgtgacataccactcagtgaaatttattcggtttttaaaacaagatgggaaacaactggtagctttaaaagccttggggactttaaaacttacgggaaggctgacaacactgccttcagagaattaattacggctaaagaaattgagaaaaatgtgcaggaaatgagcaaaggctcggctcccggtccagacgggattactcttggggacgtcgtaaagatggatcccgagttttcccggaccatggagattttcaatttatggttaacaactggtaaaatcccggacatggtgagggggtgcagaaccgttttgattccaaaatcatcaaagccggatcgtttgaaagacattaataactggagacctatcacgatcggttccatcttgctgagactgttctccaggattgtaacagctaggctgagcaaagcgtgccccctgaacccaaggcaaagaggctttatcagagcggcgggatgctctgaaaacttaaaactcctgcaaactataatttggtcggccaaaagagaacacagaccactgggtgttgtattcgtggacatcgccaaggcttttgacaccgtaagccaccagcacatcattcatgctttgcagcaaagagaggtggatccccacatcgtcggtctggtgagcaatatgtacgagaacatcagtacgtatatcaccacaaagaggaacacacacacagacaaaatccagatccgggttggagtaaagcagggtgacccgatgtcgccccttttatttaacctggcaatggaccctctattatgcaagctggaagagagtggcaaaggataccaccgaggacagagcagcatcacagcgatggcatttgcagacgatctggttttgctgagcgactcctgggaaaatatgaatacaaatattagcatactggagaccttctgcaatctgaccggactcaaaacacaggggcaaaagtgccacggcttttacatcaagccgacaaagaagtcttacaccatcaatgactgcgctgcctggactatcaacggcacacccctgaacatgatcgaccccggcgaatctgagaaatacctcggcctgcagtttgacccgtggattggaatagcaaggtccggtctctccacaaaactagatttttggcttcagcggatcgatcaagcaccacttaaacctctgcagaaaactgatattctcaaaacatacaccatccctcggctgatctacatagctgaccactcagaagtgaaaagcgcactactcgaaacccttgaccagaagatccggacagcggtcaaggaatggcttcacctacctccgtgcacctgcgatgccatcctgtactcgagcacgagagacggcggtttgggcatcaccaaattggcaggactgatccccagcgtgcaggcccgtagactgcatcggatcgcacagtcatctgacgatacgatgaaatgcttcatggaaaaagagaaaatggaacagctgcataagaaattgtggattcaagctggaggggacagagagaacataccctcgatttgggaagcaccaccgtcgagtgaaaagccaaacaacgtgagcacaaattcggaatgggaagcaccgacccagaaagataaatttccaaagccttgcaattggaggaaaaacgaattcaaaaaatggaccaaattggcatcccaaggccgcggaattgtaaattttgaaagagacaaaattagtaaccattggatccaatactacagacgcatacctcacaggaaactcctcactgcactacaactcagggccaacgtttaccccacgagagaatttctagccaggggtagacaagaccaatacatcaaggcgtgtaggcactgcgatgcggacaacgaatcctgcgcccacatcatcggcaactgcccagtgacacaggacgcccgaatcaagaggcacaattacatctgcgaactgcttctcgaggaggcgaagaagaaggactgggtagtgttcaaggaaccgcacataagggattccaacaaggaactgtacaaacctgacctgatatttgtgaaggatgggcgtgcacttgtcgtggatgtgacagtacggtatgaagcagccaaatcatcgctggaggaagccgctgcagagaaagtgagaaagtacaaacacctggaaacggaagtaagacatctcacgaatgcaaaggacgttacttttgtgggctttcccctaggagcgcgggggaaatggcaccaagataactttaaacttttgactgagcttggcctctccaaatcgaggcaagtgaaaatggcagagactttttccacagtagcgctcttttcatctgtggacattgtacatatgtttgccagtagggccagaaaatctatggttatgtgataataggctgccttctgcggggcttgccttctggccatgcccttcttctctcccttgcacctgtacctcttggtctttgaataaagcctgagtaggaaggaccggtaaaaaaaaaaaaaaaaaaaaaaaaaaaaaaacgttgactaaaaaaaaaaaaaaaaaaaaaaaaaaaaaaaaaaaaaaaaaaaaaaaaaaaaaaaaaaaaaaaaaaaaaa

SEQ ID NO: 10855 - DNA, 5264 bp, synthetic construct
  source 1..5264: mol_type = other DNA
gaaataagagagaaaagaagagtaagaagaaatataagagaattcgccaccatggcccctaagaaaaagcggaaggtgaatatcagcggctctagctgcggcagccccaacagcgccgacaccagcagcgacttcaaggacctgtggaccaagctgaaggaatgccacgaccgggaagtgcagggactccaggtgaaggtcaccaaactcaagcaagaaagaatcctggacgcccagagactggaagaattcttcaccaagaaccagcagctgagagagcagcagaaagtgctgcacgagacaatcaaggttctggaagatagactgcgggccggcctgtgcgacagatgcgccgtgaccgaggaacacatgcgcaaaaagcagcaggagttcgagaacattagacagcaaaatctgaaattgatcacagagctgatgaacgagagaaacacactgcaggaggagaacaagaagctgagcgagcagctgcaacagaagatcgagaatgatcagcaacaccaggccgctgagctggaatgtgaagaggacgtgatccccgacagcccaatcacagctttcagcttttctggcgtgaacagactgaggcggaaggaaaacccccacgtgcggtacatcgagcagacccataccaagctggaacacagcgtgtgtgccaacgagatgagaaaggtgtccaagtcctccacccatccccagcacaaccctaacgaaaatgagatcctggtggctgatacctacgaccagtctcagagccctatggccaaggcccacggcaccagctcttatacccctgataagagctccttcaacctggccaccgtggtggccgagacactgggcctgggcgtgcaggaggaaagcgagacacagggcccaatgagccctctgggagatgagctgtaccactgcctggaaggcaaccacaagaaacagccttttgagtccggctccgagactcctggaacaagcgagagcgctacacctgagggcagccctaagagaaaggtgtccagcgccgagggcgctgccaaggaagagcctaaacggagaagcgccagactgagcgccaagccccccgccaaggtggaagccaagcctaagaaggccgccgctaaggacaagagcagcgataagaaagtccagaccaagggcaagcggggcgccaaaggcaaacaggccgaggtggccaaccaggagacaaaggaagatctgcctgctgagaacggcgaaaccaagaccgaggaatctccagcttctgacgaggccggagagaaggaggccaaaagcgacagcggctctgagacacctggaacaagcgagagcgccaccccggaatcctatgaacaacttgcaccacaaccgtgtgtgggagaaactttacattctagcctcccacgagacagtgaactgtttgtgcctgaagaggggagcagcgagaaggagagcgaggacgcgccaaaaacatctcctccgacgcctgggaaacatggtttggaacagactggggaggaaaaagtgatggtgactgttcctgacaaaaatccaccttgtccttgctgtggtacccgggtaaactctgtgaagaatctgattgaacatctgaaagtgtcacacgggaaaaggggggtttgttttcggtgtgcaaaatgtggaaaggaaaatagtaactatcacagtgttgtttgtcattttaagaaatgcaggggtccagagacggagaaagccccagctggggagtggatttgtgaggtatgcaacagagattttacaaccaaaattggcctgggacaacacaagagattggcacacccagcagtgagaaatcaggaaaggatcgttgcttcccaaccgaaagaaacatcaaatagaggtgctcacaaaaggtgctggacaaaggaggaggaagaattactaataagactggaggctcagttcgagggaaacaaaaatattaataagcttattgcagaacacataaccaccaaaacagctaagcagatcagtgacaaaaggcgattgctgtccagaaagccagcagaggagccacgtgaggagcctggaacgtgtcatcacaccaggagagcagctgcgagcctgagaacggagcctgagatgagtcatcacgcccaggcagaggacagagataatggacctgggagacgccctctgccaggcagggcagctgccggagggagaacaatggacgagataagacgccaccctgataagggcaacggacagcagagacccaccaagcaaaaatcagaagaacagctgcaggcttactataaaaagacactagaggaacgactttcagctggggcacttaacaccttcccccgagcattcaagcaggtaatggaaggccgggatataaagctagtaatcaatcagacagcgcaggactgcttcggatgcctggaatccataagccaaataagaacggcaacccgagataaaaaggacacggtgacccgggagaaacacccaaagaaaccttttcagaagtggatgaagaagagagcaatcaaaaaaggtaattatcttcggttccagcgtttattttatcttgatagagggaaactggctaaaatcattttagatgatattgaatgcttgtcttgtgacataccactcagtgaaatttattcggtttttaaaacaagatgggaaacaactggtagctttaaaagccttggggactttaaaacttacgggaaggctgacaacactgccttcagagaattaattacggctaaagaaattgagaaaaatgtgcaggaaatgagcaaaggctcggctcccggtccagacgggattactcttggggacgtcgtaaagatggatcccgagttttcccggaccatggagattttcaatttatggttaacaactggtaaaatcccggacatggtgagggggtgcagaaccgttttgattccaaaatcatcaaagccggatcgtttgaaagacattaataactggagacctatcacgatcggttccatcttgctgagactgttctccaggattgtaacagctaggctgagcaaagcgtgccccctgaacccaaggcaaagaggctttatcagagcggcgggatgctctgaaaacttaaaactcctgcaaactataatttggtcggccaaaagagaacacagaccactgggtgttgtattcgtggacatcgccaaggcttttgacaccgtaagccaccagcacatcattcatgctttgcagcaaagagaggtggatccccacatcgtcggtctggtgagcaatatgtacgagaacatcagtacgtatatcaccacaaagaggaacacacacacagacaaaatccagatccgggttggagtaaagcagggtgacccgatgtcgccccttttatttaacctggcaatggaccctctattatgcaagctggaagagagtggcaaaggataccaccgaggacagagcagcatcacagcgatggcatttgcagacgatctggttttgctgagcgactcctgggaaaatatgaatacaaatattagcatactggagaccttctgcaatctgaccggactcaaaacacaggggcaaaagtgccacggcttttacatcaagccgacaaagaagtcttacaccatcaatgactgcgctgcctggactatcaacggcacacccctgaacatgatcgaccccggcgaatctgagaaatacctcggcctgcagtttgacccgtggattggaatagcaaggtccggtctctccacaaaactagatttttggcttcagcggatcgatcaagcaccacttaaacctctgcagaaaactgatattctcaaaacatacaccatccctcggctgatctacatagctgaccactcagaagtgaaaagcgcactactcgaaacccttgaccagaagatccggacagcggtcaaggaatggcttcacctacctccgtgcacctgcgatgccatcctgtactcgagcacgagagacggcggtttgggcatcaccaaattggcaggactgatccccagcgtgcaggcccgtagactgcatcggatcgcacagtcatctgacgatacgatgaaatgcttcatggaaaaagagaaaatggaacagctgcataagaaattgtggattcaagctggaggggacagagagaacataccctcgatttgggaagcaccaccgtcgagtgaaccaccaaacaacgtgagcacaaattcggaatgggaagcaccgacccagaaagataaatttccaaagccttgcaattggaggaaaaacgaattcaaaaaatggaccaaattggcatcccaaggccgcggaattgtaaattttgaaagagacaaaattagtaaccattggatccaatactacagacgcatacctcacaggaaactcctcactgcactacaactcagggccaacgtttaccccacgagagaatttctagccaggggtagacaagaccaatacatcaaggcgtgtaggcactgcgatgcggacaacgaatcctgcgcccacatcatcggcaactgcccagtgacacaggacgcccgaatcaagaggcacaattacatctgcgaactgcttctcgaggaggcgaagaagaaggactgggtagtgttcaaggaaccgcacataagggattccaacaaggaactgtacaaacctgacctgatatttgtgaaggatgggcgtgcacttgtcgtggatgtgacagtacggtatgaagcagccaaatcatcgctggaggaagccgctgcagagaaagtgagaaagtacaaacacctggaaacggaagtaagacatctcacgaatgcaaaggacgttacttttgtgggctttcccctaggagcgcgggggaaatggcaccaagataactttaaacttttgactgagcttggcctctccaaatcgaggcaagtgaaaatggcagagactttttccacagtagcgctcttttcatctgtggacattgtacatatgtttgccagtagggccagaaaatctatggttatgtgataataggctgccttctgcggggcttgccttctggccatgcccttcttctctcccttgcacctgtacctcttggtctttgaataaagcctgagtaggaaggaccggtaaaaaaaaaaaaaaaaaaaaaaaaaaaaaaacgttgactaaaaaaaaaaaaaaaaaaaaaaaaaaaaaaaaaaaaaaaaaaaaaaaaaaaaaaaaaaaaaaaaaaaaaa

SEQ ID NO: 10856 - DNA, 5264 bp, synthetic construct
  source 1..5264: mol_type = other DNA
gaaataagagagaaaagaagagtaagaagaaatataagagaattcgccaccatggcccctaagaaaaagcggaaggtgaatatcagcggctctagctgcggcagccccaacagcgccgacaccagcagcgacttcaaggacctgtggaccaagctgaaggaatgccacgaccgggaagtgcagggactccaggtgaaggtcaccaaactcaagcaagaaagaatcctggacgcccagagactggaagaattcttcaccaagaaccagcagctgagagagcagcagaaagtgctgcacgagacaatcaaggttctggaagatagactgcgggccggcctgtgcgacagatgcgccgtgaccgaggaacacatgcgcaaaaagcagcaggagttcgagaacattagacagcaaaatctgaaattgatcacagagctgatgaacgagagaaacacactgcaggaggagaacaagaagctgagcgagcagctgcaacagaagatcgagaatgatcagcaacaccaggccgctgagctggaatgtgaagaggacgtgatccccgacagcccaatcacagctttcagcttttctggcgtgaacagactgaggcggaaggaaaacccccacgtgcggtacatcgagcagacccataccaagctggaacacagcgtgtgtgccaacgagatgagaaaggtgtccaagtcctccacccatccccagcacaaccctaacgaaaatgagatcctggtggctgatacctacgaccagtctcagagccctatggccaaggcccacggcaccagctcttatacccctgataagagctccttcaacctggccaccgtggtggccgagacactgggcctgggcgtgcaggaggaaagcgagacacagggcccaatgagccctctgggagatgagctgtaccactgcctggaaggcaaccacaagaaacagccttttgagtccggctccgagactcctggaacaagcgagagcgctacacctgagggcagccctaagagaaaggtgtccagcgccgagggcgctgccaaggaagagcctaaacggagaagcgccagactgagcgccaagccccccgccaaggtggaagccaagcctaagaaggccgccgctaaggacaagagcagcgataagaaagtccagaccaagggcaagcggggcgccaaaggcaaacaggccgaggtggccaaccaggagacaaaggaagatctgcctgctgagaacggcgaaaccaagaccgaggaatctccagcttctgacgaggccggagagaaggaggccaaaagcgacagcggctctgagacacctggaacaagcgagagcgccaccccggaatcctatgaacaacttgcaccacaaccgtgtgtgggagaaactttacattctagcctcccacgagacagtgaactgtttgtgcctgaagaggggagcagcgagaaggagagcgaggacgcgccaaaaacatctcctccgacgcctgggaaacatggtttggaacagactggggaggaaaaagtgatggtgactgttcctgacaaaaatccaccttgtccttgctgtggtacccgggtaaactctgtgttgaatctgattaagcatctgaaagtgtcacacgggaaaaggggggtttgttttcggtgtgcaaaatgtggaaaggaaaatagtaactatcacagtgttgtttgtcattttaagaaatgcaggggtccagagacggagaaagccccagctggggagtggatttgtgaggtatgcaacagagattttacaaccaaaattggcctgggacaacacaagagattggcacacccagcagtgagaaatcaggaaaggatcgttgcttcccaaccgaaagaaacatcaaatagaggtgctcacaaaaggtgctggacaaaggaggaggaagaattactaataagactggaggctcagttcgagggaaacaaaaatattaataagcttattgcagaacacataaccaccaaaacagctaagcagatcagtgacaaaaggcgattgctgtccagaaagccagcagaggagccacgtgaggagcctggaacgtgtcatcacaccaggagagcagctgcgagcctgagaacggagcctgagatgagtcatcacgcccaggcagaggacagagataatggacctgggagacgccctctgccaggcagggcagctgccggagggagaacaatggacgagataagacgccaccctgataagggcaacggacagcagagacccaccaagcaaaaatcagaagaacagctgcaggcttactataaaaagacactagaggaacgactttcagctggggcacttaacaccttcccccgagcattcaagcaggtaatggaaggccgggatataaagctagtaatcaatcagacagcgcaggactgcttcggatgcctggaatccataagccaaataagaacggcaacccgagataaaaaggacacggtgacccgggagaaacacccaaagaaaccttttcagaagtggatgaagaagagagcaatcaaaaaaggtaattatcttcggttccagcgtttattttatcttgatagagggaaactggctaaaatcattttagatgatattgaatgcttgtcttgtgacataccactcagtgaaatttattcggtttttaaaacaagatgggaaacaactggtagctttaaaagccttggggactttaaaacttacgggaaggctgacaacactgccttcagagaattaattacggctaaagaaattgagaaaaatgtgcaggaaatgagcaaaggctcggctcccggtccagacgggattactcttggggacgtcgtaaagatggatcccgagttttcccggaccatggagattttcaatttatggttaacaactggtaaaatcccggacatggtgagggggtgcagaaccgttttgattccaaaatcatcaaagccggatcgtttgaaagacattaataactggagacctatcacgatcggttccatcttgctgagactgttctccaggattgtaacagctaggctgagcaaagcgtgccccctgaacccaaggcaaagaggctttatcagagcggcgggatgctctgaaaacttaaaactcctgcaaactataatttggtcggccaaaagagaacacagaccactgggtgttgtattcgtggacatcgccaaggcttttgacaccgtaagccaccagcacatcattcatgctttgcagcaaagagaggtggatccccacatcgtcggtctggtgagcaatatgtacgagaacatcagtacgtatatcaccacaaagaggaacacacacacagacaaaatccagatccgggttggagtaaagcagggtgacccgatgtcgccccttttatttaacctggcaatggaccctctattatgcaagctggaagagagtggcaaaggataccaccgaggacagagcagcatcacagcgatggcatttgcagacgatctggttttgctgagcgactcctgggaaaatatgaatacaaatattagcatactggagaccttctgcaatctgaccggactcaaaacacaggggcaaaagtgccacggcttttacatcaagccgacaaagaagtcttacaccatcaatgactgcgctgcctggactatcaacggcacacccctgaacatgatcgaccccggcgaatctgagaaatacctcggcctgcagtttgacccgtggattggaatagcaaggtccggtctctccacaaaactagatttttggcttcagcggatcgatcaagcaccacttaaacctctgcagaaaactgatattctcaaaacatacaccatccctcggctgatctacatagctgaccactcagaagtgaaaagcgcactactcgaaacccttgaccagaagatccggacagcggtcaaggaatggcttcacctacctccgtgcacctgcgatgccatcctgtactcgagcacgagagacggcggtttgggcatcaccaaattggcaggactgatccccagcgtgcaggcccgtagactgcatcggatcgcacagtcatctgacgatacgatgaaatgcttcatggaaaaagagaaaatggaacagctgcataagaaattgtggattcaagctggaggggacagagagaacataccctcgatttgggaagcaccaccgtcgagtgaaccaccaaacaacgtgagcacaaattcggaatgggaagcaccgacccagaaagataaatttccaaagccttgcaattggaggaaaaacgaattcaaaaaatggaccaaattggcatcccaaggccgcggaattgtaaattttgaaagagacaaaattagtaaccattggatccaatactacagacgcatacctcacaggaaactcctcactgcactacaactcagggccaacgtttaccccacgagagaatttctagccaggggtagacaagaccaatacatcaaggcgtgtaggcactgcgatgcggacaacgaatcctgcgcccacatcatcggcaactgcccagtgacacaggacgcccgaatcaagaggcacaattacatctgcgaactgcttctcgaggaggcgaagaagaaggactgggtagtgttcaaggaaccgcacataagggattccaacaaggaactgtacaaacctgacctgatatttgtgaaggatgggcgtgcacttgtcgtggatgtgacagtacggtatgaagcagccaaatcatcgctggaggaagccgctgcagagaaagtgagaaagtacaaacacctggaaacggaagtaagacatctcacgaatgcaaaggacgttacttttgtgggctttcccctaggagcgcgggggaaatggcaccaagataactttaaacttttgactgagcttggcctctccaaatcgaggcaagtgaaaatggcagagactttttccacagtagcgctcttttcatctgtggacattgtacatatgtttgccagtagggccagaaaatctatggttatgtgataataggctgccttctgcggggcttgccttctggccatgcccttcttctctcccttgcacctgtacctcttggtctttgaataaagcctgagtaggaaggaccggtaaaaaaaaaaaaaaaaaaaaaaaaaaaaaaacgttgactaaaaaaaaaaaaaaaaaaaaaaaaaaaaaaaaaaaaaaaaaaaaaaaaaaaaaaaaaaaaaaaaaaaaaa

SEQ ID NO: 10857 - DNA, 5264 bp, synthetic construct
  source 1..5264: mol_type = other DNA
gaaataagagagaaaagaagagtaagaagaaatataagagaattcgccaccatggcccctaagaaaaagcggaaggtgaatatcagcggctctagctgcggcagccccaacagcgccgacaccagcagcgacttcaaggacctgtggaccaagctgaaggaatgccacgaccgggaagtgcagggactccaggtgaaggtcaccaaactcaagcaagaaagaatcctggacgcccagagactggaagaattcttcaccaagaaccagcagctgagagagcagcagaaagtgctgcacgagacaatcaaggttctggaagatagactgcgggccggcctgtgcgacagatgcgccgtgaccgaggaacacatgcgcaaaaagcagcaggagttcgagaacattagacagcaaaatctgaaattgatcacagagctgatgaacgagagaaacacactgcaggaggagaacaagaagctgagcgagcagctgcaacagaagatcgagaatgatcagcaacaccaggccgctgagctggaatgtgaagaggacgtgatccccgacagcccaatcacagctttcagcttttctggcgtgaacagactgaggcggaaggaaaacccccacgtgcggtacatcgagcagacccataccaagctggaacacagcgtgtgtgccaacgagatgagaaaggtgtccaagtcctccacccatccccagcacaaccctaacgaaaatgagatcctggtggctgatacctacgaccagtctcagagccctatggccaaggcccacggcaccagctcttatacccctgataagagctccttcaacctggccaccgtggtggccgagacactgggcctgggcgtgcaggaggaaagcgagacacagggcccaatgagccctctgggagatgagctgtaccactgcctggaaggcaaccacaagaaacagccttttgagtccggctccgagactcctggaacaagcgagagcgctacacctgagggcagccctaagagaaaggtgtccagcgccgagggcgctgccaaggaagagcctaaacggagaagcgccagactgagcgccaagccccccgccaaggtggaagccaagcctaagaaggccgccgctaaggacaagagcagcgataagaaagtccagaccaagggcaagcggggcgccaaaggcaaacaggccgaggtggccaaccaggagacaaaggaagatctgcctgctgagaacggcgaaaccaagaccgaggaatctccagcttctgacgaggccggagagaaggaggccaaaagcgacagcggctctgagacacctggaacaagcgagagcgccaccccggaatcctatgaacaacttgcaccacaaccgtgtgtgggagaaactttacattctagcctcccacgagacagtgaactgtttgtgcctgaagaggggagcagcgagaaggagagcgaggacgcgccaaaaacatctcctccgacgcctgggaaacatggtttggaacagactggggaggaaaaagtgatggtgactgttcctgacaaaaatccaccttgtccttgctgtggtacccgggtaaactctgtgttgaatctgattgaacatttcaaagtgtcacacgggaaaaggggggtttgttttcggtgtgcaaaatgtggaaaggaaaatagtaactatcacagtgttgtttgtcattttaagaaatgcaggggtccagagacggagaaagccccagctggggagtggatttgtgaggtatgcaacagagattttacaaccaaaattggcctgggacaacacaagagattggcacacccagcagtgagaaatcaggaaaggatcgttgcttcccaaccgaaagaaacatcaaatagaggtgctcacaaaaggtgctggacaaaggaggaggaagaattactaataagactggaggctcagttcgagggaaacaaaaatattaataagcttattgcagaacacataaccaccaaaacagctaagcagatcagtgacaaaaggcgattgctgtccagaaagccagcagaggagccacgtgaggagcctggaacgtgtcatcacaccaggagagcagctgcgagcctgagaacggagcctgagatgagtcatcacgcccaggcagaggacagagataatggacctgggagacgccctctgccaggcagggcagctgccggagggagaacaatggacgagataagacgccaccctgataagggcaacggacagcagagacccaccaagcaaaaatcagaagaacagctgcaggcttactataaaaagacactagaggaacgactttcagctggggcacttaacaccttcccccgagcattcaagcaggtaatggaaggccgggatataaagctagtaatcaatcagacagcgcaggactgcttcggatgcctggaatccataagccaaataagaacggcaacccgagataaaaaggacacggtgacccgggagaaacacccaaagaaaccttttcagaagtggatgaagaagagagcaatcaaaaaaggtaattatcttcggttccagcgtttattttatcttgatagagggaaactggctaaaatcattttagatgatattgaatgcttgtcttgtgacataccactcagtgaaatttattcggtttttaaaacaagatgggaaacaactggtagctttaaaagccttggggactttaaaacttacgggaaggctgacaacactgccttcagagaattaattacggctaaagaaattgagaaaaatgtgcaggaaatgagcaaaggctcggctcccggtccagacgggattactcttggggacgtcgtaaagatggatcccgagttttcccggaccatggagattttcaatttatggttaacaactggtaaaatcccggacatggtgagggggtgcagaaccgttttgattccaaaatcatcaaagccggatcgtttgaaagacattaataactggagacctatcacgatcggttccatcttgctgagactgttctccaggattgtaacagctaggctgagcaaagcgtgccccctgaacccaaggcaaagaggctttatcagagcggcgggatgctctgaaaacttaaaactcctgcaaactataatttggtcggccaaaagagaacacagaccactgggtgttgtattcgtggacatcgccaaggcttttgacaccgtaagccaccagcacatcattcatgctttgcagcaaagagaggtggatccccacatcgtcggtctggtgagcaatatgtacgagaacatcagtacgtatatcaccacaaagaggaacacacacacagacaaaatccagatccgggttggagtaaagcagggtgacccgatgtcgccccttttatttaacctggcaatggaccctctattatgcaagctggaagagagtggcaaaggataccaccgaggacagagcagcatcacagcgatggcatttgcagacgatctggttttgctgagcgactcctgggaaaatatgaatacaaatattagcatactggagaccttctgcaatctgaccggactcaaaacacaggggcaaaagtgccacggcttttacatcaagccgacaaagaagtcttacaccatcaatgactgcgctgcctggactatcaacggcacacccctgaacatgatcgaccccggcgaatctgagaaatacctcggcctgcagtttgacccgtggattggaatagcaaggtccggtctctccacaaaactagatttttggcttcagcggatcgatcaagcaccacttaaacctctgcagaaaactgatattctcaaaacatacaccatccctcggctgatctacatagctgaccactcagaagtgaaaagcgcactactcgaaacccttgaccagaagatccggacagcggtcaaggaatggcttcacctacctccgtgcacctgcgatgccatcctgtactcgagcacgagagacggcggtttgggcatcaccaaattggcaggactgatccccagcgtgcaggcccgtagactgcatcggatcgcacagtcatctgacgatacgatgaaatgcttcatggaaaaagagaaaatggaacagctgcataagaaattgtggattcaagctggaggggacagagagaacataccctcgatttgggaagcaccaccgtcgagtgaaccaccaaacaacgtgagcacaaattcggaatgggaagcaccgacccagaaagataaatttccaaagccttgcaattggaggaaaaacgaattcaaaaaatggaccaaattggcatcccaaggccgcggaattgtaaattttgaaagagacaaaattagtaaccattggatccaatactacagacgcatacctcacaggaaactcctcactgcactacaactcagggccaacgtttaccccacgagagaatttctagccaggggtagacaagaccaatacatcaaggcgtgtaggcactgcgatgcggacaacgaatcctgcgcccacatcatcggcaactgcccagtgacacaggacgcccgaatcaagaggcacaattacatctgcgaactgcttctcgaggaggcgaagaagaaggactgggtagtgttcaaggaaccgcacataagggattccaacaaggaactgtacaaacctgacctgatatttgtgaaggatgggcgtgcacttgtcgtggatgtgacagtacggtatgaagcagccaaatcatcgctggaggaagccgctgcagagaaagtgagaaagtacaaacacctggaaacggaagtaagacatctcacgaatgcaaaggacgttacttttgtgggctttcccctaggagcgcgggggaaatggcaccaagataactttaaacttttgactgagcttggcctctccaaatcgaggcaagtgaaaatggcagagactttttccacagtagcgctcttttcatctgtggacattgtacatatgtttgccagtagggccagaaaatctatggttatgtgataataggctgccttctgcggggcttgccttctggccatgcccttcttctctcccttgcacctgtacctcttggtctttgaataaagcctgagtaggaaggaccggtaaaaaaaaaaaaaaaaaaaaaaaaaaaaaaacgttgactaaaaaaaaaaaaaaaaaaaaaaaaaaaaaaaaaaaaaaaaaaaaaaaaaaaaaaaaaaaaaaaaaaaaaa

SEQ ID NO: 10858 - DNA, 5264 bp, synthetic construct
  source 1..5264: mol_type = other DNA
gaaataagagagaaaagaagagtaagaagaaatataagagaattcgccaccatggcccctaagaaaaagcggaaggtgaatatcagcggctctagctgcggcagccccaacagcgccgacaccagcagcgacttcaaggacctgtggaccaagctgaaggaatgccacgaccgggaagtgcagggactccaggtgaaggtcaccaaactcaagcaagaaagaatcctggacgcccagagactggaagaattcttcaccaagaaccagcagctgagagagcagcagaaagtgctgcacgagacaatcaaggttctggaagatagactgcgggccggcctgtgcgacagatgcgccgtgaccgaggaacacatgcgcaaaaagcagcaggagttcgagaacattagacagcaaaatctgaaattgatcacagagctgatgaacgagagaaacacactgcaggaggagaacaagaagctgagcgagcagctgcaacagaagatcgagaatgatcagcaacaccaggccgctgagctggaatgtgaagaggacgtgatccccgacagcccaatcacagctttcagcttttctggcgtgaacagactgaggcggaaggaaaacccccacgtgcggtacatcgagcagacccataccaagctggaacacagcgtgtgtgccaacgagatgagaaaggtgtccaagtcctccacccatccccagcacaaccctaacgaaaatgagatcctggtggctgatacctacgaccagtctcagagccctatggccaaggcccacggcaccagctcttatacccctgataagagctccttcaacctggccaccgtggtggccgagacactgggcctgggcgtgcaggaggaaagcgagacacagggcccaatgagccctctgggagatgagctgtaccactgcctggaaggcaaccacaagaaacagccttttgagtccggctccgagactcctggaacaagcgagagcgctacacctgagggcagccctaagagaaaggtgtccagcgccgagggcgctgccaaggaagagcctaaacggagaagcgccagactgagcgccaagccccccgccaaggtggaagccaagcctaagaaggccgccgctaaggacaagagcagcgataagaaagtccagaccaagggcaagcggggcgccaaaggcaaacaggccgaggtggccaaccaggagacaaaggaagatctgcctgctgagaacggcgaaaccaagaccgaggaatctccagcttctgacgaggccggagagaaggaggccaaaagcgacagcggctctgagacacctggaacaagcgagagcgccaccccggaatcctatgaacaacttgcaccacaaccgtgtgtgggagaaactttacattctagcctcccacgagacagtgaactgtttgtgcctgaagaggggagcagcgagaaggagagcgaggacgcgccaaaaacatctcctccgacgcctgggaaacatggtttggaacagactggggaggaaaaagtgatggtgactgttcctgacaaaaatccaccttgtccttgctgtggtacccgggtaaactctgtgttgaatctgattgaacatctgaaagtgtcacacgggagaaggggggtttgttttcggtgtgcaaaatgtggaaaggaaaatagtaactatcacagtgttgtttgtcattttaagaaatgcaggggtccagagacggagaaagccccagctggggagtggatttgtgaggtatgcaacagagattttacaaccaaaattggcctgggacaacacaagagattggcacacccagcagtgagaaatcaggaaaggatcgttgcttcccaaccgaaagaaacatcaaatagaggtgctcacaaaaggtgctggacaaaggaggaggaagaattactaataagactggaggctcagttcgagggaaacaaaaatattaataagcttattgcagaacacataaccaccaaaacagctaagcagatcagtgacaaaaggcgattgctgtccagaaagccagcagaggagccacgtgaggagcctggaacgtgtcatcacaccaggagagcagctgcgagcctgagaacggagcctgagatgagtcatcacgcccaggcagaggacagagataatggacctgggagacgccctctgccaggcagggcagctgccggagggagaacaatggacgagataagacgccaccctgataagggcaacggacagcagagacccaccaagcaaaaatcagaagaacagctgcaggcttactataaaaagacactagaggaacgactttcagctggggcacttaacaccttcccccgagcattcaagcaggtaatggaaggccgggatataaagctagtaatcaatcagacagcgcaggactgcttcggatgcctggaatccataagccaaataagaacggcaacccgagataaaaaggacacggtgacccgggagaaacacccaaagaaaccttttcagaagtggatgaagaagagagcaatcaaaaaaggtaattatcttcggttccagcgtttattttatcttgatagagggaaactggctaaaatcattttagatgatattgaatgcttgtcttgtgacataccactcagtgaaatttattcggtttttaaaacaagatgggaaacaactggtagctttaaaagccttggggactttaaaacttacgggaaggctgacaacactgccttcagagaattaattacggctaaagaaattgagaaaaatgtgcaggaaatgagcaaaggctcggctcccggtccagacgggattactcttggggacgtcgtaaagatggatcccgagttttcccggaccatggagattttcaatttatggttaacaactggtaaaatcccggacatggtgagggggtgcagaaccgttttgattccaaaatcatcaaagccggatcgtttgaaagacattaataactggagacctatcacgatcggttccatcttgctgagactgttctccaggattgtaacagctaggctgagcaaagcgtgccccctgaacccaaggcaaagaggctttatcagagcggcgggatgctctgaaaacttaaaactcctgcaaactataatttggtcggccaaaagagaacacagaccactgggtgttgtattcgtggacatcgccaaggcttttgacaccgtaagccaccagcacatcattcatgctttgcagcaaagagaggtggatccccacatcgtcggtctggtgagcaatatgtacgagaacatcagtacgtatatcaccacaaagaggaacacacacacagacaaaatccagatccgggttggagtaaagcagggtgacccgatgtcgccccttttatttaacctggcaatggaccctctattatgcaagctggaagagagtggcaaaggataccaccgaggacagagcagcatcacagcgatggcatttgcagacgatctggttttgctgagcgactcctgggaaaatatgaatacaaatattagcatactggagaccttctgcaatctgaccggactcaaaacacaggggcaaaagtgccacggcttttacatcaagccgacaaagaagtcttacaccatcaatgactgcgctgcctggactatcaacggcacacccctgaacatgatcgaccccggcgaatctgagaaatacctcggcctgcagtttgacccgtggattggaatagcaaggtccggtctctccacaaaactagatttttggcttcagcggatcgatcaagcaccacttaaacctctgcagaaaactgatattctcaaaacatacaccatccctcggctgatctacatagctgaccactcagaagtgaaaagcgcactactcgaaacccttgaccagaagatccggacagcggtcaaggaatggcttcacctacctccgtgcacctgcgatgccatcctgtactcgagcacgagagacggcggtttgggcatcaccaaattggcaggactgatccccagcgtgcaggcccgtagactgcatcggatcgcacagtcatctgacgatacgatgaaatgcttcatggaaaaagagaaaatggaacagctgcataagaaattgtggattcaagctggaggggacagagagaacataccctcgatttgggaagcaccaccgtcgagtgaaccaccaaacaacgtgagcacaaattcggaatgggaagcaccgacccagaaagataaatttccaaagccttgcaattggaggaaaaacgaattcaaaaaatggaccaaattggcatcccaaggccgcggaattgtaaattttgaaagagacaaaattagtaaccattggatccaatactacagacgcatacctcacaggaaactcctcactgcactacaactcagggccaacgtttaccccacgagagaatttctagccaggggtagacaagaccaatacatcaaggcgtgtaggcactgcgatgcggacaacgaatcctgcgcccacatcatcggcaactgcccagtgacacaggacgcccgaatcaagaggcacaattacatctgcgaactgcttctcgaggaggcgaagaagaaggactgggtagtgttcaaggaaccgcacataagggattccaacaaggaactgtacaaacctgacctgatatttgtgaaggatgggcgtgcacttgtcgtggatgtgacagtacggtatgaagcagccaaatcatcgctggaggaagccgctgcagagaaagtgagaaagtacaaacacctggaaacggaagtaagacatctcacgaatgcaaaggacgttacttttgtgggctttcccctaggagcgcgggggaaatggcaccaagataactttaaacttttgactgagcttggcctctccaaatcgaggcaagtgaaaatggcagagactttttccacagtagcgctcttttcatctgtggacattgtacatatgtttgccagtagggccagaaaatctatggttatgtgataataggctgccttctgcggggcttgccttctggccatgcccttcttctctcccttgcacctgtacctcttggtctttgaataaagcctgagtaggaaggaccggtaaaaaaaaaaaaaaaaaaaaaaaaaaaaaaacgttgactaaaaaaaaaaaaaaaaaaaaaaaaaaaaaaaaaaaaaaaaaaaaaaaaaaaaaaaaaaaaaaaaaaaaaa

SEQ ID NO: 10859 - DNA, 5264 bp, synthetic construct
  source 1..5264: mol_type = other DNA
gaaataagagagaaaagaagagtaagaagaaatataagagaattcgccaccatggcccctaagaaaaagcggaaggtgaatatcagcggctctagctgcggcagccccaacagcgccgacaccagcagcgacttcaaggacctgtggaccaagctgaaggaatgccacgaccgggaagtgcagggactccaggtgaaggtcaccaaactcaagcaagaaagaatcctggacgcccagagactggaagaattcttcaccaagaaccagcagctgagagagcagcagaaagtgctgcacgagacaatcaaggttctggaagatagactgcgggccggcctgtgcgacagatgcgccgtgaccgaggaacacatgcgcaaaaagcagcaggagttcgagaacattagacagcaaaatctgaaattgatcacagagctgatgaacgagagaaacacactgcaggaggagaacaagaagctgagcgagcagctgcaacagaagatcgagaatgatcagcaacaccaggccgctgagctggaatgtgaagaggacgtgatccccgacagcccaatcacagctttcagcttttctggcgtgaacagactgaggcggaaggaaaacccccacgtgcggtacatcgagcagacccataccaagctggaacacagcgtgtgtgccaacgagatgagaaaggtgtccaagtcctccacccatccccagcacaaccctaacgaaaatgagatcctggtggctgatacctacgaccagtctcagagccctatggccaaggcccacggcaccagctcttatacccctgataagagctccttcaacctggccaccgtggtggccgagacactgggcctgggcgtgcaggaggaaagcgagacacagggcccaatgagccctctgggagatgagctgtaccactgcctggaaggcaaccacaagaaacagccttttgagtccggctccgagactcctggaacaagcgagagcgctacacctgagggcagccctaagagaaaggtgtccagcgccgagggcgctgccaaggaagagcctaaacggagaagcgccagactgagcgccaagccccccgccaaggtggaagccaagcctaagaaggccgccgctaaggacaagagcagcgataagaaagtccagaccaagggcaagcggggcgccaaaggcaaacaggccgaggtggccaaccaggagacaaaggaagatctgcctgctgagaacggcgaaaccaagaccgaggaatctccagcttctgacgaggccggagagaaggaggccaaaagcgacagcggctctgagacacctggaacaagcgagagcgccaccccggaatcctatgaacaacttgcaccacaaccgtgtgtgggagaaactttacattctagcctcccacgagacagtgaactgtttgtgcctgaagaggggagcagcgagaaggagagcgaggacgcgccaaaaacatctcctccgacgcctgggaaacatggtttggaacagactggggaggaaaaagtgatggtgactgttcctgacaaaaatccaccttgtccttgctgtggtacccgggtaaactctgtgttgaatctgattgaacatctgaaagtgtcacacgggaaaagggggatctgttttcggtgtgcaaaatgtggaaaggaaaatagtaactatcacagtgttgtttgtcattttaagaaatgcaggggtccagagacggagaaagccccagctggggagtggatttgtgaggtatgcaacagagattttacaaccaaaattggcctgggacaacacaagagattggcacacccagcagtgagaaatcaggaaaggatcgttgcttcccaaccgaaagaaacatcaaatagaggtgctcacaaaaggtgctggacaaaggaggaggaagaattactaataagactggaggctcagttcgagggaaacaaaaatattaataagcttattgcagaacacataaccaccaaaacagctaagcagatcagtgacaaaaggcgattgctgtccagaaagccagcagaggagccacgtgaggagcctggaacgtgtcatcacaccaggagagcagctgcgagcctgagaacggagcctgagatgagtcatcacgcccaggcagaggacagagataatggacctgggagacgccctctgccaggcagggcagctgccggagggagaacaatggacgagataagacgccaccctgataagggcaacggacagcagagacccaccaagcaaaaatcagaagaacagctgcaggcttactataaaaagacactagaggaacgactttcagctggggcacttaacaccttcccccgagcattcaagcaggtaatggaaggccgggatataaagctagtaatcaatcagacagcgcaggactgcttcggatgcctggaatccataagccaaataagaacggcaacccgagataaaaaggacacggtgacccgggagaaacacccaaagaaaccttttcagaagtggatgaagaagagagcaatcaaaaaaggtaattatcttcggttccagcgtttattttatcttgatagagggaaactggctaaaatcattttagatgatattgaatgcttgtcttgtgacataccactcagtgaaatttattcggtttttaaaacaagatgggaaacaactggtagctttaaaagccttggggactttaaaacttacgggaaggctgacaacactgccttcagagaattaattacggctaaagaaattgagaaaaatgtgcaggaaatgagcaaaggctcggctcccggtccagacgggattactcttggggacgtcgtaaagatggatcccgagttttcccggaccatggagattttcaatttatggttaacaactggtaaaatcccggacatggtgagggggtgcagaaccgttttgattccaaaatcatcaaagccggatcgtttgaaagacattaataactggagacctatcacgatcggttccatcttgctgagactgttctccaggattgtaacagctaggctgagcaaagcgtgccccctgaacccaaggcaaagaggctttatcagagcggcgggatgctctgaaaacttaaaactcctgcaaactataatttggtcggccaaaagagaacacagaccactgggtgttgtattcgtggacatcgccaaggcttttgacaccgtaagccaccagcacatcattcatgctttgcagcaaagagaggtggatccccacatcgtcggtctggtgagcaatatgtacgagaacatcagtacgtatatcaccacaaagaggaacacacacacagacaaaatccagatccgggttggagtaaagcagggtgacccgatgtcgccccttttatttaacctggcaatggaccctctattatgcaagctggaagagagtggcaaaggataccaccgaggacagagcagcatcacagcgatggcatttgcagacgatctggttttgctgagcgactcctgggaaaatatgaatacaaatattagcatactggagaccttctgcaatctgaccggactcaaaacacaggggcaaaagtgccacggcttttacatcaagccgacaaagaagtcttacaccatcaatgactgcgctgcctggactatcaacggcacacccctgaacatgatcgaccccggcgaatctgagaaatacctcggcctgcagtttgacccgtggattggaatagcaaggtccggtctctccacaaaactagatttttggcttcagcggatcgatcaagcaccacttaaacctctgcagaaaactgatattctcaaaacatacaccatccctcggctgatctacatagctgaccactcagaagtgaaaagcgcactactcgaaacccttgaccagaagatccggacagcggtcaaggaatggcttcacctacctccgtgcacctgcgatgccatcctgtactcgagcacgagagacggcggtttgggcatcaccaaattggcaggactgatccccagcgtgcaggcccgtagactgcatcggatcgcacagtcatctgacgatacgatgaaatgcttcatggaaaaagagaaaatggaacagctgcataagaaattgtggattcaagctggaggggacagagagaacataccctcgatttgggaagcaccaccgtcgagtgaaccaccaaacaacgtgagcacaaattcggaatgggaagcaccgacccagaaagataaatttccaaagccttgcaattggaggaaaaacgaattcaaaaaatggaccaaattggcatcccaaggccgcggaattgtaaattttgaaagagacaaaattagtaaccattggatccaatactacagacgcatacctcacaggaaactcctcactgcactacaactcagggccaacgtttaccccacgagagaatttctagccaggggtagacaagaccaatacatcaaggcgtgtaggcactgcgatgcggacaacgaatcctgcgcccacatcatcggcaactgcccagtgacacaggacgcccgaatcaagaggcacaattacatctgcgaactgcttctcgaggaggcgaagaagaaggactgggtagtgttcaaggaaccgcacataagggattccaacaaggaactgtacaaacctgacctgatatttgtgaaggatgggcgtgcacttgtcgtggatgtgacagtacggtatgaagcagccaaatcatcgctggaggaagccgctgcagagaaagtgagaaagtacaaacacctggaaacggaagtaagacatctcacgaatgcaaaggacgttacttttgtgggctttcccctaggagcgcgggggaaatggcaccaagataactttaaacttttgactgagcttggcctctccaaatcgaggcaagtgaaaatggcagagactttttccacagtagcgctcttttcatctgtggacattgtacatatgtttgccagtagggccagaaaatctatggttatgtgataataggctgccttctgcggggcttgccttctggccatgcccttcttctctcccttgcacctgtacctcttggtctttgaataaagcctgagtaggaaggaccggtaaaaaaaaaaaaaaaaaaaaaaaaaaaaaaacgttgactaaaaaaaaaaaaaaaaaaaaaaaaaaaaaaaaaaaaaaaaaaaaaaaaaaaaaaaaaaaaaaaaaaaaaa

SEQ ID NO: 10860 - DNA, 5264 bp, synthetic construct
  source 1..5264: mol_type = other DNA
gaaataagagagaaaagaagagtaagaagaaatataagagaattcgccaccatggcccctaagaaaaagcggaaggtgaatatcagcggctctagctgcggcagccccaacagcgccgacaccagcagcgacttcaaggacctgtggaccaagctgaaggaatgccacgaccgggaagtgcagggactccaggtgaaggtcaccaaactcaagcaagaaagaatcctggacgcccagagactggaagaattcttcaccaagaaccagcagctgagagagcagcagaaagtgctgcacgagacaatcaaggttctggaagatagactgcgggccggcctgtgcgacagatgcgccgtgaccgaggaacacatgcgcaaaaagcagcaggagttcgagaacattagacagcaaaatctgaaattgatcacagagctgatgaacgagagaaacacactgcaggaggagaacaagaagctgagcgagcagctgcaacagaagatcgagaatgatcagcaacaccaggccgctgagctggaatgtgaagaggacgtgatccccgacagcccaatcacagctttcagcttttctggcgtgaacagactgaggcggaaggaaaacccccacgtgcggtacatcgagcagacccataccaagctggaacacagcgtgtgtgccaacgagatgagaaaggtgtccaagtcctccacccatccccagcacaaccctaacgaaaatgagatcctggtggctgatacctacgaccagtctcagagccctatggccaaggcccacggcaccagctcttatacccctgataagagctccttcaacctggccaccgtggtggccgagacactgggcctgggcgtgcaggaggaaagcgagacacagggcccaatgagccctctgggagatgagctgtaccactgcctggaaggcaaccacaagaaacagccttttgagtccggctccgagactcctggaacaagcgagagcgctacacctgagggcagccctaagagaaaggtgtccagcgccgagggcgctgccaaggaagagcctaaacggagaagcgccagactgagcgccaagccccccgccaaggtggaagccaagcctaagaaggccgccgctaaggacaagagcagcgataagaaagtccagaccaagggcaagcggggcgccaaaggcaaacaggccgaggtggccaaccaggagacaaaggaagatctgcctgctgagaacggcgaaaccaagaccgaggaatctccagcttctgacgaggccggagagaaggaggccaaaagcgacagcggctctgagacacctggaacaagcgagagcgccaccccggaatcctatgaacaacttgcaccacaaccgtgtgtgggagaaactttacattctagcctcccacgagacagtgaactgtttgtgcctgaagaggggagcagcgagaaggagagcgaggacgcgccaaaaacatctcctccgacgcctgggaaacatggtttggaacagactggggaggaaaaagtgatggtgactgttcctgacaaaaatccaccttgtccttgctgtggtacccgggtaaactctgtgttgaatctgattgaacatctgaaagtgtcacacgggaaaaggggggtttgttaccggtgtgcaaaatgtggaaaggaaaatagtaactatcacagtgttgtttgtcattttaagaaatgcaggggtccagagacggagaaagccccagctggggagtggatttgtgaggtatgcaacagagattttacaaccaaaattggcctgggacaacacaagagattggcacacccagcagtgagaaatcaggaaaggatcgttgcttcccaaccgaaagaaacatcaaatagaggtgctcacaaaaggtgctggacaaaggaggaggaagaattactaataagactggaggctcagttcgagggaaacaaaaatattaataagcttattgcagaacacataaccaccaaaacagctaagcagatcagtgacaaaaggcgattgctgtccagaaagccagcagaggagccacgtgaggagcctggaacgtgtcatcacaccaggagagcagctgcgagcctgagaacggagcctgagatgagtcatcacgcccaggcagaggacagagataatggacctgggagacgccctctgccaggcagggcagctgccggagggagaacaatggacgagataagacgccaccctgataagggcaacggacagcagagacccaccaagcaaaaatcagaagaacagctgcaggcttactataaaaagacactagaggaacgactttcagctggggcacttaacaccttcccccgagcattcaagcaggtaatggaaggccgggatataaagctagtaatcaatcagacagcgcaggactgcttcggatgcctggaatccataagccaaataagaacggcaacccgagataaaaaggacacggtgacccgggagaaacacccaaagaaaccttttcagaagtggatgaagaagagagcaatcaaaaaaggtaattatcttcggttccagcgtttattttatcttgatagagggaaactggctaaaatcattttagatgatattgaatgcttgtcttgtgacataccactcagtgaaatttattcggtttttaaaacaagatgggaaacaactggtagctttaaaagccttggggactttaaaacttacgggaaggctgacaacactgccttcagagaattaattacggctaaagaaattgagaaaaatgtgcaggaaatgagcaaaggctcggctcccggtccagacgggattactcttggggacgtcgtaaagatggatcccgagttttcccggaccatggagattttcaatttatggttaacaactggtaaaatcccggacatggtgagggggtgcagaaccgttttgattccaaaatcatcaaagccggatcgtttgaaagacattaataactggagacctatcacgatcggttccatcttgctgagactgttctccaggattgtaacagctaggctgagcaaagcgtgccccctgaacccaaggcaaagaggctttatcagagcggcgggatgctctgaaaacttaaaactcctgcaaactataatttggtcggccaaaagagaacacagaccactgggtgttgtattcgtggacatcgccaaggcttttgacaccgtaagccaccagcacatcattcatgctttgcagcaaagagaggtggatccccacatcgtcggtctggtgagcaatatgtacgagaacatcagtacgtatatcaccacaaagaggaacacacacacagacaaaatccagatccgggttggagtaaagcagggtgacccgatgtcgccccttttatttaacctggcaatggaccctctattatgcaagctggaagagagtggcaaaggataccaccgaggacagagcagcatcacagcgatggcatttgcagacgatctggttttgctgagcgactcctgggaaaatatgaatacaaatattagcatactggagaccttctgcaatctgaccggactcaaaacacaggggcaaaagtgccacggcttttacatcaagccgacaaagaagtcttacaccatcaatgactgcgctgcctggactatcaacggcacacccctgaacatgatcgaccccggcgaatctgagaaatacctcggcctgcagtttgacccgtggattggaatagcaaggtccggtctctccacaaaactagatttttggcttcagcggatcgatcaagcaccacttaaacctctgcagaaaactgatattctcaaaacatacaccatccctcggctgatctacatagctgaccactcagaagtgaaaagcgcactactcgaaacccttgaccagaagatccggacagcggtcaaggaatggcttcacctacctccgtgcacctgcgatgccatcctgtactcgagcacgagagacggcggtttgggcatcaccaaattggcaggactgatccccagcgtgcaggcccgtagactgcatcggatcgcacagtcatctgacgatacgatgaaatgcttcatggaaaaagagaaaatggaacagctgcataagaaattgtggattcaagctggaggggacagagagaacataccctcgatttgggaagcaccaccgtcgagtgaaccaccaaacaacgtgagcacaaattcggaatgggaagcaccgacccagaaagataaatttccaaagccttgcaattggaggaaaaacgaattcaaaaaatggaccaaattggcatcccaaggccgcggaattgtaaattttgaaagagacaaaattagtaaccattggatccaatactacagacgcatacctcacaggaaactcctcactgcactacaactcagggccaacgtttaccccacgagagaatttctagccaggggtagacaagaccaatacatcaaggcgtgtaggcactgcgatgcggacaacgaatcctgcgcccacatcatcggcaactgcccagtgacacaggacgcccgaatcaagaggcacaattacatctgcgaactgcttctcgaggaggcgaagaagaaggactgggtagtgttcaaggaaccgcacataagggattccaacaaggaactgtacaaacctgacctgatatttgtgaaggatgggcgtgcacttgtcgtggatgtgacagtacggtatgaagcagccaaatcatcgctggaggaagccgctgcagagaaagtgagaaagtacaaacacctggaaacggaagtaagacatctcacgaatgcaaaggacgttacttttgtgggctttcccctaggagcgcgggggaaatggcaccaagataactttaaacttttgactgagcttggcctctccaaatcgaggcaagtgaaaatggcagagactttttccacagtagcgctcttttcatctgtggacattgtacatatgtttgccagtagggccagaaaatctatggttatgtgataataggctgccttctgcggggcttgccttctggccatgcccttcttctctcccttgcacctgtacctcttggtctttgaataaagcctgagtaggaaggaccggtaaaaaaaaaaaaaaaaaaaaaaaaaaaaaaacgttgactaaaaaaaaaaaaaaaaaaaaaaaaaaaaaaaaaaaaaaaaaaaaaaaaaaaaaaaaaaaaaaaaaaaaaa

SEQ ID NO: 10861 - DNA, 5264 bp, synthetic construct
  source 1..5264: mol_type = other DNA
gaaataagagagaaaagaagagtaagaagaaatataagagaattcgccaccatggcccctaagaaaaagcggaaggtgaatatcagcggctctagctgcggcagccccaacagcgccgacaccagcagcgacttcaaggacctgtggaccaagctgaaggaatgccacgaccgggaagtgcagggactccaggtgaaggtcaccaaactcaagcaagaaagaatcctggacgcccagagactggaagaattcttcaccaagaaccagcagctgagagagcagcagaaagtgctgcacgagacaatcaaggttctggaagatagactgcgggccggcctgtgcgacagatgcgccgtgaccgaggaacacatgcgcaaaaagcagcaggagttcgagaacattagacagcaaaatctgaaattgatcacagagctgatgaacgagagaaacacactgcaggaggagaacaagaagctgagcgagcagctgcaacagaagatcgagaatgatcagcaacaccaggccgctgagctggaatgtgaagaggacgtgatccccgacagcccaatcacagctttcagcttttctggcgtgaacagactgaggcggaaggaaaacccccacgtgcggtacatcgagcagacccataccaagctggaacacagcgtgtgtgccaacgagatgagaaaggtgtccaagtcctccacccatccccagcacaaccctaacgaaaatgagatcctggtggctgatacctacgaccagtctcagagccctatggccaaggcccacggcaccagctcttatacccctgataagagctccttcaacctggccaccgtggtggccgagacactgggcctgggcgtgcaggaggaaagcgagacacagggcccaatgagccctctgggagatgagctgtaccactgcctggaaggcaaccacaagaaacagccttttgagtccggctccgagactcctggaacaagcgagagcgctacacctgagggcagccctaagagaaaggtgtccagcgccgagggcgctgccaaggaagagcctaaacggagaagcgccagactgagcgccaagccccccgccaaggtggaagccaagcctaagaaggccgccgctaaggacaagagcagcgataagaaagtccagaccaagggcaagcggggcgccaaaggcaaacaggccgaggtggccaaccaggagacaaaggaagatctgcctgctgagaacggcgaaaccaagaccgaggaatctccagcttctgacgaggccggagagaaggaggccaaaagcgacagcggctctgagacacctggaacaagcgagagcgccaccccggaatcctatgaacaacttgcaccacaaccgtgtgtgggagaaactttacattctagcctcccacgagacagtgaactgtttgtgcctgaagaggggagcagcgagaaggagagcgaggacgcgccaaaaacatctcctccgacgcctgggaaacatggtttggaacagactggggaggaaaaagtgatggtgactgttcctgacaaaaatccaccttgtccttgctgtggtacccgggtaaactctgtgttgaatctgattgaacatctgaaagtgtcacacgggaaaaggggggtttgttttcggtgtgcaaaatgtggaaaggaaaatagtaaccaccacagtgttgtttgtcattttaagaaatgcaggggtccagagacggagaaagccccagctggggagtggatttgtgaggtatgcaacagagattttacaaccaaaattggcctgggacaacacaagagattggcacacccagcagtgagaaatcaggaaaggatcgttgcttcccaaccgaaagaaacatcaaatagaggtgctcacaaaaggtgctggacaaaggaggaggaagaattactaataagactggaggctcagttcgagggaaacaaaaatattaataagcttattgcagaacacataaccaccaaaacagctaagcagatcagtgacaaaaggcgattgctgtccagaaagccagcagaggagccacgtgaggagcctggaacgtgtcatcacaccaggagagcagctgcgagcctgagaacggagcctgagatgagtcatcacgcccaggcagaggacagagataatggacctgggagacgccctctgccaggcagggcagctgccggagggagaacaatggacgagataagacgccaccctgataagggcaacggacagcagagacccaccaagcaaaaatcagaagaacagctgcaggcttactataaaaagacactagaggaacgactttcagctggggcacttaacaccttcccccgagcattcaagcaggtaatggaaggccgggatataaagctagtaatcaatcagacagcgcaggactgcttcggatgcctggaatccataagccaaataagaacggcaacccgagataaaaaggacacggtgacccgggagaaacacccaaagaaaccttttcagaagtggatgaagaagagagcaatcaaaaaaggtaattatcttcggttccagcgtttattttatcttgatagagggaaactggctaaaatcattttagatgatattgaatgcttgtcttgtgacataccactcagtgaaatttattcggtttttaaaacaagatgggaaacaactggtagctttaaaagccttggggactttaaaacttacgggaaggctgacaacactgccttcagagaattaattacggctaaagaaattgagaaaaatgtgcaggaaatgagcaaaggctcggctcccggtccagacgggattactcttggggacgtcgtaaagatggatcccgagttttcccggaccatggagattttcaatttatggttaacaactggtaaaatcccggacatggtgagggggtgcagaaccgttttgattccaaaatcatcaaagccggatcgtttgaaagacattaataactggagacctatcacgatcggttccatcttgctgagactgttctccaggattgtaacagctaggctgagcaaagcgtgccccctgaacccaaggcaaagaggctttatcagagcggcgggatgctctgaaaacttaaaactcctgcaaactataatttggtcggccaaaagagaacacagaccactgggtgttgtattcgtggacatcgccaaggcttttgacaccgtaagccaccagcacatcattcatgctttgcagcaaagagaggtggatccccacatcgtcggtctggtgagcaatatgtacgagaacatcagtacgtatatcaccacaaagaggaacacacacacagacaaaatccagatccgggttggagtaaagcagggtgacccgatgtcgccccttttatttaacctggcaatggaccctctattatgcaagctggaagagagtggcaaaggataccaccgaggacagagcagcatcacagcgatggcatttgcagacgatctggttttgctgagcgactcctgggaaaatatgaatacaaatattagcatactggagaccttctgcaatctgaccggactcaaaacacaggggcaaaagtgccacggcttttacatcaagccgacaaagaagtcttacaccatcaatgactgcgctgcctggactatcaacggcacacccctgaacatgatcgaccccggcgaatctgagaaatacctcggcctgcagtttgacccgtggattggaatagcaaggtccggtctctccacaaaactagatttttggcttcagcggatcgatcaagcaccacttaaacctctgcagaaaactgatattctcaaaacatacaccatccctcggctgatctacatagctgaccactcagaagtgaaaagcgcactactcgaaacccttgaccagaagatccggacagcggtcaaggaatggcttcacctacctccgtgcacctgcgatgccatcctgtactcgagcacgagagacggcggtttgggcatcaccaaattggcaggactgatccccagcgtgcaggcccgtagactgcatcggatcgcacagtcatctgacgatacgatgaaatgcttcatggaaaaagagaaaatggaacagctgcataagaaattgtggattcaagctggaggggacagagagaacataccctcgatttgggaagcaccaccgtcgagtgaaccaccaaacaacgtgagcacaaattcggaatgggaagcaccgacccagaaagataaatttccaaagccttgcaattggaggaaaaacgaattcaaaaaatggaccaaattggcatcccaaggccgcggaattgtaaattttgaaagagacaaaattagtaaccattggatccaatactacagacgcatacctcacaggaaactcctcactgcactacaactcagggccaacgtttaccccacgagagaatttctagccaggggtagacaagaccaatacatcaaggcgtgtaggcactgcgatgcggacaacgaatcctgcgcccacatcatcggcaactgcccagtgacacaggacgcccgaatcaagaggcacaattacatctgcgaactgcttctcgaggaggcgaagaagaaggactgggtagtgttcaaggaaccgcacataagggattccaacaaggaactgtacaaacctgacctgatatttgtgaaggatgggcgtgcacttgtcgtggatgtgacagtacggtatgaagcagccaaatcatcgctggaggaagccgctgcagagaaagtgagaaagtacaaacacctggaaacggaagtaagacatctcacgaatgcaaaggacgttacttttgtgggctttcccctaggagcgcgggggaaatggcaccaagataactttaaacttttgactgagcttggcctctccaaatcgaggcaagtgaaaatggcagagactttttccacagtagcgctcttttcatctgtggacattgtacatatgtttgccagtagggccagaaaatctatggttatgtgataataggctgccttctgcggggcttgccttctggccatgcccttcttctctcccttgcacctgtacctcttggtctttgaataaagcctgagtaggaaggaccggtaaaaaaaaaaaaaaaaaaaaaaaaaaaaaaacgttgactaaaaaaaaaaaaaaaaaaaaaaaaaaaaaaaaaaaaaaaaaaaaaaaaaaaaaaaaaaaaaaaaaaaaaa

SEQ ID NO: 10862 - DNA, 5264 bp, synthetic construct
  source 1..5264: mol_type = other DNA
gaaataagagagaaaagaagagtaagaagaaatataagagaattcgccaccatggcccctaagaaaaagcggaaggtgaatatcagcggctctagctgcggcagccccaacagcgccgacaccagcagcgacttcaaggacctgtggaccaagctgaaggaatgccacgaccgggaagtgcagggactccaggtgaaggtcaccaaactcaagcaagaaagaatcctggacgcccagagactggaagaattcttcaccaagaaccagcagctgagagagcagcagaaagtgctgcacgagacaatcaaggttctggaagatagactgcgggccggcctgtgcgacagatgcgccgtgaccgaggaacacatgcgcaaaaagcagcaggagttcgagaacattagacagcaaaatctgaaattgatcacagagctgatgaacgagagaaacacactgcaggaggagaacaagaagctgagcgagcagctgcaacagaagatcgagaatgatcagcaacaccaggccgctgagctggaatgtgaagaggacgtgatccccgacagcccaatcacagctttcagcttttctggcgtgaacagactgaggcggaaggaaaacccccacgtgcggtacatcgagcagacccataccaagctggaacacagcgtgtgtgccaacgagatgagaaaggtgtccaagtcctccacccatccccagcacaaccctaacgaaaatgagatcctggtggctgatacctacgaccagtctcagagccctatggccaaggcccacggcaccagctcttatacccctgataagagctccttcaacctggccaccgtggtggccgagacactgggcctgggcgtgcaggaggaaagcgagacacagggcccaatgagccctctgggagatgagctgtaccactgcctggaaggcaaccacaagaaacagccttttgagtccggctccgagactcctggaacaagcgagagcgctacacctgagggcagccctaagagaaaggtgtccagcgccgagggcgctgccaaggaagagcctaaacggagaagcgccagactgagcgccaagccccccgccaaggtggaagccaagcctaagaaggccgccgctaaggacaagagcagcgataagaaagtccagaccaagggcaagcggggcgccaaaggcaaacaggccgaggtggccaaccaggagacaaaggaagatctgcctgctgagaacggcgaaaccaagaccgaggaatctccagcttctgacgaggccggagagaaggaggccaaaagcgacagcggctctgagacacctggaacaagcgagagcgccaccccggaatcctatgaacaacttgcaccacaaccgtgtgtgggagaaactttacattctagcctcccacgagacagtgaactgtttgtgcctgaagaggggagcagcgagaaggagagcgaggacgcgccaaaaacatctcctccgacgcctgggaaacatggtttggaacagactggggaggaaaaagtgatggtgactgttcctgacaaaaatccaccttgtccttgctgtggtacccgggtaaactctgtgttgaatctgattgaacatctgaaagtgtcacacgggaaaaggggggtttgttttcggtgtgcaaaatgtggaaaggaaaatagtaactatcacagtgttgtttgtcattttaagaaatgcaggggtccagagacggagaaagccgccgctggggagtggatttgtgaggtatgcaacagagattttacaaccaaaattggcctgggacaacacaagagattggcacacccagcagtgagaaatcaggaaaggatcgttgcttcccaaccgaaagaaacatcaaatagaggtgctcacaaaaggtgctggacaaaggaggaggaagaattactaataagactggaggctcagttcgagggaaacaaaaatattaataagcttattgcagaacacataaccaccaaaacagctaagcagatcagtgacaaaaggcgattgctgtccagaaagccagcagaggagccacgtgaggagcctggaacgtgtcatcacaccaggagagcagctgcgagcctgagaacggagcctgagatgagtcatcacgcccaggcagaggacagagataatggacctgggagacgccctctgccaggcagggcagctgccggagggagaacaatggacgagataagacgccaccctgataagggcaacggacagcagagacccaccaagcaaaaatcagaagaacagctgcaggcttactataaaaagacactagaggaacgactttcagctggggcacttaacaccttcccccgagcattcaagcaggtaatggaaggccgggatataaagctagtaatcaatcagacagcgcaggactgcttcggatgcctggaatccataagccaaataagaacggcaacccgagataaaaaggacacggtgacccgggagaaacacccaaagaaaccttttcagaagtggatgaagaagagagcaatcaaaaaaggtaattatcttcggttccagcgtttattttatcttgatagagggaaactggctaaaatcattttagatgatattgaatgcttgtcttgtgacataccactcagtgaaatttattcggtttttaaaacaagatgggaaacaactggtagctttaaaagccttggggactttaaaacttacgggaaggctgacaacactgccttcagagaattaattacggctaaagaaattgagaaaaatgtgcaggaaatgagcaaaggctcggctcccggtccagacgggattactcttggggacgtcgtaaagatggatcccgagttttcccggaccatggagattttcaatttatggttaacaactggtaaaatcccggacatggtgagggggtgcagaaccgttttgattccaaaatcatcaaagccggatcgtttgaaagacattaataactggagacctatcacgatcggttccatcttgctgagactgttctccaggattgtaacagctaggctgagcaaagcgtgccccctgaacccaaggcaaagaggctttatcagagcggcgggatgctctgaaaacttaaaactcctgcaaactataatttggtcggccaaaagagaacacagaccactgggtgttgtattcgtggacatcgccaaggcttttgacaccgtaagccaccagcacatcattcatgctttgcagcaaagagaggtggatccccacatcgtcggtctggtgagcaatatgtacgagaacatcagtacgtatatcaccacaaagaggaacacacacacagacaaaatccagatccgggttggagtaaagcagggtgacccgatgtcgccccttttatttaacctggcaatggaccctctattatgcaagctggaagagagtggcaaaggataccaccgaggacagagcagcatcacagcgatggcatttgcagacgatctggttttgctgagcgactcctgggaaaatatgaatacaaatattagcatactggagaccttctgcaatctgaccggactcaaaacacaggggcaaaagtgccacggcttttacatcaagccgacaaagaagtcttacaccatcaatgactgcgctgcctggactatcaacggcacacccctgaacatgatcgaccccggcgaatctgagaaatacctcggcctgcagtttgacccgtggattggaatagcaaggtccggtctctccacaaaactagatttttggcttcagcggatcgatcaagcaccacttaaacctctgcagaaaactgatattctcaaaacatacaccatccctcggctgatctacatagctgaccactcagaagtgaaaagcgcactactcgaaacccttgaccagaagatccggacagcggtcaaggaatggcttcacctacctccgtgcacctgcgatgccatcctgtactcgagcacgagagacggcggtttgggcatcaccaaattggcaggactgatccccagcgtgcaggcccgtagactgcatcggatcgcacagtcatctgacgatacgatgaaatgcttcatggaaaaagagaaaatggaacagctgcataagaaattgtggattcaagctggaggggacagagagaacataccctcgatttgggaagcaccaccgtcgagtgaaccaccaaacaacgtgagcacaaattcggaatgggaagcaccgacccagaaagataaatttccaaagccttgcaattggaggaaaaacgaattcaaaaaatggaccaaattggcatcccaaggccgcggaattgtaaattttgaaagagacaaaattagtaaccattggatccaatactacagacgcatacctcacaggaaactcctcactgcactacaactcagggccaacgtttaccccacgagagaatttctagccaggggtagacaagaccaatacatcaaggcgtgtaggcactgcgatgcggacaacgaatcctgcgcccacatcatcggcaactgcccagtgacacaggacgcccgaatcaagaggcacaattacatctgcgaactgcttctcgaggaggcgaagaagaaggactgggtagtgttcaaggaaccgcacataagggattccaacaaggaactgtacaaacctgacctgatatttgtgaaggatgggcgtgcacttgtcgtggatgtgacagtacggtatgaagcagccaaatcatcgctggaggaagccgctgcagagaaagtgagaaagtacaaacacctggaaacggaagtaagacatctcacgaatgcaaaggacgttacttttgtgggctttcccctaggagcgcgggggaaatggcaccaagataactttaaacttttgactgagcttggcctctccaaatcgaggcaagtgaaaatggcagagactttttccacagtagcgctcttttcatctgtggacattgtacatatgtttgccagtagggccagaaaatctatggttatgtgataataggctgccttctgcggggcttgccttctggccatgcccttcttctctcccttgcacctgtacctcttggtctttgaataaagcctgagtaggaaggaccggtaaaaaaaaaaaaaaaaaaaaaaaaaaaaaaacgttgactaaaaaaaaaaaaaaaaaaaaaaaaaaaaaaaaaaaaaaaaaaaaaaaaaaaaaaaaaaaaaaaaaaaaaa

SEQ ID NO: 10863 - DNA, 5264 bp, synthetic construct
  source 1..5264: mol_type = other DNA
gaaataagagagaaaagaagagtaagaagaaatataagagaattcgccaccatggcccctaagaaaaagcggaaggtgaatatcagcggctctagctgcggcagccccaacagcgccgacaccagcagcgacttcaaggacctgtggaccaagctgaaggaatgccacgaccgggaagtgcagggactccaggtgaaggtcaccaaactcaagcaagaaagaatcctggacgcccagagactggaagaattcttcaccaagaaccagcagctgagagagcagcagaaagtgctgcacgagacaatcaaggttctggaagatagactgcgggccggcctgtgcgacagatgcgccgtgaccgaggaacacatgcgcaaaaagcagcaggagttcgagaacattagacagcaaaatctgaaattgatcacagagctgatgaacgagagaaacacactgcaggaggagaacaagaagctgagcgagcagctgcaacagaagatcgagaatgatcagcaacaccaggccgctgagctggaatgtgaagaggacgtgatccccgacagcccaatcacagctttcagcttttctggcgtgaacagactgaggcggaaggaaaacccccacgtgcggtacatcgagcagacccataccaagctggaacacagcgtgtgtgccaacgagatgagaaaggtgtccaagtcctccacccatccccagcacaaccctaacgaaaatgagatcctggtggctgatacctacgaccagtctcagagccctatggccaaggcccacggcaccagctcttatacccctgataagagctccttcaacctggccaccgtggtggccgagacactgggcctgggcgtgcaggaggaaagcgagacacagggcccaatgagccctctgggagatgagctgtaccactgcctggaaggcaaccacaagaaacagccttttgagtccggctccgagactcctggaacaagcgagagcgctacacctgagggcagccctaagagaaaggtgtccagcgccgagggcgctgccaaggaagagcctaaacggagaagcgccagactgagcgccaagccccccgccaaggtggaagccaagcctaagaaggccgccgctaaggacaagagcagcgataagaaagtccagaccaagggcaagcggggcgccaaaggcaaacaggccgaggtggccaaccaggagacaaaggaagatctgcctgctgagaacggcgaaaccaagaccgaggaatctccagcttctgacgaggccggagagaaggaggccaaaagcgacagcggctctgagacacctggaacaagcgagagcgccaccccggaatcctatgaacaacttgcaccacaaccgtgtgtgggagaaactttacattctagcctcccacgagacagtgaactgtttgtgcctgaagaggggagcagcgagaaggagagcgaggacgcgccaaaaacatctcctccgacgcctgggaaacatggtttggaacagactggggaggaaaaagtgatggtgactgttcctgacaaaaatccaccttgtccttgctgtggtacccgggtaaactctgtgttgaatctgattgaacatctgaaagtgtcacacgggaaaaggggggtttgttttcggtgtgcaaaatgtggaaaggaaaatagtaactatcacagtgttgtttgtcattttaagaaatgcaggggtccagagacggagaaagccccagctggggagtggatttgtgaggtatgcaacagaagctttacaaccaaaattggcctgggacaacacaagagattggcacacccagcagtgagaaatcaggaaaggatcgttgcttcccaaccgaaagaaacatcaaatagaggtgctcacaaaaggtgctggacaaaggaggaggaagaattactaataagactggaggctcagttcgagggaaacaaaaatattaataagcttattgcagaacacataaccaccaaaacagctaagcagatcagtgacaaaaggcgattgctgtccagaaagccagcagaggagccacgtgaggagcctggaacgtgtcatcacaccaggagagcagctgcgagcctgagaacggagcctgagatgagtcatcacgcccaggcagaggacagagataatggacctgggagacgccctctgccaggcagggcagctgccggagggagaacaatggacgagataagacgccaccctgataagggcaacggacagcagagacccaccaagcaaaaatcagaagaacagctgcaggcttactataaaaagacactagaggaacgactttcagctggggcacttaacaccttcccccgagcattcaagcaggtaatggaaggccgggatataaagctagtaatcaatcagacagcgcaggactgcttcggatgcctggaatccataagccaaataagaacggcaacccgagataaaaaggacacggtgacccgggagaaacacccaaagaaaccttttcagaagtggatgaagaagagagcaatcaaaaaaggtaattatcttcggttccagcgtttattttatcttgatagagggaaactggctaaaatcattttagatgatattgaatgcttgtcttgtgacataccactcagtgaaatttattcggtttttaaaacaagatgggaaacaactggtagctttaaaagccttggggactttaaaacttacgggaaggctgacaacactgccttcagagaattaattacggctaaagaaattgagaaaaatgtgcaggaaatgagcaaaggctcggctcccggtccagacgggattactcttggggacgtcgtaaagatggatcccgagttttcccggaccatggagattttcaatttatggttaacaactggtaaaatcccggacatggtgagggggtgcagaaccgttttgattccaaaatcatcaaagccggatcgtttgaaagacattaataactggagacctatcacgatcggttccatcttgctgagactgttctccaggattgtaacagctaggctgagcaaagcgtgccccctgaacccaaggcaaagaggctttatcagagcggcgggatgctctgaaaacttaaaactcctgcaaactataatttggtcggccaaaagagaacacagaccactgggtgttgtattcgtggacatcgccaaggcttttgacaccgtaagccaccagcacatcattcatgctttgcagcaaagagaggtggatccccacatcgtcggtctggtgagcaatatgtacgagaacatcagtacgtatatcaccacaaagaggaacacacacacagacaaaatccagatccgggttggagtaaagcagggtgacccgatgtcgccccttttatttaacctggcaatggaccctctattatgcaagctggaagagagtggcaaaggataccaccgaggacagagcagcatcacagcgatggcatttgcagacgatctggttttgctgagcgactcctgggaaaatatgaatacaaatattagcatactggagaccttctgcaatctgaccggactcaaaacacaggggcaaaagtgccacggcttttacatcaagccgacaaagaagtcttacaccatcaatgactgcgctgcctggactatcaacggcacacccctgaacatgatcgaccccggcgaatctgagaaatacctcggcctgcagtttgacccgtggattggaatagcaaggtccggtctctccacaaaactagatttttggcttcagcggatcgatcaagcaccacttaaacctctgcagaaaactgatattctcaaaacatacaccatccctcggctgatctacatagctgaccactcagaagtgaaaagcgcactactcgaaacccttgaccagaagatccggacagcggtcaaggaatggcttcacctacctccgtgcacctgcgatgccatcctgtactcgagcacgagagacggcggtttgggcatcaccaaattggcaggactgatccccagcgtgcaggcccgtagactgcatcggatcgcacagtcatctgacgatacgatgaaatgcttcatggaaaaagagaaaatggaacagctgcataagaaattgtggattcaagctggaggggacagagagaacataccctcgatttgggaagcaccaccgtcgagtgaaccaccaaacaacgtgagcacaaattcggaatgggaagcaccgacccagaaagataaatttccaaagccttgcaattggaggaaaaacgaattcaaaaaatggaccaaattggcatcccaaggccgcggaattgtaaattttgaaagagacaaaattagtaaccattggatccaatactacagacgcatacctcacaggaaactcctcactgcactacaactcagggccaacgtttaccccacgagagaatttctagccaggggtagacaagaccaatacatcaaggcgtgtaggcactgcgatgcggacaacgaatcctgcgcccacatcatcggcaactgcccagtgacacaggacgcccgaatcaagaggcacaattacatctgcgaactgcttctcgaggaggcgaagaagaaggactgggtagtgttcaaggaaccgcacataagggattccaacaaggaactgtacaaacctgacctgatatttgtgaaggatgggcgtgcacttgtcgtggatgtgacagtacggtatgaagcagccaaatcatcgctggaggaagccgctgcagagaaagtgagaaagtacaaacacctggaaacggaagtaagacatctcacgaatgcaaaggacgttacttttgtgggctttcccctaggagcgcgggggaaatggcaccaagataactttaaacttttgactgagcttggcctctccaaatcgaggcaagtgaaaatggcagagactttttccacagtagcgctcttttcatctgtggacattgtacatatgtttgccagtagggccagaaaatctatggttatgtgataataggctgccttctgcggggcttgccttctggccatgcccttcttctctcccttgcacctgtacctcttggtctttgaataaagcctgagtaggaaggaccggtaaaaaaaaaaaaaaaaaaaaaaaaaaaaaaacgttgactaaaaaaaaaaaaaaaaaaaaaaaaaaaaaaaaaaaaaaaaaaaaaaaaaaaaaaaaaaaaaaaaaaaaaa

SEQ ID NO: 10864 - DNA, 5264 bp, synthetic construct
  source 1..5264: mol_type = other DNA
gaaataagagagaaaagaagagtaagaagaaatataagagaattcgccaccatggcccctaagaaaaagcggaaggtgaatatcagcggctctagctgcggcagccccaacagcgccgacaccagcagcgacttcaaggacctgtggaccaagctgaaggaatgccacgaccgggaagtgcagggactccaggtgaaggtcaccaaactcaagcaagaaagaatcctggacgcccagagactggaagaattcttcaccaagaaccagcagctgagagagcagcagaaagtgctgcacgagacaatcaaggttctggaagatagactgcgggccggcctgtgcgacagatgcgccgtgaccgaggaacacatgcgcaaaaagcagcaggagttcgagaacattagacagcaaaatctgaaattgatcacagagctgatgaacgagagaaacacactgcaggaggagaacaagaagctgagcgagcagctgcaacagaagatcgagaatgatcagcaacaccaggccgctgagctggaatgtgaagaggacgtgatccccgacagcccaatcacagctttcagcttttctggcgtgaacagactgaggcggaaggaaaacccccacgtgcggtacatcgagcagacccataccaagctggaacacagcgtgtgtgccaacgagatgagaaaggtgtccaagtcctccacccatccccagcacaaccctaacgaaaatgagatcctggtggctgatacctacgaccagtctcagagccctatggccaaggcccacggcaccagctcttatacccctgataagagctccttcaacctggccaccgtggtggccgagacactgggcctgggcgtgcaggaggaaagcgagacacagggcccaatgagccctctgggagatgagctgtaccactgcctggaaggcaaccacaagaaacagccttttgagtccggctccgagactcctggaacaagcgagagcgctacacctgagggcagccctaagagaaaggtgtccagcgccgagggcgctgccaaggaagagcctaaacggagaagcgccagactgagcgccaagccccccgccaaggtggaagccaagcctaagaaggccgccgctaaggacaagagcagcgataagaaagtccagaccaagggcaagcggggcgccaaaggcaaacaggccgaggtggccaaccaggagacaaaggaagatctgcctgctgagaacggcgaaaccaagaccgaggaatctccagcttctgacgaggccggagagaaggaggccaaaagcgacagcggctctgagacacctggaacaagcgagagcgccaccccggaatcctatgaacaacttgcaccacaaccgtgtgtgggagaaactttacattctagcctcccacgagacagtgaactgtttgtgcctgaagaggggagcagcgagaaggagagcgaggacgcgccaaaaacatctcctccgacgcctgggaaacatggtttggaacagactggggaggaaaaagtgatggtgactgttcctgacaaaaatccaccttgtccttgctgtggtacccgggtaaactctgtgttgaatctgattgaacatctgaaagtgtcacacgggaaaaggggggtttgttttcggtgtgcaaaatgtggaaaggaaaatagtaactatcacagtgttgtttgtcattttaagaaatgcaggggtccagagacggagaaagccccagctggggagtggatttgtgaggtatgcaacagagattttacaaccaaaagaggcctgggacaacacaagagattggcacacccagcagtgagaaatcaggaaaggatcgttgcttcccaaccgaaagaaacatcaaatagaggtgctcacaaaaggtgctggacaaaggaggaggaagaattactaataagactggaggctcagttcgagggaaacaaaaatattaataagcttattgcagaacacataaccaccaaaacagctaagcagatcagtgacaaaaggcgattgctgtccagaaagccagcagaggagccacgtgaggagcctggaacgtgtcatcacaccaggagagcagctgcgagcctgagaacggagcctgagatgagtcatcacgcccaggcagaggacagagataatggacctgggagacgccctctgccaggcagggcagctgccggagggagaacaatggacgagataagacgccaccctgataagggcaacggacagcagagacccaccaagcaaaaatcagaagaacagctgcaggcttactataaaaagacactagaggaacgactttcagctggggcacttaacaccttcccccgagcattcaagcaggtaatggaaggccgggatataaagctagtaatcaatcagacagcgcaggactgcttcggatgcctggaatccataagccaaataagaacggcaacccgagataaaaaggacacggtgacccgggagaaacacccaaagaaaccttttcagaagtggatgaagaagagagcaatcaaaaaaggtaattatcttcggttccagcgtttattttatcttgatagagggaaactggctaaaatcattttagatgatattgaatgcttgtcttgtgacataccactcagtgaaatttattcggtttttaaaacaagatgggaaacaactggtagctttaaaagccttggggactttaaaacttacgggaaggctgacaacactgccttcagagaattaattacggctaaagaaattgagaaaaatgtgcaggaaatgagcaaaggctcggctcccggtccagacgggattactcttggggacgtcgtaaagatggatcccgagttttcccggaccatggagattttcaatttatggttaacaactggtaaaatcccggacatggtgagggggtgcagaaccgttttgattccaaaatcatcaaagccggatcgtttgaaagacattaataactggagacctatcacgatcggttccatcttgctgagactgttctccaggattgtaacagctaggctgagcaaagcgtgccccctgaacccaaggcaaagaggctttatcagagcggcgggatgctctgaaaacttaaaactcctgcaaactataatttggtcggccaaaagagaacacagaccactgggtgttgtattcgtggacatcgccaaggcttttgacaccgtaagccaccagcacatcattcatgctttgcagcaaagagaggtggatccccacatcgtcggtctggtgagcaatatgtacgagaacatcagtacgtatatcaccacaaagaggaacacacacacagacaaaatccagatccgggttggagtaaagcagggtgacccgatgtcgccccttttatttaacctggcaatggaccctctattatgcaagctggaagagagtggcaaaggataccaccgaggacagagcagcatcacagcgatggcatttgcagacgatctggttttgctgagcgactcctgggaaaatatgaatacaaatattagcatactggagaccttctgcaatctgaccggactcaaaacacaggggcaaaagtgccacggcttttacatcaagccgacaaagaagtcttacaccatcaatgactgcgctgcctggactatcaacggcacacccctgaacatgatcgaccccggcgaatctgagaaatacctcggcctgcagtttgacccgtggattggaatagcaaggtccggtctctccacaaaactagatttttggcttcagcggatcgatcaagcaccacttaaacctctgcagaaaactgatattctcaaaacatacaccatccctcggctgatctacatagctgaccactcagaagtgaaaagcgcactactcgaaacccttgaccagaagatccggacagcggtcaaggaatggcttcacctacctccgtgcacctgcgatgccatcctgtactcgagcacgagagacggcggtttgggcatcaccaaattggcaggactgatccccagcgtgcaggcccgtagactgcatcggatcgcacagtcatctgacgatacgatgaaatgcttcatggaaaaagagaaaatggaacagctgcataagaaattgtggattcaagctggaggggacagagagaacataccctcgatttgggaagcaccaccgtcgagtgaaccaccaaacaacgtgagcacaaattcggaatgggaagcaccgacccagaaagataaatttccaaagccttgcaattggaggaaaaacgaattcaaaaaatggaccaaattggcatcccaaggccgcggaattgtaaattttgaaagagacaaaattagtaaccattggatccaatactacagacgcatacctcacaggaaactcctcactgcactacaactcagggccaacgtttaccccacgagagaatttctagccaggggtagacaagaccaatacatcaaggcgtgtaggcactgcgatgcggacaacgaatcctgcgcccacatcatcggcaactgcccagtgacacaggacgcccgaatcaagaggcacaattacatctgcgaactgcttctcgaggaggcgaagaagaaggactgggtagtgttcaaggaaccgcacataagggattccaacaaggaactgtacaaacctgacctgatatttgtgaaggatgggcgtgcacttgtcgtggatgtgacagtacggtatgaagcagccaaatcatcgctggaggaagccgctgcagagaaagtgagaaagtacaaacacctggaaacggaagtaagacatctcacgaatgcaaaggacgttacttttgtgggctttcccctaggagcgcgggggaaatggcaccaagataactttaaacttttgactgagcttggcctctccaaatcgaggcaagtgaaaatggcagagactttttccacagtagcgctcttttcatctgtggacattgtacatatgtttgccagtagggccagaaaatctatggttatgtgataataggctgccttctgcggggcttgccttctggccatgcccttcttctctcccttgcacctgtacctcttggtctttgaataaagcctgagtaggaaggaccggtaaaaaaaaaaaaaaaaaaaaaaaaaaaaaaacgttgactaaaaaaaaaaaaaaaaaaaaaaaaaaaaaaaaaaaaaaaaaaaaaaaaaaaaaaaaaaaaaaaaaaaaaa

SEQ ID NO: 10865 - DNA, 5264 bp, synthetic construct
  source 1..5264: mol_type = other DNA
gaaataagagagaaaagaagagtaagaagaaatataagagaattcgccaccatggcccctaagaaaaagcggaaggtgaatatcagcggctctagctgcggcagccccaacagcgccgacaccagcagcgacttcaaggacctgtggaccaagctgaaggaatgccacgaccgggaagtgcagggactccaggtgaaggtcaccaaactcaagcaagaaagaatcctggacgcccagagactggaagaattcttcaccaagaaccagcagctgagagagcagcagaaagtgctgcacgagacaatcaaggttctggaagatagactgcgggccggcctgtgcgacagatgcgccgtgaccgaggaacacatgcgcaaaaagcagcaggagttcgagaacattagacagcaaaatctgaaattgatcacagagctgatgaacgagagaaacacactgcaggaggagaacaagaagctgagcgagcagctgcaacagaagatcgagaatgatcagcaacaccaggccgctgagctggaatgtgaagaggacgtgatccccgacagcccaatcacagctttcagcttttctggcgtgaacagactgaggcggaaggaaaacccccacgtgcggtacatcgagcagacccataccaagctggaacacagcgtgtgtgccaacgagatgagaaaggtgtccaagtcctccacccatccccagcacaaccctaacgaaaatgagatcctggtggctgatacctacgaccagtctcagagccctatggccaaggcccacggcaccagctcttatacccctgataagagctccttcaacctggccaccgtggtggccgagacactgggcctgggcgtgcaggaggaaagcgagacacagggcccaatgagccctctgggagatgagctgtaccactgcctggaaggcaaccacaagaaacagccttttgagtccggctccgagactcctggaacaagcgagagcgctacacctgagggcagccctaagagaaaggtgtccagcgccgagggcgctgccaaggaagagcctaaacggagaagcgccagactgagcgccaagccccccgccaaggtggaagccaagcctaagaaggccgccgctaaggacaagagcagcgataagaaagtccagaccaagggcaagcggggcgccaaaggcaaacaggccgaggtggccaaccaggagacaaaggaagatctgcctgctgagaacggcgaaaccaagaccgaggaatctccagcttctgacgaggccggagagaaggaggccaaaagcgacagcggctctgagacacctggaacaagcgagagcgccaccccggaatcctatgaacaacttgcaccacaaccgtgtgtgggagaaactttacattctagcctcccacgagacagtgaactgtttgtgcctgaagaggggagcagcgagaaggagagcgaggacgcgccaaaaacatctcctccgacgcctgggaaacatggtttggaacagactggggaggaaaaagtgatggtgactgttcctgacaaaaatccaccttgtccttgctgtggtacccgggtaaactctgtgttgaatctgattgaacatctgaaagtgtcacacgggaaaaggggggtttgttttcggtgtgcaaaatgtggaaaggaaaatagtaactatcacagtgttgtttgtcattttaagaaatgcaggggtccagagacggagaaagccccagctggggagtggatttgtgaggtatgcaacagagattttacaaccaaaattggcctgagccaacacaagagattggcacacccagcagtgagaaatcaggaaaggatcgttgcttcccaaccgaaagaaacatcaaatagaggtgctcacaaaaggtgctggacaaaggaggaggaagaattactaataagactggaggctcagttcgagggaaacaaaaatattaataagcttattgcagaacacataaccaccaaaacagctaagcagatcagtgacaaaaggcgattgctgtccagaaagccagcagaggagccacgtgaggagcctggaacgtgtcatcacaccaggagagcagctgcgagcctgagaacggagcctgagatgagtcatcacgcccaggcagaggacagagataatggacctgggagacgccctctgccaggcagggcagctgccggagggagaacaatggacgagataagacgccaccctgataagggcaacggacagcagagacccaccaagcaaaaatcagaagaacagctgcaggcttactataaaaagacactagaggaacgactttcagctggggcacttaacaccttcccccgagcattcaagcaggtaatggaaggccgggatataaagctagtaatcaatcagacagcgcaggactgcttcggatgcctggaatccataagccaaataagaacggcaacccgagataaaaaggacacggtgacccgggagaaacacccaaagaaaccttttcagaagtggatgaagaagagagcaatcaaaaaaggtaattatcttcggttccagcgtttattttatcttgatagagggaaactggctaaaatcattttagatgatattgaatgcttgtcttgtgacataccactcagtgaaatttattcggtttttaaaacaagatgggaaacaactggtagctttaaaagccttggggactttaaaacttacgggaaggctgacaacactgccttcagagaattaattacggctaaagaaattgagaaaaatgtgcaggaaatgagcaaaggctcggctcccggtccagacgggattactcttggggacgtcgtaaagatggatcccgagttttcccggaccatggagattttcaatttatggttaacaactggtaaaatcccggacatggtgagggggtgcagaaccgttttgattccaaaatcatcaaagccggatcgtttgaaagacattaataactggagacctatcacgatcggttccatcttgctgagactgttctccaggattgtaacagctaggctgagcaaagcgtgccccctgaacccaaggcaaagaggctttatcagagcggcgggatgctctgaaaacttaaaactcctgcaaactataatttggtcggccaaaagagaacacagaccactgggtgttgtattcgtggacatcgccaaggcttttgacaccgtaagccaccagcacatcattcatgctttgcagcaaagagaggtggatccccacatcgtcggtctggtgagcaatatgtacgagaacatcagtacgtatatcaccacaaagaggaacacacacacagacaaaatccagatccgggttggagtaaagcagggtgacccgatgtcgccccttttatttaacctggcaatggaccctctattatgcaagctggaagagagtggcaaaggataccaccgaggacagagcagcatcacagcgatggcatttgcagacgatctggttttgctgagcgactcctgggaaaatatgaatacaaatattagcatactggagaccttctgcaatctgaccggactcaaaacacaggggcaaaagtgccacggcttttacatcaagccgacaaagaagtcttacaccatcaatgactgcgctgcctggactatcaacggcacacccctgaacatgatcgaccccggcgaatctgagaaatacctcggcctgcagtttgacccgtggattggaatagcaaggtccggtctctccacaaaactagatttttggcttcagcggatcgatcaagcaccacttaaacctctgcagaaaactgatattctcaaaacatacaccatccctcggctgatctacatagctgaccactcagaagtgaaaagcgcactactcgaaacccttgaccagaagatccggacagcggtcaaggaatggcttcacctacctccgtgcacctgcgatgccatcctgtactcgagcacgagagacggcggtttgggcatcaccaaattggcaggactgatccccagcgtgcaggcccgtagactgcatcggatcgcacagtcatctgacgatacgatgaaatgcttcatggaaaaagagaaaatggaacagctgcataagaaattgtggattcaagctggaggggacagagagaacataccctcgatttgggaagcaccaccgtcgagtgaaccaccaaacaacgtgagcacaaattcggaatgggaagcaccgacccagaaagataaatttccaaagccttgcaattggaggaaaaacgaattcaaaaaatggaccaaattggcatcccaaggccgcggaattgtaaattttgaaagagacaaaattagtaaccattggatccaatactacagacgcatacctcacaggaaactcctcactgcactacaactcagggccaacgtttaccccacgagagaatttctagccaggggtagacaagaccaatacatcaaggcgtgtaggcactgcgatgcggacaacgaatcctgcgcccacatcatcggcaactgcccagtgacacaggacgcccgaatcaagaggcacaattacatctgcgaactgcttctcgaggaggcgaagaagaaggactgggtagtgttcaaggaaccgcacataagggattccaacaaggaactgtacaaacctgacctgatatttgtgaaggatgggcgtgcacttgtcgtggatgtgacagtacggtatgaagcagccaaatcatcgctggaggaagccgctgcagagaaagtgagaaagtacaaacacctggaaacggaagtaagacatctcacgaatgcaaaggacgttacttttgtgggctttcccctaggagcgcgggggaaatggcaccaagataactttaaacttttgactgagcttggcctctccaaatcgaggcaagtgaaaatggcagagactttttccacagtagcgctcttttcatctgtggacattgtacatatgtttgccagtagggccagaaaatctatggttatgtgataataggctgccttctgcggggcttgccttctggccatgcccttcttctctcccttgcacctgtacctcttggtctttgaataaagcctgagtaggaaggaccggtaaaaaaaaaaaaaaaaaaaaaaaaaaaaaaacgttgactaaaaaaaaaaaaaaaaaaaaaaaaaaaaaaaaaaaaaaaaaaaaaaaaaaaaaaaaaaaaaaaaaaaaaa

SEQ ID NO: 10866 - DNA, 5264 bp, synthetic construct
  source 1..5264: mol_type = other DNA
gaaataagagagaaaagaagagtaagaagaaatataagagaattcgccaccatggcccctaagaaaaagcggaaggtgaatatcagcggctctagctgcggcagccccaacagcgccgacaccagcagcgacttcaaggacctgtggaccaagctgaaggaatgccacgaccgggaagtgcagggactccaggtgaaggtcaccaaactcaagcaagaaagaatcctggacgcccagagactggaagaattcttcaccaagaaccagcagctgagagagcagcagaaagtgctgcacgagacaatcaaggttctggaagatagactgcgggccggcctgtgcgacagatgcgccgtgaccgaggaacacatgcgcaaaaagcagcaggagttcgagaacattagacagcaaaatctgaaattgatcacagagctgatgaacgagagaaacacactgcaggaggagaacaagaagctgagcgagcagctgcaacagaagatcgagaatgatcagcaacaccaggccgctgagctggaatgtgaagaggacgtgatccccgacagcccaatcacagctttcagcttttctggcgtgaacagactgaggcggaaggaaaacccccacgtgcggtacatcgagcagacccataccaagctggaacacagcgtgtgtgccaacgagatgagaaaggtgtccaagtcctccacccatccccagcacaaccctaacgaaaatgagatcctggtggctgatacctacgaccagtctcagagccctatggccaaggcccacggcaccagctcttatacccctgataagagctccttcaacctggccaccgtggtggccgagacactgggcctgggcgtgcaggaggaaagcgagacacagggcccaatgagccctctgggagatgagctgtaccactgcctggaaggcaaccacaagaaacagccttttgagtccggctccgagactcctggaacaagcgagagcgctacacctgagggcagccctaagagaaaggtgtccagcgccgagggcgctgccaaggaagagcctaaacggagaagcgccagactgagcgccaagccccccgccaaggtggaagccaagcctaagaaggccgccgctaaggacaagagcagcgataagaaagtccagaccaagggcaagcggggcgccaaaggcaaacaggccgaggtggccaaccaggagacaaaggaagatctgcctgctgagaacggcgaaaccaagaccgaggaatctccagcttctgacgaggccggagagaaggaggccaaaagcgacagcggctctgagacacctggaacaagcgagagcgccaccccggaatcctatgaacaacttgcaccacaaccgtgtgtgggagaaactttacattctagcctcccacgagacagtgaactgtttgtgcctgaagaggggagcagcgagaaggagagcgaggacgcgccaaaaacatctcctccgacgcctgggaaacatggtttggaacagactggggaggaaaaagtgatggtgactgttcctgacaaaaatccaccttgtccttgctgtggtacccgggtaaactctgtgttgaatctgattgaacatctgaaagtgtcacacgggaaaaggggggtttgttttcggtgtgcaaaatgtggaaaggaaaatagtaactatcacagtgttgtttgtcattttaagaaatgcaggggtccagagacggagaaagccccagctggggagtggatttgtgaggtatgcaacagagattttacaaccaaaattggcctgggacaacacaagagattggcacacccagcagtgagaaatcaggaaaggctggttgcttcccaaccgaaagaaacatcaaatagaggtgctcacaaaaggtgctggacaaaggaggaggaagaattactaataagactggaggctcagttcgagggaaacaaaaatattaataagcttattgcagaacacataaccaccaaaacagctaagcagatcagtgacaaaaggcgattgctgtccagaaagccagcagaggagccacgtgaggagcctggaacgtgtcatcacaccaggagagcagctgcgagcctgagaacggagcctgagatgagtcatcacgcccaggcagaggacagagataatggacctgggagacgccctctgccaggcagggcagctgccggagggagaacaatggacgagataagacgccaccctgataagggcaacggacagcagagacccaccaagcaaaaatcagaagaacagctgcaggcttactataaaaagacactagaggaacgactttcagctggggcacttaacaccttcccccgagcattcaagcaggtaatggaaggccgggatataaagctagtaatcaatcagacagcgcaggactgcttcggatgcctggaatccataagccaaataagaacggcaacccgagataaaaaggacacggtgacccgggagaaacacccaaagaaaccttttcagaagtggatgaagaagagagcaatcaaaaaaggtaattatcttcggttccagcgtttattttatcttgatagagggaaactggctaaaatcattttagatgatattgaatgcttgtcttgtgacataccactcagtgaaatttattcggtttttaaaacaagatgggaaacaactggtagctttaaaagccttggggactttaaaacttacgggaaggctgacaacactgccttcagagaattaattacggctaaagaaattgagaaaaatgtgcaggaaatgagcaaaggctcggctcccggtccagacgggattactcttggggacgtcgtaaagatggatcccgagttttcccggaccatggagattttcaatttatggttaacaactggtaaaatcccggacatggtgagggggtgcagaaccgttttgattccaaaatcatcaaagccggatcgtttgaaagacattaataactggagacctatcacgatcggttccatcttgctgagactgttctccaggattgtaacagctaggctgagcaaagcgtgccccctgaacccaaggcaaagaggctttatcagagcggcgggatgctctgaaaacttaaaactcctgcaaactataatttggtcggccaaaagagaacacagaccactgggtgttgtattcgtggacatcgccaaggcttttgacaccgtaagccaccagcacatcattcatgctttgcagcaaagagaggtggatccccacatcgtcggtctggtgagcaatatgtacgagaacatcagtacgtatatcaccacaaagaggaacacacacacagacaaaatccagatccgggttggagtaaagcagggtgacccgatgtcgccccttttatttaacctggcaatggaccctctattatgcaagctggaagagagtggcaaaggataccaccgaggacagagcagcatcacagcgatggcatttgcagacgatctggttttgctgagcgactcctgggaaaatatgaatacaaatattagcatactggagaccttctgcaatctgaccggactcaaaacacaggggcaaaagtgccacggcttttacatcaagccgacaaagaagtcttacaccatcaatgactgcgctgcctggactatcaacggcacacccctgaacatgatcgaccccggcgaatctgagaaatacctcggcctgcagtttgacccgtggattggaatagcaaggtccggtctctccacaaaactagatttttggcttcagcggatcgatcaagcaccacttaaacctctgcagaaaactgatattctcaaaacatacaccatccctcggctgatctacatagctgaccactcagaagtgaaaagcgcactactcgaaacccttgaccagaagatccggacagcggtcaaggaatggcttcacctacctccgtgcacctgcgatgccatcctgtactcgagcacgagagacggcggtttgggcatcaccaaattggcaggactgatccccagcgtgcaggcccgtagactgcatcggatcgcacagtcatctgacgatacgatgaaatgcttcatggaaaaagagaaaatggaacagctgcataagaaattgtggattcaagctggaggggacagagagaacataccctcgatttgggaagcaccaccgtcgagtgaaccaccaaacaacgtgagcacaaattcggaatgggaagcaccgacccagaaagataaatttccaaagccttgcaattggaggaaaaacgaattcaaaaaatggaccaaattggcatcccaaggccgcggaattgtaaattttgaaagagacaaaattagtaaccattggatccaatactacagacgcatacctcacaggaaactcctcactgcactacaactcagggccaacgtttaccccacgagagaatttctagccaggggtagacaagaccaatacatcaaggcgtgtaggcactgcgatgcggacaacgaatcctgcgcccacatcatcggcaactgcccagtgacacaggacgcccgaatcaagaggcacaattacatctgcgaactgcttctcgaggaggcgaagaagaaggactgggtagtgttcaaggaaccgcacataagggattccaacaaggaactgtacaaacctgacctgatatttgtgaaggatgggcgtgcacttgtcgtggatgtgacagtacggtatgaagcagccaaatcatcgctggaggaagccgctgcagagaaagtgagaaagtacaaacacctggaaacggaagtaagacatctcacgaatgcaaaggacgttacttttgtgggctttcccctaggagcgcgggggaaatggcaccaagataactttaaacttttgactgagcttggcctctccaaatcgaggcaagtgaaaatggcagagactttttccacagtagcgctcttttcatctgtggacattgtacatatgtttgccagtagggccagaaaatctatggttatgtgataataggctgccttctgcggggcttgccttctggccatgcccttcttctctcccttgcacctgtacctcttggtctttgaataaagcctgagtaggaaggaccggtaaaaaaaaaaaaaaaaaaaaaaaaaaaaaaacgttgactaaaaaaaaaaaaaaaaaaaaaaaaaaaaaaaaaaaaaaaaaaaaaaaaaaaaaaaaaaaaaaaaaaaaaa

SEQ ID NO: 10867 - DNA, 5264 bp, synthetic construct
  source 1..5264: mol_type = other DNA
gaaataagagagaaaagaagagtaagaagaaatataagagaattcgccaccatggcccctaagaaaaagcggaaggtgaatatcagcggctctagctgcggcagccccaacagcgccgacaccagcagcgacttcaaggacctgtggaccaagctgaaggaatgccacgaccgggaagtgcagggactccaggtgaaggtcaccaaactcaagcaagaaagaatcctggacgcccagagactggaagaattcttcaccaagaaccagcagctgagagagcagcagaaagtgctgcacgagacaatcaaggttctggaagatagactgcgggccggcctgtgcgacagatgcgccgtgaccgaggaacacatgcgcaaaaagcagcaggagttcgagaacattagacagcaaaatctgaaattgatcacagagctgatgaacgagagaaacacactgcaggaggagaacaagaagctgagcgagcagctgcaacagaagatcgagaatgatcagcaacaccaggccgctgagctggaatgtgaagaggacgtgatccccgacagcccaatcacagctttcagcttttctggcgtgaacagactgaggcggaaggaaaacccccacgtgcggtacatcgagcagacccataccaagctggaacacagcgtgtgtgccaacgagatgagaaaggtgtccaagtcctccacccatccccagcacaaccctaacgaaaatgagatcctggtggctgatacctacgaccagtctcagagccctatggccaaggcccacggcaccagctcttatacccctgataagagctccttcaacctggccaccgtggtggccgagacactgggcctgggcgtgcaggaggaaagcgagacacagggcccaatgagccctctgggagatgagctgtaccactgcctggaaggcaaccacaagaaacagccttttgagtccggctccgagactcctggaacaagcgagagcgctacacctgagggcagccctaagagaaaggtgtccagcgccgagggcgctgccaaggaagagcctaaacggagaagcgccagactgagcgccaagccccccgccaaggtggaagccaagcctaagaaggccgccgctaaggacaagagcagcgataagaaagtccagaccaagggcaagcggggcgccaaaggcaaacaggccgaggtggccaaccaggagacaaaggaagatctgcctgctgagaacggcgaaaccaagaccgaggaatctccagcttctgacgaggccggagagaaggaggccaaaagcgacagcggctctgagacacctggaacaagcgagagcgccaccccggaatcctatgaacaacttgcaccacaaccgtgtgtgggagaaactttacattctagcctcccacgagacagtgaactgtttgtgcctgaagaggggagcagcgagaaggagagcgaggacgcgccaaaaacatctcctccgacgcctgggaaacatggtttggaacagactggggaggaaaaagtgatggtgactgttcctgacaaaaatccaccttgtccttgctgtggtacccgggtaaactctgtgttgaatctgattgaacatctgaaagtgtcacacgggaaaaggggggtttgttttcggtgtgcaaaatgtggaaaggaaaatagtaactatcacagtgttgtttgtcattttaagaaatgcaggggtccagagacggagaaagccccagctggggagtggatttgtgaggtatgcaacagagattttacaaccaaaattggcctgggacaacacaagagattggcacacccagcagtgagaaatcaggaaaggatcgttgcttcccaaccgagagaaacatcaaatagaggtgctcacaaaaggtgctggacaaaggaggaggaagaattactaataagactggaggctcagttcgagggaaacaaaaatattaataagcttattgcagaacacataaccaccaaaacagctaagcagatcagtgacaaaaggcgattgctgtccagaaagccagcagaggagccacgtgaggagcctggaacgtgtcatcacaccaggagagcagctgcgagcctgagaacggagcctgagatgagtcatcacgcccaggcagaggacagagataatggacctgggagacgccctctgccaggcagggcagctgccggagggagaacaatggacgagataagacgccaccctgataagggcaacggacagcagagacccaccaagcaaaaatcagaagaacagctgcaggcttactataaaaagacactagaggaacgactttcagctggggcacttaacaccttcccccgagcattcaagcaggtaatggaaggccgggatataaagctagtaatcaatcagacagcgcaggactgcttcggatgcctggaatccataagccaaataagaacggcaacccgagataaaaaggacacggtgacccgggagaaacacccaaagaaaccttttcagaagtggatgaagaagagagcaatcaaaaaaggtaattatcttcggttccagcgtttattttatcttgatagagggaaactggctaaaatcattttagatgatattgaatgcttgtcttgtgacataccactcagtgaaatttattcggtttttaaaacaagatgggaaacaactggtagctttaaaagccttggggactttaaaacttacgggaaggctgacaacactgccttcagagaattaattacggctaaagaaattgagaaaaatgtgcaggaaatgagcaaaggctcggctcccggtccagacgggattactcttggggacgtcgtaaagatggatcccgagttttcccggaccatggagattttcaatttatggttaacaactggtaaaatcccggacatggtgagggggtgcagaaccgttttgattccaaaatcatcaaagccggatcgtttgaaagacattaataactggagacctatcacgatcggttccatcttgctgagactgttctccaggattgtaacagctaggctgagcaaagcgtgccccctgaacccaaggcaaagaggctttatcagagcggcgggatgctctgaaaacttaaaactcctgcaaactataatttggtcggccaaaagagaacacagaccactgggtgttgtattcgtggacatcgccaaggcttttgacaccgtaagccaccagcacatcattcatgctttgcagcaaagagaggtggatccccacatcgtcggtctggtgagcaatatgtacgagaacatcagtacgtatatcaccacaaagaggaacacacacacagacaaaatccagatccgggttggagtaaagcagggtgacccgatgtcgccccttttatttaacctggcaatggaccctctattatgcaagctggaagagagtggcaaaggataccaccgaggacagagcagcatcacagcgatggcatttgcagacgatctggttttgctgagcgactcctgggaaaatatgaatacaaatattagcatactggagaccttctgcaatctgaccggactcaaaacacaggggcaaaagtgccacggcttttacatcaagccgacaaagaagtcttacaccatcaatgactgcgctgcctggactatcaacggcacacccctgaacatgatcgaccccggcgaatctgagaaatacctcggcctgcagtttgacccgtggattggaatagcaaggtccggtctctccacaaaactagatttttggcttcagcggatcgatcaagcaccacttaaacctctgcagaaaactgatattctcaaaacatacaccatccctcggctgatctacatagctgaccactcagaagtgaaaagcgcactactcgaaacccttgaccagaagatccggacagcggtcaaggaatggcttcacctacctccgtgcacctgcgatgccatcctgtactcgagcacgagagacggcggtttgggcatcaccaaattggcaggactgatccccagcgtgcaggcccgtagactgcatcggatcgcacagtcatctgacgatacgatgaaatgcttcatggaaaaagagaaaatggaacagctgcataagaaattgtggattcaagctggaggggacagagagaacataccctcgatttgggaagcaccaccgtcgagtgaaccaccaaacaacgtgagcacaaattcggaatgggaagcaccgacccagaaagataaatttccaaagccttgcaattggaggaaaaacgaattcaaaaaatggaccaaattggcatcccaaggccgcggaattgtaaattttgaaagagacaaaattagtaaccattggatccaatactacagacgcatacctcacaggaaactcctcactgcactacaactcagggccaacgtttaccccacgagagaatttctagccaggggtagacaagaccaatacatcaaggcgtgtaggcactgcgatgcggacaacgaatcctgcgcccacatcatcggcaactgcccagtgacacaggacgcccgaatcaagaggcacaattacatctgcgaactgcttctcgaggaggcgaagaagaaggactgggtagtgttcaaggaaccgcacataagggattccaacaaggaactgtacaaacctgacctgatatttgtgaaggatgggcgtgcacttgtcgtggatgtgacagtacggtatgaagcagccaaatcatcgctggaggaagccgctgcagagaaagtgagaaagtacaaacacctggaaacggaagtaagacatctcacgaatgcaaaggacgttacttttgtgggctttcccctaggagcgcgggggaaatggcaccaagataactttaaacttttgactgagcttggcctctccaaatcgaggcaagtgaaaatggcagagactttttccacagtagcgctcttttcatctgtggacattgtacatatgtttgccagtagggccagaaaatctatggttatgtgataataggctgccttctgcggggcttgccttctggccatgcccttcttctctcccttgcacctgtacctcttggtctttgaataaagcctgagtaggaaggaccggtaaaaaaaaaaaaaaaaaaaaaaaaaaaaaaacgttgactaaaaaaaaaaaaaaaaaaaaaaaaaaaaaaaaaaaaaaaaaaaaaaaaaaaaaaaaaaaaaaaaaaaaaa

SEQ ID NO: 10868 - DNA, 5264 bp, synthetic construct
  source 1..5264: mol_type = other DNA
gaaataagagagaaaagaagagtaagaagaaatataagagaattcgccaccatggcccctaagaaaaagcggaaggtgaatatcagcggctctagctgcggcagccccaacagcgccgacaccagcagcgacttcaaggacctgtggaccaagctgaaggaatgccacgaccgggaagtgcagggactccaggtgaaggtcaccaaactcaagcaagaaagaatcctggacgcccagagactggaagaattcttcaccaagaaccagcagctgagagagcagcagaaagtgctgcacgagacaatcaaggttctggaagatagactgcgggccggcctgtgcgacagatgcgccgtgaccgaggaacacatgcgcaaaaagcagcaggagttcgagaacattagacagcaaaatctgaaattgatcacagagctgatgaacgagagaaacacactgcaggaggagaacaagaagctgagcgagcagctgcaacagaagatcgagaatgatcagcaacaccaggccgctgagctggaatgtgaagaggacgtgatccccgacagcccaatcacagctttcagcttttctggcgtgaacagactgaggcggaaggaaaacccccacgtgcggtacatcgagcagacccataccaagctggaacacagcgtgtgtgccaacgagatgagaaaggtgtccaagtcctccacccatccccagcacaaccctaacgaaaatgagatcctggtggctgatacctacgaccagtctcagagccctatggccaaggcccacggcaccagctcttatacccctgataagagctccttcaacctggccaccgtggtggccgagacactgggcctgggcgtgcaggaggaaagcgagacacagggcccaatgagccctctgggagatgagctgtaccactgcctggaaggcaaccacaagaaacagccttttgagtccggctccgagactcctggaacaagcgagagcgctacacctgagggcagccctaagagaaaggtgtccagcgccgagggcgctgccaaggaagagcctaaacggagaagcgccagactgagcgccaagccccccgccaaggtggaagccaagcctaagaaggccgccgctaaggacaagagcagcgataagaaagtccagaccaagggcaagcggggcgccaaaggcaaacaggccgaggtggccaaccaggagacaaaggaagatctgcctgctgagaacggcgaaaccaagaccgaggaatctccagcttctgacgaggccggagagaaggaggccaaaagcgacagcggctctgagacacctggaacaagcgagagcgccaccccggaatcctatgaacaacttgcaccacaaccgtgtgtgggagaaactttacattctagcctcccacgagacagtgaactgtttgtgcctgaagaggggagcagcgagaaggagagcgaggacgcgccaaaaacatctcctccgacgcctgggaaacatggtttggaacagactggggaggaaaaagtgatggtgactgttcctgacaaaaatccaccttgtccttgctgtggtacccgggtaaactctgtgttgaatctgattgaacatctgaaagtgtcacacgggaaaaggggggtttgttttcggtgtgcaaaatgtggaaaggaaaatagtaactatcacagtgttgtttgtcattttaagaaatgcaggggtccagagacggagaaagccccagctggggagtggatttgtgaggtatgcaacagagattttacaaccaaaattggcctgggacaacacaagagattggcacacccagcagtgagaaatcaggaaaggatcgttgcttcccaaccgaaagaaacatcaaatagaagagctcacaaaaggtgctggacaaaggaggaggaagaattactaataagactggaggctcagttcgagggaaacaaaaatattaataagcttattgcagaacacataaccaccaaaacagctaagcagatcagtgacaaaaggcgattgctgtccagaaagccagcagaggagccacgtgaggagcctggaacgtgtcatcacaccaggagagcagctgcgagcctgagaacggagcctgagatgagtcatcacgcccaggcagaggacagagataatggacctgggagacgccctctgccaggcagggcagctgccggagggagaacaatggacgagataagacgccaccctgataagggcaacggacagcagagacccaccaagcaaaaatcagaagaacagctgcaggcttactataaaaagacactagaggaacgactttcagctggggcacttaacaccttcccccgagcattcaagcaggtaatggaaggccgggatataaagctagtaatcaatcagacagcgcaggactgcttcggatgcctggaatccataagccaaataagaacggcaacccgagataaaaaggacacggtgacccgggagaaacacccaaagaaaccttttcagaagtggatgaagaagagagcaatcaaaaaaggtaattatcttcggttccagcgtttattttatcttgatagagggaaactggctaaaatcattttagatgatattgaatgcttgtcttgtgacataccactcagtgaaatttattcggtttttaaaacaagatgggaaacaactggtagctttaaaagccttggggactttaaaacttacgggaaggctgacaacactgccttcagagaattaattacggctaaagaaattgagaaaaatgtgcaggaaatgagcaaaggctcggctcccggtccagacgggattactcttggggacgtcgtaaagatggatcccgagttttcccggaccatggagattttcaatttatggttaacaactggtaaaatcccggacatggtgagggggtgcagaaccgttttgattccaaaatcatcaaagccggatcgtttgaaagacattaataactggagacctatcacgatcggttccatcttgctgagactgttctccaggattgtaacagctaggctgagcaaagcgtgccccctgaacccaaggcaaagaggctttatcagagcggcgggatgctctgaaaacttaaaactcctgcaaactataatttggtcggccaaaagagaacacagaccactgggtgttgtattcgtggacatcgccaaggcttttgacaccgtaagccaccagcacatcattcatgctttgcagcaaagagaggtggatccccacatcgtcggtctggtgagcaatatgtacgagaacatcagtacgtatatcaccacaaagaggaacacacacacagacaaaatccagatccgggttggagtaaagcagggtgacccgatgtcgccccttttatttaacctggcaatggaccctctattatgcaagctggaagagagtggcaaaggataccaccgaggacagagcagcatcacagcgatggcatttgcagacgatctggttttgctgagcgactcctgggaaaatatgaatacaaatattagcatactggagaccttctgcaatctgaccggactcaaaacacaggggcaaaagtgccacggcttttacatcaagccgacaaagaagtcttacaccatcaatgactgcgctgcctggactatcaacggcacacccctgaacatgatcgaccccggcgaatctgagaaatacctcggcctgcagtttgacccgtggattggaatagcaaggtccggtctctccacaaaactagatttttggcttcagcggatcgatcaagcaccacttaaacctctgcagaaaactgatattctcaaaacatacaccatccctcggctgatctacatagctgaccactcagaagtgaaaagcgcactactcgaaacccttgaccagaagatccggacagcggtcaaggaatggcttcacctacctccgtgcacctgcgatgccatcctgtactcgagcacgagagacggcggtttgggcatcaccaaattggcaggactgatccccagcgtgcaggcccgtagactgcatcggatcgcacagtcatctgacgatacgatgaaatgcttcatggaaaaagagaaaatggaacagctgcataagaaattgtggattcaagctggaggggacagagagaacataccctcgatttgggaagcaccaccgtcgagtgaaccaccaaacaacgtgagcacaaattcggaatgggaagcaccgacccagaaagataaatttccaaagccttgcaattggaggaaaaacgaattcaaaaaatggaccaaattggcatcccaaggccgcggaattgtaaattttgaaagagacaaaattagtaaccattggatccaatactacagacgcatacctcacaggaaactcctcactgcactacaactcagggccaacgtttaccccacgagagaatttctagccaggggtagacaagaccaatacatcaaggcgtgtaggcactgcgatgcggacaacgaatcctgcgcccacatcatcggcaactgcccagtgacacaggacgcccgaatcaagaggcacaattacatctgcgaactgcttctcgaggaggcgaagaagaaggactgggtagtgttcaaggaaccgcacataagggattccaacaaggaactgtacaaacctgacctgatatttgtgaaggatgggcgtgcacttgtcgtggatgtgacagtacggtatgaagcagccaaatcatcgctggaggaagccgctgcagagaaagtgagaaagtacaaacacctggaaacggaagtaagacatctcacgaatgcaaaggacgttacttttgtgggctttcccctaggagcgcgggggaaatggcaccaagataactttaaacttttgactgagcttggcctctccaaatcgaggcaagtgaaaatggcagagactttttccacagtagcgctcttttcatctgtggacattgtacatatgtttgccagtagggccagaaaatctatggttatgtgataataggctgccttctgcggggcttgccttctggccatgcccttcttctctcccttgcacctgtacctcttggtctttgaataaagcctgagtaggaaggaccggtaaaaaaaaaaaaaaaaaaaaaaaaaaaaaaacgttgactaaaaaaaaaaaaaaaaaaaaaaaaaaaaaaaaaaaaaaaaaaaaaaaaaaaaaaaaaaaaaaaaaaaaaa

SEQ ID NO: 10869 - DNA, 5264 bp, synthetic construct
  source 1..5264: mol_type = other DNA
gaaataagagagaaaagaagagtaagaagaaatataagagaattcgccaccatggcccctaagaaaaagcggaaggtgaatatcagcggctctagctgcggcagccccaacagcgccgacaccagcagcgacttcaaggacctgtggaccaagctgaaggaatgccacgaccgggaagtgcagggactccaggtgaaggtcaccaaactcaagcaagaaagaatcctggacgcccagagactggaagaattcttcaccaagaaccagcagctgagagagcagcagaaagtgctgcacgagacaatcaaggttctggaagatagactgcgggccggcctgtgcgacagatgcgccgtgaccgaggaacacatgcgcaaaaagcagcaggagttcgagaacattagacagcaaaatctgaaattgatcacagagctgatgaacgagagaaacacactgcaggaggagaacaagaagctgagcgagcagctgcaacagaagatcgagaatgatcagcaacaccaggccgctgagctggaatgtgaagaggacgtgatccccgacagcccaatcacagctttcagcttttctggcgtgaacagactgaggcggaaggaaaacccccacgtgcggtacatcgagcagacccataccaagctggaacacagcgtgtgtgccaacgagatgagaaaggtgtccaagtcctccacccatccccagcacaaccctaacgaaaatgagatcctggtggctgatacctacgaccagtctcagagccctatggccaaggcccacggcaccagctcttatacccctgataagagctccttcaacctggccaccgtggtggccgagacactgggcctgggcgtgcaggaggaaagcgagacacagggcccaatgagccctctgggagatgagctgtaccactgcctggaaggcaaccacaagaaacagccttttgagtccggctccgagactcctggaacaagcgagagcgctacacctgagggcagccctaagagaaaggtgtccagcgccgagggcgctgccaaggaagagcctaaacggagaagcgccagactgagcgccaagccccccgccaaggtggaagccaagcctaagaaggccgccgctaaggacaagagcagcgataagaaagtccagaccaagggcaagcggggcgccaaaggcaaacaggccgaggtggccaaccaggagacaaaggaagatctgcctgctgagaacggcgaaaccaagaccgaggaatctccagcttctgacgaggccggagagaaggaggccaaaagcgacagcggctctgagacacctggaacaagcgagagcgccaccccggaatcctatgaacaacttgcaccacaaccgtgtgtgggagaaactttacattctagcctcccacgagacagtgaactgtttgtgcctgaagaggggagcagcgagaaggagagcgaggacgcgccaaaaacatctcctccgacgcctgggaaacatggtttggaacagactggggaggaaaaagtgatggtgactgttcctgacaaaaatccaccttgtccttgctgtggtacccgggtaaactctgtgttgaatctgattgaacatctgaaagtgtcacacgggaaaaggggggtttgttttcggtgtgcaaaatgtggaaaggaaaatagtaactatcacagtgttgtttgtcattttaagaaatgcaggggtccagagacggagaaagccccagctggggagtggatttgtgaggtatgcaacagagattttacaaccaaaattggcctgggacaacacaagagattggcacacccagcagtgagaaatcaggaaaggatcgttgcttcccaaccgaaagaaacatcaaatagaggtgctcacaaaaggtgctggacaaaggaggaggaagaattactaataagactggaggctcagttcgagggaaacaaaaatattaataagcttattgcagaacacataaccaccagaacagctaagcagatcagtgacaaaaggcgattgctgtccagaaagccagcagaggagccacgtgaggagcctggaacgtgtcatcacaccaggagagcagctgcgagcctgagaacggagcctgagatgagtcatcacgcccaggcagaggacagagataatggacctgggagacgccctctgccaggcagggcagctgccggagggagaacaatggacgagataagacgccaccctgataagggcaacggacagcagagacccaccaagcaaaaatcagaagaacagctgcaggcttactataaaaagacactagaggaacgactttcagctggggcacttaacaccttcccccgagcattcaagcaggtaatggaaggccgggatataaagctagtaatcaatcagacagcgcaggactgcttcggatgcctggaatccataagccaaataagaacggcaacccgagataaaaaggacacggtgacccgggagaaacacccaaagaaaccttttcagaagtggatgaagaagagagcaatcaaaaaaggtaattatcttcggttccagcgtttattttatcttgatagagggaaactggctaaaatcattttagatgatattgaatgcttgtcttgtgacataccactcagtgaaatttattcggtttttaaaacaagatgggaaacaactggtagctttaaaagccttggggactttaaaacttacgggaaggctgacaacactgccttcagagaattaattacggctaaagaaattgagaaaaatgtgcaggaaatgagcaaaggctcggctcccggtccagacgggattactcttggggacgtcgtaaagatggatcccgagttttcccggaccatggagattttcaatttatggttaacaactggtaaaatcccggacatggtgagggggtgcagaaccgttttgattccaaaatcatcaaagccggatcgtttgaaagacattaataactggagacctatcacgatcggttccatcttgctgagactgttctccaggattgtaacagctaggctgagcaaagcgtgccccctgaacccaaggcaaagaggctttatcagagcggcgggatgctctgaaaacttaaaactcctgcaaactataatttggtcggccaaaagagaacacagaccactgggtgttgtattcgtggacatcgccaaggcttttgacaccgtaagccaccagcacatcattcatgctttgcagcaaagagaggtggatccccacatcgtcggtctggtgagcaatatgtacgagaacatcagtacgtatatcaccacaaagaggaacacacacacagacaaaatccagatccgggttggagtaaagcagggtgacccgatgtcgccccttttatttaacctggcaatggaccctctattatgcaagctggaagagagtggcaaaggataccaccgaggacagagcagcatcacagcgatggcatttgcagacgatctggttttgctgagcgactcctgggaaaatatgaatacaaatattagcatactggagaccttctgcaatctgaccggactcaaaacacaggggcaaaagtgccacggcttttacatcaagccgacaaagaagtcttacaccatcaatgactgcgctgcctggactatcaacggcacacccctgaacatgatcgaccccggcgaatctgagaaatacctcggcctgcagtttgacccgtggattggaatagcaaggtccggtctctccacaaaactagatttttggcttcagcggatcgatcaagcaccacttaaacctctgcagaaaactgatattctcaaaacatacaccatccctcggctgatctacatagctgaccactcagaagtgaaaagcgcactactcgaaacccttgaccagaagatccggacagcggtcaaggaatggcttcacctacctccgtgcacctgcgatgccatcctgtactcgagcacgagagacggcggtttgggcatcaccaaattggcaggactgatccccagcgtgcaggcccgtagactgcatcggatcgcacagtcatctgacgatacgatgaaatgcttcatggaaaaagagaaaatggaacagctgcataagaaattgtggattcaagctggaggggacagagagaacataccctcgatttgggaagcaccaccgtcgagtgaaccaccaaacaacgtgagcacaaattcggaatgggaagcaccgacccagaaagataaatttccaaagccttgcaattggaggaaaaacgaattcaaaaaatggaccaaattggcatcccaaggccgcggaattgtaaattttgaaagagacaaaattagtaaccattggatccaatactacagacgcatacctcacaggaaactcctcactgcactacaactcagggccaacgtttaccccacgagagaatttctagccaggggtagacaagaccaatacatcaaggcgtgtaggcactgcgatgcggacaacgaatcctgcgcccacatcatcggcaactgcccagtgacacaggacgcccgaatcaagaggcacaattacatctgcgaactgcttctcgaggaggcgaagaagaaggactgggtagtgttcaaggaaccgcacataagggattccaacaaggaactgtacaaacctgacctgatatttgtgaaggatgggcgtgcacttgtcgtggatgtgacagtacggtatgaagcagccaaatcatcgctggaggaagccgctgcagagaaagtgagaaagtacaaacacctggaaacggaagtaagacatctcacgaatgcaaaggacgttacttttgtgggctttcccctaggagcgcgggggaaatggcaccaagataactttaaacttttgactgagcttggcctctccaaatcgaggcaagtgaaaatggcagagactttttccacagtagcgctcttttcatctgtggacattgtacatatgtttgccagtagggccagaaaatctatggttatgtgataataggctgccttctgcggggcttgccttctggccatgcccttcttctctcccttgcacctgtacctcttggtctttgaataaagcctgagtaggaaggaccggtaaaaaaaaaaaaaaaaaaaaaaaaaaaaaaacgttgactaaaaaaaaaaaaaaaaaaaaaaaaaaaaaaaaaaaaaaaaaaaaaaaaaaaaaaaaaaaaaaaaaaaaaa

SEQ ID NO: 10870 - DNA, 5264 bp, synthetic construct
  source 1..5264: mol_type = other DNA
gaaataagagagaaaagaagagtaagaagaaatataagagaattcgccaccatggcccctaagaaaaagcggaaggtgaatatcagcggctctagctgcggcagccccaacagcgccgacaccagcagcgacttcaaggacctgtggaccaagctgaaggaatgccacgaccgggaagtgcagggactccaggtgaaggtcaccaaactcaagcaagaaagaatcctggacgcccagagactggaagaattcttcaccaagaaccagcagctgagagagcagcagaaagtgctgcacgagacaatcaaggttctggaagatagactgcgggccggcctgtgcgacagatgcgccgtgaccgaggaacacatgcgcaaaaagcagcaggagttcgagaacattagacagcaaaatctgaaattgatcacagagctgatgaacgagagaaacacactgcaggaggagaacaagaagctgagcgagcagctgcaacagaagatcgagaatgatcagcaacaccaggccgctgagctggaatgtgaagaggacgtgatccccgacagcccaatcacagctttcagcttttctggcgtgaacagactgaggcggaaggaaaacccccacgtgcggtacatcgagcagacccataccaagctggaacacagcgtgtgtgccaacgagatgagaaaggtgtccaagtcctccacccatccccagcacaaccctaacgaaaatgagatcctggtggctgatacctacgaccagtctcagagccctatggccaaggcccacggcaccagctcttatacccctgataagagctccttcaacctggccaccgtggtggccgagacactgggcctgggcgtgcaggaggaaagcgagacacagggcccaatgagccctctgggagatgagctgtaccactgcctggaaggcaaccacaagaaacagccttttgagtccggctccgagactcctggaacaagcgagagcgctacacctgagggcagccctaagagaaaggtgtccagcgccgagggcgctgccaaggaagagcctaaacggagaagcgccagactgagcgccaagccccccgccaaggtggaagccaagcctaagaaggccgccgctaaggacaagagcagcgataagaaagtccagaccaagggcaagcggggcgccaaaggcaaacaggccgaggtggccaaccaggagacaaaggaagatctgcctgctgagaacggcgaaaccaagaccgaggaatctccagcttctgacgaggccggagagaaggaggccaaaagcgacagcggctctgagacacctggaacaagcgagagcgccaccccggaatcctatgaacaacttgcaccacaaccgtgtgtgggagaaactttacattctagcctcccacgagacagtgaactgtttgtgcctgaagaggggagcagcgagaaggagagcgaggacgcgccaaaaacatctcctccgacgcctgggaaacatggtttggaacagactggggaggaaaaagtgatggtgactgttcctgacaaaaatccaccttgtccttgctgtggtacccgggtaaactctgtgttgaatctgattgaacatctgaaagtgtcacacgggaaaaggggggtttgttttcggtgtgcaaaatgtggaaaggaaaatagtaactatcacagtgttgtttgtcattttaagaaatgcaggggtccagagacggagaaagccccagctggggagtggatttgtgaggtatgcaacagagattttacaaccaaaattggcctgggacaacacaagagattggcacacccagcagtgagaaatcaggaaaggatcgttgcttcccaaccgaaagaaacatcaaatagaggtgctcacaaaaggtgctggacaaaggaggaggaagaattactaataagactggaggctcagttcgagggaaacaaaaatattaataagcttattgcagaacacataaccaccaaaacagctaagcagatcaaggacaaaaggcgattgctgtccagaaagccagcagaggagccacgtgaggagcctggaacgtgtcatcacaccaggagagcagctgcgagcctgagaacggagcctgagatgagtcatcacgcccaggcagaggacagagataatggacctgggagacgccctctgccaggcagggcagctgccggagggagaacaatggacgagataagacgccaccctgataagggcaacggacagcagagacccaccaagcaaaaatcagaagaacagctgcaggcttactataaaaagacactagaggaacgactttcagctggggcacttaacaccttcccccgagcattcaagcaggtaatggaaggccgggatataaagctagtaatcaatcagacagcgcaggactgcttcggatgcctggaatccataagccaaataagaacggcaacccgagataaaaaggacacggtgacccgggagaaacacccaaagaaaccttttcagaagtggatgaagaagagagcaatcaaaaaaggtaattatcttcggttccagcgtttattttatcttgatagagggaaactggctaaaatcattttagatgatattgaatgcttgtcttgtgacataccactcagtgaaatttattcggtttttaaaacaagatgggaaacaactggtagctttaaaagccttggggactttaaaacttacgggaaggctgacaacactgccttcagagaattaattacggctaaagaaattgagaaaaatgtgcaggaaatgagcaaaggctcggctcccggtccagacgggattactcttggggacgtcgtaaagatggatcccgagttttcccggaccatggagattttcaatttatggttaacaactggtaaaatcccggacatggtgagggggtgcagaaccgttttgattccaaaatcatcaaagccggatcgtttgaaagacattaataactggagacctatcacgatcggttccatcttgctgagactgttctccaggattgtaacagctaggctgagcaaagcgtgccccctgaacccaaggcaaagaggctttatcagagcggcgggatgctctgaaaacttaaaactcctgcaaactataatttggtcggccaaaagagaacacagaccactgggtgttgtattcgtggacatcgccaaggcttttgacaccgtaagccaccagcacatcattcatgctttgcagcaaagagaggtggatccccacatcgtcggtctggtgagcaatatgtacgagaacatcagtacgtatatcaccacaaagaggaacacacacacagacaaaatccagatccgggttggagtaaagcagggtgacccgatgtcgccccttttatttaacctggcaatggaccctctattatgcaagctggaagagagtggcaaaggataccaccgaggacagagcagcatcacagcgatggcatttgcagacgatctggttttgctgagcgactcctgggaaaatatgaatacaaatattagcatactggagaccttctgcaatctgaccggactcaaaacacaggggcaaaagtgccacggcttttacatcaagccgacaaagaagtcttacaccatcaatgactgcgctgcctggactatcaacggcacacccctgaacatgatcgaccccggcgaatctgagaaatacctcggcctgcagtttgacccgtggattggaatagcaaggtccggtctctccacaaaactagatttttggcttcagcggatcgatcaagcaccacttaaacctctgcagaaaactgatattctcaaaacatacaccatccctcggctgatctacatagctgaccactcagaagtgaaaagcgcactactcgaaacccttgaccagaagatccggacagcggtcaaggaatggcttcacctacctccgtgcacctgcgatgccatcctgtactcgagcacgagagacggcggtttgggcatcaccaaattggcaggactgatccccagcgtgcaggcccgtagactgcatcggatcgcacagtcatctgacgatacgatgaaatgcttcatggaaaaagagaaaatggaacagctgcataagaaattgtggattcaagctggaggggacagagagaacataccctcgatttgggaagcaccaccgtcgagtgaaccaccaaacaacgtgagcacaaattcggaatgggaagcaccgacccagaaagataaatttccaaagccttgcaattggaggaaaaacgaattcaaaaaatggaccaaattggcatcccaaggccgcggaattgtaaattttgaaagagacaaaattagtaaccattggatccaatactacagacgcatacctcacaggaaactcctcactgcactacaactcagggccaacgtttaccccacgagagaatttctagccaggggtagacaagaccaatacatcaaggcgtgtaggcactgcgatgcggacaacgaatcctgcgcccacatcatcggcaactgcccagtgacacaggacgcccgaatcaagaggcacaattacatctgcgaactgcttctcgaggaggcgaagaagaaggactgggtagtgttcaaggaaccgcacataagggattccaacaaggaactgtacaaacctgacctgatatttgtgaaggatgggcgtgcacttgtcgtggatgtgacagtacggtatgaagcagccaaatcatcgctggaggaagccgctgcagagaaagtgagaaagtacaaacacctggaaacggaagtaagacatctcacgaatgcaaaggacgttacttttgtgggctttcccctaggagcgcgggggaaatggcaccaagataactttaaacttttgactgagcttggcctctccaaatcgaggcaagtgaaaatggcagagactttttccacagtagcgctcttttcatctgtggacattgtacatatgtttgccagtagggccagaaaatctatggttatgtgataataggctgccttctgcggggcttgccttctggccatgcccttcttctctcccttgcacctgtacctcttggtctttgaataaagcctgagtaggaaggaccggtaaaaaaaaaaaaaaaaaaaaaaaaaaaaaaacgttgactaaaaaaaaaaaaaaaaaaaaaaaaaaaaaaaaaaaaaaaaaaaaaaaaaaaaaaaaaaaaaaaaaaaaaa

SEQ ID NO: 10871 - DNA, 5264 bp, synthetic construct
  source 1..5264: mol_type = other DNA
gaaataagagagaaaagaagagtaagaagaaatataagagaattcgccaccatggcccctaagaaaaagcggaaggtgaatatcagcggctctagctgcggcagccccaacagcgccgacaccagcagcgacttcaaggacctgtggaccaagctgaaggaatgccacgaccgggaagtgcagggactccaggtgaaggtcaccaaactcaagcaagaaagaatcctggacgcccagagactggaagaattcttcaccaagaaccagcagctgagagagcagcagaaagtgctgcacgagacaatcaaggttctggaagatagactgcgggccggcctgtgcgacagatgcgccgtgaccgaggaacacatgcgcaaaaagcagcaggagttcgagaacattagacagcaaaatctgaaattgatcacagagctgatgaacgagagaaacacactgcaggaggagaacaagaagctgagcgagcagctgcaacagaagatcgagaatgatcagcaacaccaggccgctgagctggaatgtgaagaggacgtgatccccgacagcccaatcacagctttcagcttttctggcgtgaacagactgaggcggaaggaaaacccccacgtgcggtacatcgagcagacccataccaagctggaacacagcgtgtgtgccaacgagatgagaaaggtgtccaagtcctccacccatccccagcacaaccctaacgaaaatgagatcctggtggctgatacctacgaccagtctcagagccctatggccaaggcccacggcaccagctcttatacccctgataagagctccttcaacctggccaccgtggtggccgagacactgggcctgggcgtgcaggaggaaagcgagacacagggcccaatgagccctctgggagatgagctgtaccactgcctggaaggcaaccacaagaaacagccttttgagtccggctccgagactcctggaacaagcgagagcgctacacctgagggcagccctaagagaaaggtgtccagcgccgagggcgctgccaaggaagagcctaaacggagaagcgccagactgagcgccaagccccccgccaaggtggaagccaagcctaagaaggccgccgctaaggacaagagcagcgataagaaagtccagaccaagggcaagcggggcgccaaaggcaaacaggccgaggtggccaaccaggagacaaaggaagatctgcctgctgagaacggcgaaaccaagaccgaggaatctccagcttctgacgaggccggagagaaggaggccaaaagcgacagcggctctgagacacctggaacaagcgagagcgccaccccggaatcctatgaacaacttgcaccacaaccgtgtgtgggagaaactttacattctagcctcccacgagacagtgaactgtttgtgcctgaagaggggagcagcgagaaggagagcgaggacgcgccaaaaacatctcctccgacgcctgggaaacatggtttggaacagactggggaggaaaaagtgatggtgactgttcctgacaaaaatccaccttgtccttgctgtggtacccgggtaaactctgtgttgaatctgattgaacatctgaaagtgtcacacgggaaaaggggggtttgttttcggtgtgcaaaatgtggaaaggaaaatagtaactatcacagtgttgtttgtcattttaagaaatgcaggggtccagagacggagaaagccccagctggggagtggatttgtgaggtatgcaacagagattttacaaccaaaattggcctgggacaacacaagagattggcacacccagcagtgagaaatcaggaaaggatcgttgcttcccaaccgaaagaaacatcaaatagaggtgctcacaaaaggtgctggacaaaggaggaggaagaattactaataagactggaggctcagttcgagggaaacaaaaatattaataagcttattgcagaacacataaccaccaaaacagctaagcagatcagtgacaaaaggcgattgctgtccagaaagccagcagaggagccacgtgaggagcctggaacgtgtcatcacaccaggagagcagctgcgagcctgagaacggagcctgagatgagtcatcacgcccaggcagaggacagagataatggacctgggagacgccctctgccaggcagggcagctgccggagggagaacaatggacgagataagacgccaccctgataagggcaacggacagcagagacccaccaagcaaaaatcagaagaacagatccaggcttactataaaaagacactagaggaacgactttcagctggggcacttaacaccttcccccgagcattcaagcaggtaatggaaggccgggatataaagctagtaatcaatcagacagcgcaggactgcttcggatgcctggaatccataagccaaataagaacggcaacccgagataaaaaggacacggtgacccgggagaaacacccaaagaaaccttttcagaagtggatgaagaagagagcaatcaaaaaaggtaattatcttcggttccagcgtttattttatcttgatagagggaaactggctaaaatcattttagatgatattgaatgcttgtcttgtgacataccactcagtgaaatttattcggtttttaaaacaagatgggaaacaactggtagctttaaaagccttggggactttaaaacttacgggaaggctgacaacactgccttcagagaattaattacggctaaagaaattgagaaaaatgtgcaggaaatgagcaaaggctcggctcccggtccagacgggattactcttggggacgtcgtaaagatggatcccgagttttcccggaccatggagattttcaatttatggttaacaactggtaaaatcccggacatggtgagggggtgcagaaccgttttgattccaaaatcatcaaagccggatcgtttgaaagacattaataactggagacctatcacgatcggttccatcttgctgagactgttctccaggattgtaacagctaggctgagcaaagcgtgccccctgaacccaaggcaaagaggctttatcagagcggcgggatgctctgaaaacttaaaactcctgcaaactataatttggtcggccaaaagagaacacagaccactgggtgttgtattcgtggacatcgccaaggcttttgacaccgtaagccaccagcacatcattcatgctttgcagcaaagagaggtggatccccacatcgtcggtctggtgagcaatatgtacgagaacatcagtacgtatatcaccacaaagaggaacacacacacagacaaaatccagatccgggttggagtaaagcagggtgacccgatgtcgccccttttatttaacctggcaatggaccctctattatgcaagctggaagagagtggcaaaggataccaccgaggacagagcagcatcacagcgatggcatttgcagacgatctggttttgctgagcgactcctgggaaaatatgaatacaaatattagcatactggagaccttctgcaatctgaccggactcaaaacacaggggcaaaagtgccacggcttttacatcaagccgacaaagaagtcttacaccatcaatgactgcgctgcctggactatcaacggcacacccctgaacatgatcgaccccggcgaatctgagaaatacctcggcctgcagtttgacccgtggattggaatagcaaggtccggtctctccacaaaactagatttttggcttcagcggatcgatcaagcaccacttaaacctctgcagaaaactgatattctcaaaacatacaccatccctcggctgatctacatagctgaccactcagaagtgaaaagcgcactactcgaaacccttgaccagaagatccggacagcggtcaaggaatggcttcacctacctccgtgcacctgcgatgccatcctgtactcgagcacgagagacggcggtttgggcatcaccaaattggcaggactgatccccagcgtgcaggcccgtagactgcatcggatcgcacagtcatctgacgatacgatgaaatgcttcatggaaaaagagaaaatggaacagctgcataagaaattgtggattcaagctggaggggacagagagaacataccctcgatttgggaagcaccaccgtcgagtgaaccaccaaacaacgtgagcacaaattcggaatgggaagcaccgacccagaaagataaatttccaaagccttgcaattggaggaaaaacgaattcaaaaaatggaccaaattggcatcccaaggccgcggaattgtaaattttgaaagagacaaaattagtaaccattggatccaatactacagacgcatacctcacaggaaactcctcactgcactacaactcagggccaacgtttaccccacgagagaatttctagccaggggtagacaagaccaatacatcaaggcgtgtaggcactgcgatgcggacaacgaatcctgcgcccacatcatcggcaactgcccagtgacacaggacgcccgaatcaagaggcacaattacatctgcgaactgcttctcgaggaggcgaagaagaaggactgggtagtgttcaaggaaccgcacataagggattccaacaaggaactgtacaaacctgacctgatatttgtgaaggatgggcgtgcacttgtcgtggatgtgacagtacggtatgaagcagccaaatcatcgctggaggaagccgctgcagagaaagtgagaaagtacaaacacctggaaacggaagtaagacatctcacgaatgcaaaggacgttacttttgtgggctttcccctaggagcgcgggggaaatggcaccaagataactttaaacttttgactgagcttggcctctccaaatcgaggcaagtgaaaatggcagagactttttccacagtagcgctcttttcatctgtggacattgtacatatgtttgccagtagggccagaaaatctatggttatgtgataataggctgccttctgcggggcttgccttctggccatgcccttcttctctcccttgcacctgtacctcttggtctttgaataaagcctgagtaggaaggaccggtaaaaaaaaaaaaaaaaaaaaaaaaaaaaaaacgttgactaaaaaaaaaaaaaaaaaaaaaaaaaaaaaaaaaaaaaaaaaaaaaaaaaaaaaaaaaaaaaaaaaaaaaa

SEQ ID NO: 10872 - DNA, 5264 bp, synthetic construct
  source 1..5264: mol_type = other DNA
gaaataagagagaaaagaagagtaagaagaaatataagagaattcgccaccatggcccctaagaaaaagcggaaggtgaatatcagcggctctagctgcggcagccccaacagcgccgacaccagcagcgacttcaaggacctgtggaccaagctgaaggaatgccacgaccgggaagtgcagggactccaggtgaaggtcaccaaactcaagcaagaaagaatcctggacgcccagagactggaagaattcttcaccaagaaccagcagctgagagagcagcagaaagtgctgcacgagacaatcaaggttctggaagatagactgcgggccggcctgtgcgacagatgcgccgtgaccgaggaacacatgcgcaaaaagcagcaggagttcgagaacattagacagcaaaatctgaaattgatcacagagctgatgaacgagagaaacacactgcaggaggagaacaagaagctgagcgagcagctgcaacagaagatcgagaatgatcagcaacaccaggccgctgagctggaatgtgaagaggacgtgatccccgacagcccaatcacagctttcagcttttctggcgtgaacagactgaggcggaaggaaaacccccacgtgcggtacatcgagcagacccataccaagctggaacacagcgtgtgtgccaacgagatgagaaaggtgtccaagtcctccacccatccccagcacaaccctaacgaaaatgagatcctggtggctgatacctacgaccagtctcagagccctatggccaaggcccacggcaccagctcttatacccctgataagagctccttcaacctggccaccgtggtggccgagacactgggcctgggcgtgcaggaggaaagcgagacacagggcccaatgagccctctgggagatgagctgtaccactgcctggaaggcaaccacaagaaacagccttttgagtccggctccgagactcctggaacaagcgagagcgctacacctgagggcagccctaagagaaaggtgtccagcgccgagggcgctgccaaggaagagcctaaacggagaagcgccagactgagcgccaagccccccgccaaggtggaagccaagcctaagaaggccgccgctaaggacaagagcagcgataagaaagtccagaccaagggcaagcggggcgccaaaggcaaacaggccgaggtggccaaccaggagacaaaggaagatctgcctgctgagaacggcgaaaccaagaccgaggaatctccagcttctgacgaggccggagagaaggaggccaaaagcgacagcggctctgagacacctggaacaagcgagagcgccaccccggaatcctatgaacaacttgcaccacaaccgtgtgtgggagaaactttacattctagcctcccacgagacagtgaactgtttgtgcctgaagaggggagcagcgagaaggagagcgaggacgcgccaaaaacatctcctccgacgcctgggaaacatggtttggaacagactggggaggaaaaagtgatggtgactgttcctgacaaaaatccaccttgtccttgctgtggtacccgggtaaactctgtgttgaatctgattgaacatctgaaagtgtcacacgggaaaaggggggtttgttttcggtgtgcaaaatgtggaaaggaaaatagtaactatcacagtgttgtttgtcattttaagaaatgcaggggtccagagacggagaaagccccagctggggagtggatttgtgaggtatgcaacagagattttacaaccaaaattggcctgggacaacacaagagattggcacacccagcagtgagaaatcaggaaaggatcgttgcttcccaaccgaaagaaacatcaaatagaggtgctcacaaaaggtgctggacaaaggaggaggaagaattactaataagactggaggctcagttcgagggaaacaaaaatattaataagcttattgcagaacacataaccaccaaaacagctaagcagatcagtgacaaaaggcgattgctgtccagaaagccagcagaggagccacgtgaggagcctggaacgtgtcatcacaccaggagagcagctgcgagcctgagaacggagcctgagatgagtcatcacgcccaggcagaggacagagataatggacctgggagacgccctctgccaggcagggcagctgccggagggagaacaatggacgagataagacgccaccctgataagggcaacggacagcagagacccaccaagcaaaaatcagaagaacagctgcaggcttactataaaaagatcctagaggaacgactttcagctggggcacttaacaccttcccccgagcattcaagcaggtaatggaaggccgggatataaagctagtaatcaatcagacagcgcaggactgcttcggatgcctggaatccataagccaaataagaacggcaacccgagataaaaaggacacggtgacccgggagaaacacccaaagaaaccttttcagaagtggatgaagaagagagcaatcaaaaaaggtaattatcttcggttccagcgtttattttatcttgatagagggaaactggctaaaatcattttagatgatattgaatgcttgtcttgtgacataccactcagtgaaatttattcggtttttaaaacaagatgggaaacaactggtagctttaaaagccttggggactttaaaacttacgggaaggctgacaacactgccttcagagaattaattacggctaaagaaattgagaaaaatgtgcaggaaatgagcaaaggctcggctcccggtccagacgggattactcttggggacgtcgtaaagatggatcccgagttttcccggaccatggagattttcaatttatggttaacaactggtaaaatcccggacatggtgagggggtgcagaaccgttttgattccaaaatcatcaaagccggatcgtttgaaagacattaataactggagacctatcacgatcggttccatcttgctgagactgttctccaggattgtaacagctaggctgagcaaagcgtgccccctgaacccaaggcaaagaggctttatcagagcggcgggatgctctgaaaacttaaaactcctgcaaactataatttggtcggccaaaagagaacacagaccactgggtgttgtattcgtggacatcgccaaggcttttgacaccgtaagccaccagcacatcattcatgctttgcagcaaagagaggtggatccccacatcgtcggtctggtgagcaatatgtacgagaacatcagtacgtatatcaccacaaagaggaacacacacacagacaaaatccagatccgggttggagtaaagcagggtgacccgatgtcgccccttttatttaacctggcaatggaccctctattatgcaagctggaagagagtggcaaaggataccaccgaggacagagcagcatcacagcgatggcatttgcagacgatctggttttgctgagcgactcctgggaaaatatgaatacaaatattagcatactggagaccttctgcaatctgaccggactcaaaacacaggggcaaaagtgccacggcttttacatcaagccgacaaagaagtcttacaccatcaatgactgcgctgcctggactatcaacggcacacccctgaacatgatcgaccccggcgaatctgagaaatacctcggcctgcagtttgacccgtggattggaatagcaaggtccggtctctccacaaaactagatttttggcttcagcggatcgatcaagcaccacttaaacctctgcagaaaactgatattctcaaaacatacaccatccctcggctgatctacatagctgaccactcagaagtgaaaagcgcactactcgaaacccttgaccagaagatccggacagcggtcaaggaatggcttcacctacctccgtgcacctgcgatgccatcctgtactcgagcacgagagacggcggtttgggcatcaccaaattggcaggactgatccccagcgtgcaggcccgtagactgcatcggatcgcacagtcatctgacgatacgatgaaatgcttcatggaaaaagagaaaatggaacagctgcataagaaattgtggattcaagctggaggggacagagagaacataccctcgatttgggaagcaccaccgtcgagtgaaccaccaaacaacgtgagcacaaattcggaatgggaagcaccgacccagaaagataaatttccaaagccttgcaattggaggaaaaacgaattcaaaaaatggaccaaattggcatcccaaggccgcggaattgtaaattttgaaagagacaaaattagtaaccattggatccaatactacagacgcatacctcacaggaaactcctcactgcactacaactcagggccaacgtttaccccacgagagaatttctagccaggggtagacaagaccaatacatcaaggcgtgtaggcactgcgatgcggacaacgaatcctgcgcccacatcatcggcaactgcccagtgacacaggacgcccgaatcaagaggcacaattacatctgcgaactgcttctcgaggaggcgaagaagaaggactgggtagtgttcaaggaaccgcacataagggattccaacaaggaactgtacaaacctgacctgatatttgtgaaggatgggcgtgcacttgtcgtggatgtgacagtacggtatgaagcagccaaatcatcgctggaggaagccgctgcagagaaagtgagaaagtacaaacacctggaaacggaagtaagacatctcacgaatgcaaaggacgttacttttgtgggctttcccctaggagcgcgggggaaatggcaccaagataactttaaacttttgactgagcttggcctctccaaatcgaggcaagtgaaaatggcagagactttttccacagtagcgctcttttcatctgtggacattgtacatatgtttgccagtagggccagaaaatctatggttatgtgataataggctgccttctgcggggcttgccttctggccatgcccttcttctctcccttgcacctgtacctcttggtctttgaataaagcctgagtaggaaggaccggtaaaaaaaaaaaaaaaaaaaaaaaaaaaaaaacgttgactaaaaaaaaaaaaaaaaaaaaaaaaaaaaaaaaaaaaaaaaaaaaaaaaaaaaaaaaaaaaaaaaaaaaaa

SEQ ID NO: 10873 - DNA, 5264 bp, synthetic construct
  source 1..5264: mol_type = other DNA
gaaataagagagaaaagaagagtaagaagaaatataagagaattcgccaccatggcccctaagaaaaagcggaaggtgaatatcagcggctctagctgcggcagccccaacagcgccgacaccagcagcgacttcaaggacctgtggaccaagctgaaggaatgccacgaccgggaagtgcagggactccaggtgaaggtcaccaaactcaagcaagaaagaatcctggacgcccagagactggaagaattcttcaccaagaaccagcagctgagagagcagcagaaagtgctgcacgagacaatcaaggttctggaagatagactgcgggccggcctgtgcgacagatgcgccgtgaccgaggaacacatgcgcaaaaagcagcaggagttcgagaacattagacagcaaaatctgaaattgatcacagagctgatgaacgagagaaacacactgcaggaggagaacaagaagctgagcgagcagctgcaacagaagatcgagaatgatcagcaacaccaggccgctgagctggaatgtgaagaggacgtgatccccgacagcccaatcacagctttcagcttttctggcgtgaacagactgaggcggaaggaaaacccccacgtgcggtacatcgagcagacccataccaagctggaacacagcgtgtgtgccaacgagatgagaaaggtgtccaagtcctccacccatccccagcacaaccctaacgaaaatgagatcctggtggctgatacctacgaccagtctcagagccctatggccaaggcccacggcaccagctcttatacccctgataagagctccttcaacctggccaccgtggtggccgagacactgggcctgggcgtgcaggaggaaagcgagacacagggcccaatgagccctctgggagatgagctgtaccactgcctggaaggcaaccacaagaaacagccttttgagtccggctccgagactcctggaacaagcgagagcgctacacctgagggcagccctaagagaaaggtgtccagcgccgagggcgctgccaaggaagagcctaaacggagaagcgccagactgagcgccaagccccccgccaaggtggaagccaagcctaagaaggccgccgctaaggacaagagcagcgataagaaagtccagaccaagggcaagcggggcgccaaaggcaaacaggccgaggtggccaaccaggagacaaaggaagatctgcctgctgagaacggcgaaaccaagaccgaggaatctccagcttctgacgaggccggagagaaggaggccaaaagcgacagcggctctgagacacctggaacaagcgagagcgccaccccggaatcctatgaacaacttgcaccacaaccgtgtgtgggagaaactttacattctagcctcccacgagacagtgaactgtttgtgcctgaagaggggagcagcgagaaggagagcgaggacgcgccaaaaacatctcctccgacgcctgggaaacatggtttggaacagactggggaggaaaaagtgatggtgactgttcctgacaaaaatccaccttgtccttgctgtggtacccgggtaaactctgtgttgaatctgattgaacatctgaaagtgtcacacgggaaaaggggggtttgttttcggtgtgcaaaatgtggaaaggaaaatagtaactatcacagtgttgtttgtcattttaagaaatgcaggggtccagagacggagaaagccccagctggggagtggatttgtgaggtatgcaacagagattttacaaccaaaattggcctgggacaacacaagagattggcacacccagcagtgagaaatcaggaaaggatcgttgcttcccaaccgaaagaaacatcaaatagaggtgctcacaaaaggtgctggacaaaggaggaggaagaattactaataagactggaggctcagttcgagggaaacaaaaatattaataagcttattgcagaacacataaccaccaaaacagctaagcagatcagtgacaaaaggcgattgctgtccagaaagccagcagaggagccacgtgaggagcctggaacgtgtcatcacaccaggagagcagctgcgagcctgagaacggagcctgagatgagtcatcacgcccaggcagaggacagagataatggacctgggagacgccctctgccaggcagggcagctgccggagggagaacaatggacgagataagacgccaccctgataagggcaacggacagcagagacccaccaagcaaaaatcagaagaacagctgcaggcttactataaaaagacaatcgaggaacgactttcagctggggcacttaacaccttcccccgagcattcaagcaggtaatggaaggccgggatataaagctagtaatcaatcagacagcgcaggactgcttcggatgcctggaatccataagccaaataagaacggcaacccgagataaaaaggacacggtgacccgggagaaacacccaaagaaaccttttcagaagtggatgaagaagagagcaatcaaaaaaggtaattatcttcggttccagcgtttattttatcttgatagagggaaactggctaaaatcattttagatgatattgaatgcttgtcttgtgacataccactcagtgaaatttattcggtttttaaaacaagatgggaaacaactggtagctttaaaagccttggggactttaaaacttacgggaaggctgacaacactgccttcagagaattaattacggctaaagaaattgagaaaaatgtgcaggaaatgagcaaaggctcggctcccggtccagacgggattactcttggggacgtcgtaaagatggatcccgagttttcccggaccatggagattttcaatttatggttaacaactggtaaaatcccggacatggtgagggggtgcagaaccgttttgattccaaaatcatcaaagccggatcgtttgaaagacattaataactggagacctatcacgatcggttccatcttgctgagactgttctccaggattgtaacagctaggctgagcaaagcgtgccccctgaacccaaggcaaagaggctttatcagagcggcgggatgctctgaaaacttaaaactcctgcaaactataatttggtcggccaaaagagaacacagaccactgggtgttgtattcgtggacatcgccaaggcttttgacaccgtaagccaccagcacatcattcatgctttgcagcaaagagaggtggatccccacatcgtcggtctggtgagcaatatgtacgagaacatcagtacgtatatcaccacaaagaggaacacacacacagacaaaatccagatccgggttggagtaaagcagggtgacccgatgtcgccccttttatttaacctggcaatggaccctctattatgcaagctggaagagagtggcaaaggataccaccgaggacagagcagcatcacagcgatggcatttgcagacgatctggttttgctgagcgactcctgggaaaatatgaatacaaatattagcatactggagaccttctgcaatctgaccggactcaaaacacaggggcaaaagtgccacggcttttacatcaagccgacaaagaagtcttacaccatcaatgactgcgctgcctggactatcaacggcacacccctgaacatgatcgaccccggcgaatctgagaaatacctcggcctgcagtttgacccgtggattggaatagcaaggtccggtctctccacaaaactagatttttggcttcagcggatcgatcaagcaccacttaaacctctgcagaaaactgatattctcaaaacatacaccatccctcggctgatctacatagctgaccactcagaagtgaaaagcgcactactcgaaacccttgaccagaagatccggacagcggtcaaggaatggcttcacctacctccgtgcacctgcgatgccatcctgtactcgagcacgagagacggcggtttgggcatcaccaaattggcaggactgatccccagcgtgcaggcccgtagactgcatcggatcgcacagtcatctgacgatacgatgaaatgcttcatggaaaaagagaaaatggaacagctgcataagaaattgtggattcaagctggaggggacagagagaacataccctcgatttgggaagcaccaccgtcgagtgaaccaccaaacaacgtgagcacaaattcggaatgggaagcaccgacccagaaagataaatttccaaagccttgcaattggaggaaaaacgaattcaaaaaatggaccaaattggcatcccaaggccgcggaattgtaaattttgaaagagacaaaattagtaaccattggatccaatactacagacgcatacctcacaggaaactcctcactgcactacaactcagggccaacgtttaccccacgagagaatttctagccaggggtagacaagaccaatacatcaaggcgtgtaggcactgcgatgcggacaacgaatcctgcgcccacatcatcggcaactgcccagtgacacaggacgcccgaatcaagaggcacaattacatctgcgaactgcttctcgaggaggcgaagaagaaggactgggtagtgttcaaggaaccgcacataagggattccaacaaggaactgtacaaacctgacctgatatttgtgaaggatgggcgtgcacttgtcgtggatgtgacagtacggtatgaagcagccaaatcatcgctggaggaagccgctgcagagaaagtgagaaagtacaaacacctggaaacggaagtaagacatctcacgaatgcaaaggacgttacttttgtgggctttcccctaggagcgcgggggaaatggcaccaagataactttaaacttttgactgagcttggcctctccaaatcgaggcaagtgaaaatggcagagactttttccacagtagcgctcttttcatctgtggacattgtacatatgtttgccagtagggccagaaaatctatggttatgtgataataggctgccttctgcggggcttgccttctggccatgcccttcttctctcccttgcacctgtacctcttggtctttgaataaagcctgagtaggaaggaccggtaaaaaaaaaaaaaaaaaaaaaaaaaaaaaaacgttgactaaaaaaaaaaaaaaaaaaaaaaaaaaaaaaaaaaaaaaaaaaaaaaaaaaaaaaaaaaaaaaaaaaaaaa

SEQ ID NO: 10874 - DNA, 5264 bp, synthetic construct
  source 1..5264: mol_type = other DNA
gaaataagagagaaaagaagagtaagaagaaatataagagaattcgccaccatggcccctaagaaaaagcggaaggtgaatatcagcggctctagctgcggcagccccaacagcgccgacaccagcagcgacttcaaggacctgtggaccaagctgaaggaatgccacgaccgggaagtgcagggactccaggtgaaggtcaccaaactcaagcaagaaagaatcctggacgcccagagactggaagaattcttcaccaagaaccagcagctgagagagcagcagaaagtgctgcacgagacaatcaaggttctggaagatagactgcgggccggcctgtgcgacagatgcgccgtgaccgaggaacacatgcgcaaaaagcagcaggagttcgagaacattagacagcaaaatctgaaattgatcacagagctgatgaacgagagaaacacactgcaggaggagaacaagaagctgagcgagcagctgcaacagaagatcgagaatgatcagcaacaccaggccgctgagctggaatgtgaagaggacgtgatccccgacagcccaatcacagctttcagcttttctggcgtgaacagactgaggcggaaggaaaacccccacgtgcggtacatcgagcagacccataccaagctggaacacagcgtgtgtgccaacgagatgagaaaggtgtccaagtcctccacccatccccagcacaaccctaacgaaaatgagatcctggtggctgatacctacgaccagtctcagagccctatggccaaggcccacggcaccagctcttatacccctgataagagctccttcaacctggccaccgtggtggccgagacactgggcctgggcgtgcaggaggaaagcgagacacagggcccaatgagccctctgggagatgagctgtaccactgcctggaaggcaaccacaagaaacagccttttgagtccggctccgagactcctggaacaagcgagagcgctacacctgagggcagccctaagagaaaggtgtccagcgccgagggcgctgccaaggaagagcctaaacggagaagcgccagactgagcgccaagccccccgccaaggtggaagccaagcctaagaaggccgccgctaaggacaagagcagcgataagaaagtccagaccaagggcaagcggggcgccaaaggcaaacaggccgaggtggccaaccaggagacaaaggaagatctgcctgctgagaacggcgaaaccaagaccgaggaatctccagcttctgacgaggccggagagaaggaggccaaaagcgacagcggctctgagacacctggaacaagcgagagcgccaccccggaatcctatgaacaacttgcaccacaaccgtgtgtgggagaaactttacattctagcctcccacgagacagtgaactgtttgtgcctgaagaggggagcagcgagaaggagagcgaggacgcgccaaaaacatctcctccgacgcctgggaaacatggtttggaacagactggggaggaaaaagtgatggtgactgttcctgacaaaaatccaccttgtccttgctgtggtacccgggtaaactctgtgttgaatctgattgaacatctgaaagtgtcacacgggaaaaggggggtttgttttcggtgtgcaaaatgtggaaaggaaaatagtaactatcacagtgttgtttgtcattttaagaaatgcaggggtccagagacggagaaagccccagctggggagtggatttgtgaggtatgcaacagagattttacaaccaaaattggcctgggacaacacaagagattggcacacccagcagtgagaaatcaggaaaggatcgttgcttcccaaccgaaagaaacatcaaatagaggtgctcacaaaaggtgctggacaaaggaggaggaagaattactaataagactggaggctcagttcgagggaaacaaaaatattaataagcttattgcagaacacataaccaccaaaacagctaagcagatcagtgacaaaaggcgattgctgtccagaaagccagcagaggagccacgtgaggagcctggaacgtgtcatcacaccaggagagcagctgcgagcctgagaacggagcctgagatgagtcatcacgcccaggcagaggacagagataatggacctgggagacgccctctgccaggcagggcagctgccggagggagaacaatggacgagataagacgccaccctgataagggcaacggacagcagagacccaccaagcaaaaatcagaagaacagctgcaggcttactataaaaagacactagaggaacgactttcagctggggcacttaacaccttcccccgagcactgaagcaggtaatggaaggccgggatataaagctagtaatcaatcagacagcgcaggactgcttcggatgcctggaatccataagccaaataagaacggcaacccgagataaaaaggacacggtgacccgggagaaacacccaaagaaaccttttcagaagtggatgaagaagagagcaatcaaaaaaggtaattatcttcggttccagcgtttattttatcttgatagagggaaactggctaaaatcattttagatgatattgaatgcttgtcttgtgacataccactcagtgaaatttattcggtttttaaaacaagatgggaaacaactggtagctttaaaagccttggggactttaaaacttacgggaaggctgacaacactgccttcagagaattaattacggctaaagaaattgagaaaaatgtgcaggaaatgagcaaaggctcggctcccggtccagacgggattactcttggggacgtcgtaaagatggatcccgagttttcccggaccatggagattttcaatttatggttaacaactggtaaaatcccggacatggtgagggggtgcagaaccgttttgattccaaaatcatcaaagccggatcgtttgaaagacattaataactggagacctatcacgatcggttccatcttgctgagactgttctccaggattgtaacagctaggctgagcaaagcgtgccccctgaacccaaggcaaagaggctttatcagagcggcgggatgctctgaaaacttaaaactcctgcaaactataatttggtcggccaaaagagaacacagaccactgggtgttgtattcgtggacatcgccaaggcttttgacaccgtaagccaccagcacatcattcatgctttgcagcaaagagaggtggatccccacatcgtcggtctggtgagcaatatgtacgagaacatcagtacgtatatcaccacaaagaggaacacacacacagacaaaatccagatccgggttggagtaaagcagggtgacccgatgtcgccccttttatttaacctggcaatggaccctctattatgcaagctggaagagagtggcaaaggataccaccgaggacagagcagcatcacagcgatggcatttgcagacgatctggttttgctgagcgactcctgggaaaatatgaatacaaatattagcatactggagaccttctgcaatctgaccggactcaaaacacaggggcaaaagtgccacggcttttacatcaagccgacaaagaagtcttacaccatcaatgactgcgctgcctggactatcaacggcacacccctgaacatgatcgaccccggcgaatctgagaaatacctcggcctgcagtttgacccgtggattggaatagcaaggtccggtctctccacaaaactagatttttggcttcagcggatcgatcaagcaccacttaaacctctgcagaaaactgatattctcaaaacatacaccatccctcggctgatctacatagctgaccactcagaagtgaaaagcgcactactcgaaacccttgaccagaagatccggacagcggtcaaggaatggcttcacctacctccgtgcacctgcgatgccatcctgtactcgagcacgagagacggcggtttgggcatcaccaaattggcaggactgatccccagcgtgcaggcccgtagactgcatcggatcgcacagtcatctgacgatacgatgaaatgcttcatggaaaaagagaaaatggaacagctgcataagaaattgtggattcaagctggaggggacagagagaacataccctcgatttgggaagcaccaccgtcgagtgaaccaccaaacaacgtgagcacaaattcggaatgggaagcaccgacccagaaagataaatttccaaagccttgcaattggaggaaaaacgaattcaaaaaatggaccaaattggcatcccaaggccgcggaattgtaaattttgaaagagacaaaattagtaaccattggatccaatactacagacgcatacctcacaggaaactcctcactgcactacaactcagggccaacgtttaccccacgagagaatttctagccaggggtagacaagaccaatacatcaaggcgtgtaggcactgcgatgcggacaacgaatcctgcgcccacatcatcggcaactgcccagtgacacaggacgcccgaatcaagaggcacaattacatctgcgaactgcttctcgaggaggcgaagaagaaggactgggtagtgttcaaggaaccgcacataagggattccaacaaggaactgtacaaacctgacctgatatttgtgaaggatgggcgtgcacttgtcgtggatgtgacagtacggtatgaagcagccaaatcatcgctggaggaagccgctgcagagaaagtgagaaagtacaaacacctggaaacggaagtaagacatctcacgaatgcaaaggacgttacttttgtgggctttcccctaggagcgcgggggaaatggcaccaagataactttaaacttttgactgagcttggcctctccaaatcgaggcaagtgaaaatggcagagactttttccacagtagcgctcttttcatctgtggacattgtacatatgtttgccagtagggccagaaaatctatggttatgtgataataggctgccttctgcggggcttgccttctggccatgcccttcttctctcccttgcacctgtacctcttggtctttgaataaagcctgagtaggaaggaccggtaaaaaaaaaaaaaaaaaaaaaaaaaaaaaaacgttgactaaaaaaaaaaaaaaaaaaaaaaaaaaaaaaaaaaaaaaaaaaaaaaaaaaaaaaaaaaaaaaaaaaaaaa

SEQ ID NO: 10875 - DNA, 5264 bp, synthetic construct
  source 1..5264: mol_type = other DNA
gaaataagagagaaaagaagagtaagaagaaatataagagaattcgccaccatggcccctaagaaaaagcggaaggtgaatatcagcggctctagctgcggcagccccaacagcgccgacaccagcagcgacttcaaggacctgtggaccaagctgaaggaatgccacgaccgggaagtgcagggactccaggtgaaggtcaccaaactcaagcaagaaagaatcctggacgcccagagactggaagaattcttcaccaagaaccagcagctgagagagcagcagaaagtgctgcacgagacaatcaaggttctggaagatagactgcgggccggcctgtgcgacagatgcgccgtgaccgaggaacacatgcgcaaaaagcagcaggagttcgagaacattagacagcaaaatctgaaattgatcacagagctgatgaacgagagaaacacactgcaggaggagaacaagaagctgagcgagcagctgcaacagaagatcgagaatgatcagcaacaccaggccgctgagctggaatgtgaagaggacgtgatccccgacagcccaatcacagctttcagcttttctggcgtgaacagactgaggcggaaggaaaacccccacgtgcggtacatcgagcagacccataccaagctggaacacagcgtgtgtgccaacgagatgagaaaggtgtccaagtcctccacccatccccagcacaaccctaacgaaaatgagatcctggtggctgatacctacgaccagtctcagagccctatggccaaggcccacggcaccagctcttatacccctgataagagctccttcaacctggccaccgtggtggccgagacactgggcctgggcgtgcaggaggaaagcgagacacagggcccaatgagccctctgggagatgagctgtaccactgcctggaaggcaaccacaagaaacagccttttgagtccggctccgagactcctggaacaagcgagagcgctacacctgagggcagccctaagagaaaggtgtccagcgccgagggcgctgccaaggaagagcctaaacggagaagcgccagactgagcgccaagccccccgccaaggtggaagccaagcctaagaaggccgccgctaaggacaagagcagcgataagaaagtccagaccaagggcaagcggggcgccaaaggcaaacaggccgaggtggccaaccaggagacaaaggaagatctgcctgctgagaacggcgaaaccaagaccgaggaatctccagcttctgacgaggccggagagaaggaggccaaaagcgacagcggctctgagacacctggaacaagcgagagcgccaccccggaatcctatgaacaacttgcaccacaaccgtgtgtgggagaaactttacattctagcctcccacgagacagtgaactgtttgtgcctgaagaggggagcagcgagaaggagagcgaggacgcgccaaaaacatctcctccgacgcctgggaaacatggtttggaacagactggggaggaaaaagtgatggtgactgttcctgacaaaaatccaccttgtccttgctgtggtacccgggtaaactctgtgttgaatctgattgaacatctgaaagtgtcacacgggaaaaggggggtttgttttcggtgtgcaaaatgtggaaaggaaaatagtaactatcacagtgttgtttgtcattttaagaaatgcaggggtccagagacggagaaagccccagctggggagtggatttgtgaggtatgcaacagagattttacaaccaaaattggcctgggacaacacaagagattggcacacccagcagtgagaaatcaggaaaggatcgttgcttcccaaccgaaagaaacatcaaatagaggtgctcacaaaaggtgctggacaaaggaggaggaagaattactaataagactggaggctcagttcgagggaaacaaaaatattaataagcttattgcagaacacataaccaccaaaacagctaagcagatcagtgacaaaaggcgattgctgtccagaaagccagcagaggagccacgtgaggagcctggaacgtgtcatcacaccaggagagcagctgcgagcctgagaacggagcctgagatgagtcatcacgcccaggcagaggacagagataatggacctgggagacgccctctgccaggcagggcagctgccggagggagaacaatggacgagataagacgccaccctgataagggcaacggacagcagagacccaccaagcaaaaatcagaagaacagctgcaggcttactataaaaagacactagaggaacgactttcagctggggcacttaacaccttcccccgagcattcaagcaggtactggaaggccgggatataaagctagtaatcaatcagacagcgcaggactgcttcggatgcctggaatccataagccaaataagaacggcaacccgagataaaaaggacacggtgacccgggagaaacacccaaagaaaccttttcagaagtggatgaagaagagagcaatcaaaaaaggtaattatcttcggttccagcgtttattttatcttgatagagggaaactggctaaaatcattttagatgatattgaatgcttgtcttgtgacataccactcagtgaaatttattcggtttttaaaacaagatgggaaacaactggtagctttaaaagccttggggactttaaaacttacgggaaggctgacaacactgccttcagagaattaattacggctaaagaaattgagaaaaatgtgcaggaaatgagcaaaggctcggctcccggtccagacgggattactcttggggacgtcgtaaagatggatcccgagttttcccggaccatggagattttcaatttatggttaacaactggtaaaatcccggacatggtgagggggtgcagaaccgttttgattccaaaatcatcaaagccggatcgtttgaaagacattaataactggagacctatcacgatcggttccatcttgctgagactgttctccaggattgtaacagctaggctgagcaaagcgtgccccctgaacccaaggcaaagaggctttatcagagcggcgggatgctctgaaaacttaaaactcctgcaaactataatttggtcggccaaaagagaacacagaccactgggtgttgtattcgtggacatcgccaaggcttttgacaccgtaagccaccagcacatcattcatgctttgcagcaaagagaggtggatccccacatcgtcggtctggtgagcaatatgtacgagaacatcagtacgtatatcaccacaaagaggaacacacacacagacaaaatccagatccgggttggagtaaagcagggtgacccgatgtcgccccttttatttaacctggcaatggaccctctattatgcaagctggaagagagtggcaaaggataccaccgaggacagagcagcatcacagcgatggcatttgcagacgatctggttttgctgagcgactcctgggaaaatatgaatacaaatattagcatactggagaccttctgcaatctgaccggactcaaaacacaggggcaaaagtgccacggcttttacatcaagccgacaaagaagtcttacaccatcaatgactgcgctgcctggactatcaacggcacacccctgaacatgatcgaccccggcgaatctgagaaatacctcggcctgcagtttgacccgtggattggaatagcaaggtccggtctctccacaaaactagatttttggcttcagcggatcgatcaagcaccacttaaacctctgcagaaaactgatattctcaaaacatacaccatccctcggctgatctacatagctgaccactcagaagtgaaaagcgcactactcgaaacccttgaccagaagatccggacagcggtcaaggaatggcttcacctacctccgtgcacctgcgatgccatcctgtactcgagcacgagagacggcggtttgggcatcaccaaattggcaggactgatccccagcgtgcaggcccgtagactgcatcggatcgcacagtcatctgacgatacgatgaaatgcttcatggaaaaagagaaaatggaacagctgcataagaaattgtggattcaagctggaggggacagagagaacataccctcgatttgggaagcaccaccgtcgagtgaaccaccaaacaacgtgagcacaaattcggaatgggaagcaccgacccagaaagataaatttccaaagccttgcaattggaggaaaaacgaattcaaaaaatggaccaaattggcatcccaaggccgcggaattgtaaattttgaaagagacaaaattagtaaccattggatccaatactacagacgcatacctcacaggaaactcctcactgcactacaactcagggccaacgtttaccccacgagagaatttctagccaggggtagacaagaccaatacatcaaggcgtgtaggcactgcgatgcggacaacgaatcctgcgcccacatcatcggcaactgcccagtgacacaggacgcccgaatcaagaggcacaattacatctgcgaactgcttctcgaggaggcgaagaagaaggactgggtagtgttcaaggaaccgcacataagggattccaacaaggaactgtacaaacctgacctgatatttgtgaaggatgggcgtgcacttgtcgtggatgtgacagtacggtatgaagcagccaaatcatcgctggaggaagccgctgcagagaaagtgagaaagtacaaacacctggaaacggaagtaagacatctcacgaatgcaaaggacgttacttttgtgggctttcccctaggagcgcgggggaaatggcaccaagataactttaaacttttgactgagcttggcctctccaaatcgaggcaagtgaaaatggcagagactttttccacagtagcgctcttttcatctgtggacattgtacatatgtttgccagtagggccagaaaatctatggttatgtgataataggctgccttctgcggggcttgccttctggccatgcccttcttctctcccttgcacctgtacctcttggtctttgaataaagcctgagtaggaaggaccggtaaaaaaaaaaaaaaaaaaaaaaaaaaaaaaacgttgactaaaaaaaaaaaaaaaaaaaaaaaaaaaaaaaaaaaaaaaaaaaaaaaaaaaaaaaaaaaaaaaaaaaaaa

SEQ ID NO: 10876 - DNA, 5264 bp, synthetic construct
  source 1..5264: mol_type = other DNA
gaaataagagagaaaagaagagtaagaagaaatataagagaattcgccaccatggcccctaagaaaaagcggaaggtgaatatcagcggctctagctgcggcagccccaacagcgccgacaccagcagcgacttcaaggacctgtggaccaagctgaaggaatgccacgaccgggaagtgcagggactccaggtgaaggtcaccaaactcaagcaagaaagaatcctggacgcccagagactggaagaattcttcaccaagaaccagcagctgagagagcagcagaaagtgctgcacgagacaatcaaggttctggaagatagactgcgggccggcctgtgcgacagatgcgccgtgaccgaggaacacatgcgcaaaaagcagcaggagttcgagaacattagacagcaaaatctgaaattgatcacagagctgatgaacgagagaaacacactgcaggaggagaacaagaagctgagcgagcagctgcaacagaagatcgagaatgatcagcaacaccaggccgctgagctggaatgtgaagaggacgtgatccccgacagcccaatcacagctttcagcttttctggcgtgaacagactgaggcggaaggaaaacccccacgtgcggtacatcgagcagacccataccaagctggaacacagcgtgtgtgccaacgagatgagaaaggtgtccaagtcctccacccatccccagcacaaccctaacgaaaatgagatcctggtggctgatacctacgaccagtctcagagccctatggccaaggcccacggcaccagctcttatacccctgataagagctccttcaacctggccaccgtggtggccgagacactgggcctgggcgtgcaggaggaaagcgagacacagggcccaatgagccctctgggagatgagctgtaccactgcctggaaggcaaccacaagaaacagccttttgagtccggctccgagactcctggaacaagcgagagcgctacacctgagggcagccctaagagaaaggtgtccagcgccgagggcgctgccaaggaagagcctaaacggagaagcgccagactgagcgccaagccccccgccaaggtggaagccaagcctaagaaggccgccgctaaggacaagagcagcgataagaaagtccagaccaagggcaagcggggcgccaaaggcaaacaggccgaggtggccaaccaggagacaaaggaagatctgcctgctgagaacggcgaaaccaagaccgaggaatctccagcttctgacgaggccggagagaaggaggccaaaagcgacagcggctctgagacacctggaacaagcgagagcgccaccccggaatcctatgaacaacttgcaccacaaccgtgtgtgggagaaactttacattctagcctcccacgagacagtgaactgtttgtgcctgaagaggggagcagcgagaaggagagcgaggacgcgccaaaaacatctcctccgacgcctgggaaacatggtttggaacagactggggaggaaaaagtgatggtgactgttcctgacaaaaatccaccttgtccttgctgtggtacccgggtaaactctgtgttgaatctgattgaacatctgaaagtgtcacacgggaaaaggggggtttgttttcggtgtgcaaaatgtggaaaggaaaatagtaactatcacagtgttgtttgtcattttaagaaatgcaggggtccagagacggagaaagccccagctggggagtggatttgtgaggtatgcaacagagattttacaaccaaaattggcctgggacaacacaagagattggcacacccagcagtgagaaatcaggaaaggatcgttgcttcccaaccgaaagaaacatcaaatagaggtgctcacaaaaggtgctggacaaaggaggaggaagaattactaataagactggaggctcagttcgagggaaacaaaaatattaataagcttattgcagaacacataaccaccaaaacagctaagcagatcagtgacaaaaggcgattgctgtccagaaagccagcagaggagccacgtgaggagcctggaacgtgtcatcacaccaggagagcagctgcgagcctgagaacggagcctgagatgagtcatcacgcccaggcagaggacagagataatggacctgggagacgccctctgccaggcagggcagctgccggagggagaacaatggacgagataagacgccaccctgataagggcaacggacagcagagacccaccaagcaaaaatcagaagaacagctgcaggcttactataaaaagacactagaggaacgactttcagctggggcacttaacaccttcccccgagcattcaagcaggtaatggaaggccgggatataaagctagtaatcaatcagacagcgagagactgcttcggatgcctggaatccataagccaaataagaacggcaacccgagataaaaaggacacggtgacccgggagaaacacccaaagaaaccttttcagaagtggatgaagaagagagcaatcaaaaaaggtaattatcttcggttccagcgtttattttatcttgatagagggaaactggctaaaatcattttagatgatattgaatgcttgtcttgtgacataccactcagtgaaatttattcggtttttaaaacaagatgggaaacaactggtagctttaaaagccttggggactttaaaacttacgggaaggctgacaacactgccttcagagaattaattacggctaaagaaattgagaaaaatgtgcaggaaatgagcaaaggctcggctcccggtccagacgggattactcttggggacgtcgtaaagatggatcccgagttttcccggaccatggagattttcaatttatggttaacaactggtaaaatcccggacatggtgagggggtgcagaaccgttttgattccaaaatcatcaaagccggatcgtttgaaagacattaataactggagacctatcacgatcggttccatcttgctgagactgttctccaggattgtaacagctaggctgagcaaagcgtgccccctgaacccaaggcaaagaggctttatcagagcggcgggatgctctgaaaacttaaaactcctgcaaactataatttggtcggccaaaagagaacacagaccactgggtgttgtattcgtggacatcgccaaggcttttgacaccgtaagccaccagcacatcattcatgctttgcagcaaagagaggtggatccccacatcgtcggtctggtgagcaatatgtacgagaacatcagtacgtatatcaccacaaagaggaacacacacacagacaaaatccagatccgggttggagtaaagcagggtgacccgatgtcgccccttttatttaacctggcaatggaccctctattatgcaagctggaagagagtggcaaaggataccaccgaggacagagcagcatcacagcgatggcatttgcagacgatctggttttgctgagcgactcctgggaaaatatgaatacaaatattagcatactggagaccttctgcaatctgaccggactcaaaacacaggggcaaaagtgccacggcttttacatcaagccgacaaagaagtcttacaccatcaatgactgcgctgcctggactatcaacggcacacccctgaacatgatcgaccccggcgaatctgagaaatacctcggcctgcagtttgacccgtggattggaatagcaaggtccggtctctccacaaaactagatttttggcttcagcggatcgatcaagcaccacttaaacctctgcagaaaactgatattctcaaaacatacaccatccctcggctgatctacatagctgaccactcagaagtgaaaagcgcactactcgaaacccttgaccagaagatccggacagcggtcaaggaatggcttcacctacctccgtgcacctgcgatgccatcctgtactcgagcacgagagacggcggtttgggcatcaccaaattggcaggactgatccccagcgtgcaggcccgtagactgcatcggatcgcacagtcatctgacgatacgatgaaatgcttcatggaaaaagagaaaatggaacagctgcataagaaattgtggattcaagctggaggggacagagagaacataccctcgatttgggaagcaccaccgtcgagtgaaccaccaaacaacgtgagcacaaattcggaatgggaagcaccgacccagaaagataaatttccaaagccttgcaattggaggaaaaacgaattcaaaaaatggaccaaattggcatcccaaggccgcggaattgtaaattttgaaagagacaaaattagtaaccattggatccaatactacagacgcatacctcacaggaaactcctcactgcactacaactcagggccaacgtttaccccacgagagaatttctagccaggggtagacaagaccaatacatcaaggcgtgtaggcactgcgatgcggacaacgaatcctgcgcccacatcatcggcaactgcccagtgacacaggacgcccgaatcaagaggcacaattacatctgcgaactgcttctcgaggaggcgaagaagaaggactgggtagtgttcaaggaaccgcacataagggattccaacaaggaactgtacaaacctgacctgatatttgtgaaggatgggcgtgcacttgtcgtggatgtgacagtacggtatgaagcagccaaatcatcgctggaggaagccgctgcagagaaagtgagaaagtacaaacacctggaaacggaagtaagacatctcacgaatgcaaaggacgttacttttgtgggctttcccctaggagcgcgggggaaatggcaccaagataactttaaacttttgactgagcttggcctctccaaatcgaggcaagtgaaaatggcagagactttttccacagtagcgctcttttcatctgtggacattgtacatatgtttgccagtagggccagaaaatctatggttatgtgataataggctgccttctgcggggcttgccttctggccatgcccttcttctctcccttgcacctgtacctcttggtctttgaataaagcctgagtaggaaggaccggtaaaaaaaaaaaaaaaaaaaaaaaaaaaaaaacgttgactaaaaaaaaaaaaaaaaaaaaaaaaaaaaaaaaaaaaaaaaaaaaaaaaaaaaaaaaaaaaaaaaaaaaaa

SEQ ID NO: 10877 - DNA, 5264 bp, synthetic construct
  source 1..5264: mol_type = other DNA
gaaataagagagaaaagaagagtaagaagaaatataagagaattcgccaccatggcccctaagaaaaagcggaaggtgaatatcagcggctctagctgcggcagccccaacagcgccgacaccagcagcgacttcaaggacctgtggaccaagctgaaggaatgccacgaccgggaagtgcagggactccaggtgaaggtcaccaaactcaagcaagaaagaatcctggacgcccagagactggaagaattcttcaccaagaaccagcagctgagagagcagcagaaagtgctgcacgagacaatcaaggttctggaagatagactgcgggccggcctgtgcgacagatgcgccgtgaccgaggaacacatgcgcaaaaagcagcaggagttcgagaacattagacagcaaaatctgaaattgatcacagagctgatgaacgagagaaacacactgcaggaggagaacaagaagctgagcgagcagctgcaacagaagatcgagaatgatcagcaacaccaggccgctgagctggaatgtgaagaggacgtgatccccgacagcccaatcacagctttcagcttttctggcgtgaacagactgaggcggaaggaaaacccccacgtgcggtacatcgagcagacccataccaagctggaacacagcgtgtgtgccaacgagatgagaaaggtgtccaagtcctccacccatccccagcacaaccctaacgaaaatgagatcctggtggctgatacctacgaccagtctcagagccctatggccaaggcccacggcaccagctcttatacccctgataagagctccttcaacctggccaccgtggtggccgagacactgggcctgggcgtgcaggaggaaagcgagacacagggcccaatgagccctctgggagatgagctgtaccactgcctggaaggcaaccacaagaaacagccttttgagtccggctccgagactcctggaacaagcgagagcgctacacctgagggcagccctaagagaaaggtgtccagcgccgagggcgctgccaaggaagagcctaaacggagaagcgccagactgagcgccaagccccccgccaaggtggaagccaagcctaagaaggccgccgctaaggacaagagcagcgataagaaagtccagaccaagggcaagcggggcgccaaaggcaaacaggccgaggtggccaaccaggagacaaaggaagatctgcctgctgagaacggcgaaaccaagaccgaggaatctccagcttctgacgaggccggagagaaggaggccaaaagcgacagcggctctgagacacctggaacaagcgagagcgccaccccggaatcctatgaacaacttgcaccacaaccgtgtgtgggagaaactttacattctagcctcccacgagacagtgaactgtttgtgcctgaagaggggagcagcgagaaggagagcgaggacgcgccaaaaacatctcctccgacgcctgggaaacatggtttggaacagactggggaggaaaaagtgatggtgactgttcctgacaaaaatccaccttgtccttgctgtggtacccgggtaaactctgtgttgaatctgattgaacatctgaaagtgtcacacgggaaaaggggggtttgttttcggtgtgcaaaatgtggaaaggaaaatagtaactatcacagtgttgtttgtcattttaagaaatgcaggggtccagagacggagaaagccccagctggggagtggatttgtgaggtatgcaacagagattttacaaccaaaattggcctgggacaacacaagagattggcacacccagcagtgagaaatcaggaaaggatcgttgcttcccaaccgaaagaaacatcaaatagaggtgctcacaaaaggtgctggacaaaggaggaggaagaattactaataagactggaggctcagttcgagggaaacaaaaatattaataagcttattgcagaacacataaccaccaaaacagctaagcagatcagtgacaaaaggcgattgctgtccagaaagccagcagaggagccacgtgaggagcctggaacgtgtcatcacaccaggagagcagctgcgagcctgagaacggagcctgagatgagtcatcacgcccaggcagaggacagagataatggacctgggagacgccctctgccaggcagggcagctgccggagggagaacaatggacgagataagacgccaccctgataagggcaacggacagcagagacccaccaagcaaaaatcagaagaacagctgcaggcttactataaaaagacactagaggaacgactttcagctggggcacttaacaccttcccccgagcattcaagcaggtaatggaaggccgggatataaagctagtaatcaatcagacagcgcaggactgcatcggatgcctggaatccataagccaaataagaacggcaacccgagataaaaaggacacggtgacccgggagaaacacccaaagaaaccttttcagaagtggatgaagaagagagcaatcaaaaaaggtaattatcttcggttccagcgtttattttatcttgatagagggaaactggctaaaatcattttagatgatattgaatgcttgtcttgtgacataccactcagtgaaatttattcggtttttaaaacaagatgggaaacaactggtagctttaaaagccttggggactttaaaacttacgggaaggctgacaacactgccttcagagaattaattacggctaaagaaattgagaaaaatgtgcaggaaatgagcaaaggctcggctcccggtccagacgggattactcttggggacgtcgtaaagatggatcccgagttttcccggaccatggagattttcaatttatggttaacaactggtaaaatcccggacatggtgagggggtgcagaaccgttttgattccaaaatcatcaaagccggatcgtttgaaagacattaataactggagacctatcacgatcggttccatcttgctgagactgttctccaggattgtaacagctaggctgagcaaagcgtgccccctgaacccaaggcaaagaggctttatcagagcggcgggatgctctgaaaacttaaaactcctgcaaactataatttggtcggccaaaagagaacacagaccactgggtgttgtattcgtggacatcgccaaggcttttgacaccgtaagccaccagcacatcattcatgctttgcagcaaagagaggtggatccccacatcgtcggtctggtgagcaatatgtacgagaacatcagtacgtatatcaccacaaagaggaacacacacacagacaaaatccagatccgggttggagtaaagcagggtgacccgatgtcgccccttttatttaacctggcaatggaccctctattatgcaagctggaagagagtggcaaaggataccaccgaggacagagcagcatcacagcgatggcatttgcagacgatctggttttgctgagcgactcctgggaaaatatgaatacaaatattagcatactggagaccttctgcaatctgaccggactcaaaacacaggggcaaaagtgccacggcttttacatcaagccgacaaagaagtcttacaccatcaatgactgcgctgcctggactatcaacggcacacccctgaacatgatcgaccccggcgaatctgagaaatacctcggcctgcagtttgacccgtggattggaatagcaaggtccggtctctccacaaaactagatttttggcttcagcggatcgatcaagcaccacttaaacctctgcagaaaactgatattctcaaaacatacaccatccctcggctgatctacatagctgaccactcagaagtgaaaagcgcactactcgaaacccttgaccagaagatccggacagcggtcaaggaatggcttcacctacctccgtgcacctgcgatgccatcctgtactcgagcacgagagacggcggtttgggcatcaccaaattggcaggactgatccccagcgtgcaggcccgtagactgcatcggatcgcacagtcatctgacgatacgatgaaatgcttcatggaaaaagagaaaatggaacagctgcataagaaattgtggattcaagctggaggggacagagagaacataccctcgatttgggaagcaccaccgtcgagtgaaccaccaaacaacgtgagcacaaattcggaatgggaagcaccgacccagaaagataaatttccaaagccttgcaattggaggaaaaacgaattcaaaaaatggaccaaattggcatcccaaggccgcggaattgtaaattttgaaagagacaaaattagtaaccattggatccaatactacagacgcatacctcacaggaaactcctcactgcactacaactcagggccaacgtttaccccacgagagaatttctagccaggggtagacaagaccaatacatcaaggcgtgtaggcactgcgatgcggacaacgaatcctgcgcccacatcatcggcaactgcccagtgacacaggacgcccgaatcaagaggcacaattacatctgcgaactgcttctcgaggaggcgaagaagaaggactgggtagtgttcaaggaaccgcacataagggattccaacaaggaactgtacaaacctgacctgatatttgtgaaggatgggcgtgcacttgtcgtggatgtgacagtacggtatgaagcagccaaatcatcgctggaggaagccgctgcagagaaagtgagaaagtacaaacacctggaaacggaagtaagacatctcacgaatgcaaaggacgttacttttgtgggctttcccctaggagcgcgggggaaatggcaccaagataactttaaacttttgactgagcttggcctctccaaatcgaggcaagtgaaaatggcagagactttttccacagtagcgctcttttcatctgtggacattgtacatatgtttgccagtagggccagaaaatctatggttatgtgataataggctgccttctgcggggcttgccttctggccatgcccttcttctctcccttgcacctgtacctcttggtctttgaataaagcctgagtaggaaggaccggtaaaaaaaaaaaaaaaaaaaaaaaaaaaaaaacgttgactaaaaaaaaaaaaaaaaaaaaaaaaaaaaaaaaaaaaaaaaaaaaaaaaaaaaaaaaaaaaaaaaaaaaaa

SEQ ID NO: 10878 - DNA, 5264 bp, synthetic construct
  source 1..5264: mol_type = other DNA
gaaataagagagaaaagaagagtaagaagaaatataagagaattcgccaccatggcccctaagaaaaagcggaaggtgaatatcagcggctctagctgcggcagccccaacagcgccgacaccagcagcgacttcaaggacctgtggaccaagctgaaggaatgccacgaccgggaagtgcagggactccaggtgaaggtcaccaaactcaagcaagaaagaatcctggacgcccagagactggaagaattcttcaccaagaaccagcagctgagagagcagcagaaagtgctgcacgagacaatcaaggttctggaagatagactgcgggccggcctgtgcgacagatgcgccgtgaccgaggaacacatgcgcaaaaagcagcaggagttcgagaacattagacagcaaaatctgaaattgatcacagagctgatgaacgagagaaacacactgcaggaggagaacaagaagctgagcgagcagctgcaacagaagatcgagaatgatcagcaacaccaggccgctgagctggaatgtgaagaggacgtgatccccgacagcccaatcacagctttcagcttttctggcgtgaacagactgaggcggaaggaaaacccccacgtgcggtacatcgagcagacccataccaagctggaacacagcgtgtgtgccaacgagatgagaaaggtgtccaagtcctccacccatccccagcacaaccctaacgaaaatgagatcctggtggctgatacctacgaccagtctcagagccctatggccaaggcccacggcaccagctcttatacccctgataagagctccttcaacctggccaccgtggtggccgagacactgggcctgggcgtgcaggaggaaagcgagacacagggcccaatgagccctctgggagatgagctgtaccactgcctggaaggcaaccacaagaaacagccttttgagtccggctccgagactcctggaacaagcgagagcgctacacctgagggcagccctaagagaaaggtgtccagcgccgagggcgctgccaaggaagagcctaaacggagaagcgccagactgagcgccaagccccccgccaaggtggaagccaagcctaagaaggccgccgctaaggacaagagcagcgataagaaagtccagaccaagggcaagcggggcgccaaaggcaaacaggccgaggtggccaaccaggagacaaaggaagatctgcctgctgagaacggcgaaaccaagaccgaggaatctccagcttctgacgaggccggagagaaggaggccaaaagcgacagcggctctgagacacctggaacaagcgagagcgccaccccggaatcctatgaacaacttgcaccacaaccgtgtgtgggagaaactttacattctagcctcccacgagacagtgaactgtttgtgcctgaagaggggagcagcgagaaggagagcgaggacgcgccaaaaacatctcctccgacgcctgggaaacatggtttggaacagactggggaggaaaaagtgatggtgactgttcctgacaaaaatccaccttgtccttgctgtggtacccgggtaaactctgtgttgaatctgattgaacatctgaaagtgtcacacgggaaaaggggggtttgttttcggtgtgcaaaatgtggaaaggaaaatagtaactatcacagtgttgtttgtcattttaagaaatgcaggggtccagagacggagaaagccccagctggggagtggatttgtgaggtatgcaacagagattttacaaccaaaattggcctgggacaacacaagagattggcacacccagcagtgagaaatcaggaaaggatcgttgcttcccaaccgaaagaaacatcaaatagaggtgctcacaaaaggtgctggacaaaggaggaggaagaattactaataagactggaggctcagttcgagggaaacaaaaatattaataagcttattgcagaacacataaccaccaaaacagctaagcagatcagtgacaaaaggcgattgctgtccagaaagccagcagaggagccacgtgaggagcctggaacgtgtcatcacaccaggagagcagctgcgagcctgagaacggagcctgagatgagtcatcacgcccaggcagaggacagagataatggacctgggagacgccctctgccaggcagggcagctgccggagggagaacaatggacgagataagacgccaccctgataagggcaacggacagcagagacccaccaagcaaaaatcagaagaacagctgcaggcttactataaaaagacactagaggaacgactttcagctggggcacttaacaccttcccccgagcattcaagcaggtaatggaaggccgggatataaagctagtaatcaatcagacagcgcaggactgcttcaagtgcctggaatccataagccaaataagaacggcaacccgagataaaaaggacacggtgacccgggagaaacacccaaagaaaccttttcagaagtggatgaagaagagagcaatcaaaaaaggtaattatcttcggttccagcgtttattttatcttgatagagggaaactggctaaaatcattttagatgatattgaatgcttgtcttgtgacataccactcagtgaaatttattcggtttttaaaacaagatgggaaacaactggtagctttaaaagccttggggactttaaaacttacgggaaggctgacaacactgccttcagagaattaattacggctaaagaaattgagaaaaatgtgcaggaaatgagcaaaggctcggctcccggtccagacgggattactcttggggacgtcgtaaagatggatcccgagttttcccggaccatggagattttcaatttatggttaacaactggtaaaatcccggacatggtgagggggtgcagaaccgttttgattccaaaatcatcaaagccggatcgtttgaaagacattaataactggagacctatcacgatcggttccatcttgctgagactgttctccaggattgtaacagctaggctgagcaaagcgtgccccctgaacccaaggcaaagaggctttatcagagcggcgggatgctctgaaaacttaaaactcctgcaaactataatttggtcggccaaaagagaacacagaccactgggtgttgtattcgtggacatcgccaaggcttttgacaccgtaagccaccagcacatcattcatgctttgcagcaaagagaggtggatccccacatcgtcggtctggtgagcaatatgtacgagaacatcagtacgtatatcaccacaaagaggaacacacacacagacaaaatccagatccgggttggagtaaagcagggtgacccgatgtcgccccttttatttaacctggcaatggaccctctattatgcaagctggaagagagtggcaaaggataccaccgaggacagagcagcatcacagcgatggcatttgcagacgatctggttttgctgagcgactcctgggaaaatatgaatacaaatattagcatactggagaccttctgcaatctgaccggactcaaaacacaggggcaaaagtgccacggcttttacatcaagccgacaaagaagtcttacaccatcaatgactgcgctgcctggactatcaacggcacacccctgaacatgatcgaccccggcgaatctgagaaatacctcggcctgcagtttgacccgtggattggaatagcaaggtccggtctctccacaaaactagatttttggcttcagcggatcgatcaagcaccacttaaacctctgcagaaaactgatattctcaaaacatacaccatccctcggctgatctacatagctgaccactcagaagtgaaaagcgcactactcgaaacccttgaccagaagatccggacagcggtcaaggaatggcttcacctacctccgtgcacctgcgatgccatcctgtactcgagcacgagagacggcggtttgggcatcaccaaattggcaggactgatccccagcgtgcaggcccgtagactgcatcggatcgcacagtcatctgacgatacgatgaaatgcttcatggaaaaagagaaaatggaacagctgcataagaaattgtggattcaagctggaggggacagagagaacataccctcgatttgggaagcaccaccgtcgagtgaaccaccaaacaacgtgagcacaaattcggaatgggaagcaccgacccagaaagataaatttccaaagccttgcaattggaggaaaaacgaattcaaaaaatggaccaaattggcatcccaaggccgcggaattgtaaattttgaaagagacaaaattagtaaccattggatccaatactacagacgcatacctcacaggaaactcctcactgcactacaactcagggccaacgtttaccccacgagagaatttctagccaggggtagacaagaccaatacatcaaggcgtgtaggcactgcgatgcggacaacgaatcctgcgcccacatcatcggcaactgcccagtgacacaggacgcccgaatcaagaggcacaattacatctgcgaactgcttctcgaggaggcgaagaagaaggactgggtagtgttcaaggaaccgcacataagggattccaacaaggaactgtacaaacctgacctgatatttgtgaaggatgggcgtgcacttgtcgtggatgtgacagtacggtatgaagcagccaaatcatcgctggaggaagccgctgcagagaaagtgagaaagtacaaacacctggaaacggaagtaagacatctcacgaatgcaaaggacgttacttttgtgggctttcccctaggagcgcgggggaaatggcaccaagataactttaaacttttgactgagcttggcctctccaaatcgaggcaagtgaaaatggcagagactttttccacagtagcgctcttttcatctgtggacattgtacatatgtttgccagtagggccagaaaatctatggttatgtgataataggctgccttctgcggggcttgccttctggccatgcccttcttctctcccttgcacctgtacctcttggtctttgaataaagcctgagtaggaaggaccggtaaaaaaaaaaaaaaaaaaaaaaaaaaaaaaacgttgactaaaaaaaaaaaaaaaaaaaaaaaaaaaaaaaaaaaaaaaaaaaaaaaaaaaaaaaaaaaaaaaaaaaaaa

SEQ ID NO: 10879 - DNA, 5264 bp, synthetic construct
  source 1..5264: mol_type = other DNA
gaaataagagagaaaagaagagtaagaagaaatataagagaattcgccaccatggcccctaagaaaaagcggaaggtgaatatcagcggctctagctgcggcagccccaacagcgccgacaccagcagcgacttcaaggacctgtggaccaagctgaaggaatgccacgaccgggaagtgcagggactccaggtgaaggtcaccaaactcaagcaagaaagaatcctggacgcccagagactggaagaattcttcaccaagaaccagcagctgagagagcagcagaaagtgctgcacgagacaatcaaggttctggaagatagactgcgggccggcctgtgcgacagatgcgccgtgaccgaggaacacatgcgcaaaaagcagcaggagttcgagaacattagacagcaaaatctgaaattgatcacagagctgatgaacgagagaaacacactgcaggaggagaacaagaagctgagcgagcagctgcaacagaagatcgagaatgatcagcaacaccaggccgctgagctggaatgtgaagaggacgtgatccccgacagcccaatcacagctttcagcttttctggcgtgaacagactgaggcggaaggaaaacccccacgtgcggtacatcgagcagacccataccaagctggaacacagcgtgtgtgccaacgagatgagaaaggtgtccaagtcctccacccatccccagcacaaccctaacgaaaatgagatcctggtggctgatacctacgaccagtctcagagccctatggccaaggcccacggcaccagctcttatacccctgataagagctccttcaacctggccaccgtggtggccgagacactgggcctgggcgtgcaggaggaaagcgagacacagggcccaatgagccctctgggagatgagctgtaccactgcctggaaggcaaccacaagaaacagccttttgagtccggctccgagactcctggaacaagcgagagcgctacacctgagggcagccctaagagaaaggtgtccagcgccgagggcgctgccaaggaagagcctaaacggagaagcgccagactgagcgccaagccccccgccaaggtggaagccaagcctaagaaggccgccgctaaggacaagagcagcgataagaaagtccagaccaagggcaagcggggcgccaaaggcaaacaggccgaggtggccaaccaggagacaaaggaagatctgcctgctgagaacggcgaaaccaagaccgaggaatctccagcttctgacgaggccggagagaaggaggccaaaagcgacagcggctctgagacacctggaacaagcgagagcgccaccccggaatcctatgaacaacttgcaccacaaccgtgtgtgggagaaactttacattctagcctcccacgagacagtgaactgtttgtgcctgaagaggggagcagcgagaaggagagcgaggacgcgccaaaaacatctcctccgacgcctgggaaacatggtttggaacagactggggaggaaaaagtgatggtgactgttcctgacaaaaatccaccttgtccttgctgtggtacccgggtaaactctgtgttgaatctgattgaacatctgaaagtgtcacacgggaaaaggggggtttgttttcggtgtgcaaaatgtggaaaggaaaatagtaactatcacagtgttgtttgtcattttaagaaatgcaggggtccagagacggagaaagccccagctggggagtggatttgtgaggtatgcaacagagattttacaaccaaaattggcctgggacaacacaagagattggcacacccagcagtgagaaatcaggaaaggatcgttgcttcccaaccgaaagaaacatcaaatagaggtgctcacaaaaggtgctggacaaaggaggaggaagaattactaataagactggaggctcagttcgagggaaacaaaaatattaataagcttattgcagaacacataaccaccaaaacagctaagcagatcagtgacaaaaggcgattgctgtccagaaagccagcagaggagccacgtgaggagcctggaacgtgtcatcacaccaggagagcagctgcgagcctgagaacggagcctgagatgagtcatcacgcccaggcagaggacagagataatggacctgggagacgccctctgccaggcagggcagctgccggagggagaacaatggacgagataagacgccaccctgataagggcaacggacagcagagacccaccaagcaaaaatcagaagaacagctgcaggcttactataaaaagacactagaggaacgactttcagctggggcacttaacaccttcccccgagcattcaagcaggtaatggaaggccgggatataaagctagtaatcaatcagacagcgcaggactgcttcggactgctggaatccataagccaaataagaacggcaacccgagataaaaaggacacggtgacccgggagaaacacccaaagaaaccttttcagaagtggatgaagaagagagcaatcaaaaaaggtaattatcttcggttccagcgtttattttatcttgatagagggaaactggctaaaatcattttagatgatattgaatgcttgtcttgtgacataccactcagtgaaatttattcggtttttaaaacaagatgggaaacaactggtagctttaaaagccttggggactttaaaacttacgggaaggctgacaacactgccttcagagaattaattacggctaaagaaattgagaaaaatgtgcaggaaatgagcaaaggctcggctcccggtccagacgggattactcttggggacgtcgtaaagatggatcccgagttttcccggaccatggagattttcaatttatggttaacaactggtaaaatcccggacatggtgagggggtgcagaaccgttttgattccaaaatcatcaaagccggatcgtttgaaagacattaataactggagacctatcacgatcggttccatcttgctgagactgttctccaggattgtaacagctaggctgagcaaagcgtgccccctgaacccaaggcaaagaggctttatcagagcggcgggatgctctgaaaacttaaaactcctgcaaactataatttggtcggccaaaagagaacacagaccactgggtgttgtattcgtggacatcgccaaggcttttgacaccgtaagccaccagcacatcattcatgctttgcagcaaagagaggtggatccccacatcgtcggtctggtgagcaatatgtacgagaacatcagtacgtatatcaccacaaagaggaacacacacacagacaaaatccagatccgggttggagtaaagcagggtgacccgatgtcgccccttttatttaacctggcaatggaccctctattatgcaagctggaagagagtggcaaaggataccaccgaggacagagcagcatcacagcgatggcatttgcagacgatctggttttgctgagcgactcctgggaaaatatgaatacaaatattagcatactggagaccttctgcaatctgaccggactcaaaacacaggggcaaaagtgccacggcttttacatcaagccgacaaagaagtcttacaccatcaatgactgcgctgcctggactatcaacggcacacccctgaacatgatcgaccccggcgaatctgagaaatacctcggcctgcagtttgacccgtggattggaatagcaaggtccggtctctccacaaaactagatttttggcttcagcggatcgatcaagcaccacttaaacctctgcagaaaactgatattctcaaaacatacaccatccctcggctgatctacatagctgaccactcagaagtgaaaagcgcactactcgaaacccttgaccagaagatccggacagcggtcaaggaatggcttcacctacctccgtgcacctgcgatgccatcctgtactcgagcacgagagacggcggtttgggcatcaccaaattggcaggactgatccccagcgtgcaggcccgtagactgcatcggatcgcacagtcatctgacgatacgatgaaatgcttcatggaaaaagagaaaatggaacagctgcataagaaattgtggattcaagctggaggggacagagagaacataccctcgatttgggaagcaccaccgtcgagtgaaccaccaaacaacgtgagcacaaattcggaatgggaagcaccgacccagaaagataaatttccaaagccttgcaattggaggaaaaacgaattcaaaaaatggaccaaattggcatcccaaggccgcggaattgtaaattttgaaagagacaaaattagtaaccattggatccaatactacagacgcatacctcacaggaaactcctcactgcactacaactcagggccaacgtttaccccacgagagaatttctagccaggggtagacaagaccaatacatcaaggcgtgtaggcactgcgatgcggacaacgaatcctgcgcccacatcatcggcaactgcccagtgacacaggacgcccgaatcaagaggcacaattacatctgcgaactgcttctcgaggaggcgaagaagaaggactgggtagtgttcaaggaaccgcacataagggattccaacaaggaactgtacaaacctgacctgatatttgtgaaggatgggcgtgcacttgtcgtggatgtgacagtacggtatgaagcagccaaatcatcgctggaggaagccgctgcagagaaagtgagaaagtacaaacacctggaaacggaagtaagacatctcacgaatgcaaaggacgttacttttgtgggctttcccctaggagcgcgggggaaatggcaccaagataactttaaacttttgactgagcttggcctctccaaatcgaggcaagtgaaaatggcagagactttttccacagtagcgctcttttcatctgtggacattgtacatatgtttgccagtagggccagaaaatctatggttatgtgataataggctgccttctgcggggcttgccttctggccatgcccttcttctctcccttgcacctgtacctcttggtctttgaataaagcctgagtaggaaggaccggtaaaaaaaaaaaaaaaaaaaaaaaaaaaaaaacgttgactaaaaaaaaaaaaaaaaaaaaaaaaaaaaaaaaaaaaaaaaaaaaaaaaaaaaaaaaaaaaaaaaaaaaaa

SEQ ID NO: 10880 - DNA, 5264 bp, synthetic construct
  source 1..5264: mol_type = other DNA
gaaataagagagaaaagaagagtaagaagaaatataagagaattcgccaccatggcccctaagaaaaagcggaaggtgaatatcagcggctctagctgcggcagccccaacagcgccgacaccagcagcgacttcaaggacctgtggaccaagctgaaggaatgccacgaccgggaagtgcagggactccaggtgaaggtcaccaaactcaagcaagaaagaatcctggacgcccagagactggaagaattcttcaccaagaaccagcagctgagagagcagcagaaagtgctgcacgagacaatcaaggttctggaagatagactgcgggccggcctgtgcgacagatgcgccgtgaccgaggaacacatgcgcaaaaagcagcaggagttcgagaacattagacagcaaaatctgaaattgatcacagagctgatgaacgagagaaacacactgcaggaggagaacaagaagctgagcgagcagctgcaacagaagatcgagaatgatcagcaacaccaggccgctgagctggaatgtgaagaggacgtgatccccgacagcccaatcacagctttcagcttttctggcgtgaacagactgaggcggaaggaaaacccccacgtgcggtacatcgagcagacccataccaagctggaacacagcgtgtgtgccaacgagatgagaaaggtgtccaagtcctccacccatccccagcacaaccctaacgaaaatgagatcctggtggctgatacctacgaccagtctcagagccctatggccaaggcccacggcaccagctcttatacccctgataagagctccttcaacctggccaccgtggtggccgagacactgggcctgggcgtgcaggaggaaagcgagacacagggcccaatgagccctctgggagatgagctgtaccactgcctggaaggcaaccacaagaaacagccttttgagtccggctccgagactcctggaacaagcgagagcgctacacctgagggcagccctaagagaaaggtgtccagcgccgagggcgctgccaaggaagagcctaaacggagaagcgccagactgagcgccaagccccccgccaaggtggaagccaagcctaagaaggccgccgctaaggacaagagcagcgataagaaagtccagaccaagggcaagcggggcgccaaaggcaaacaggccgaggtggccaaccaggagacaaaggaagatctgcctgctgagaacggcgaaaccaagaccgaggaatctccagcttctgacgaggccggagagaaggaggccaaaagcgacagcggctctgagacacctggaacaagcgagagcgccaccccggaatcctatgaacaacttgcaccacaaccgtgtgtgggagaaactttacattctagcctcccacgagacagtgaactgtttgtgcctgaagaggggagcagcgagaaggagagcgaggacgcgccaaaaacatctcctccgacgcctgggaaacatggtttggaacagactggggaggaaaaagtgatggtgactgttcctgacaaaaatccaccttgtccttgctgtggtacccgggtaaactctgtgttgaatctgattgaacatctgaaagtgtcacacgggaaaaggggggtttgttttcggtgtgcaaaatgtggaaaggaaaatagtaactatcacagtgttgtttgtcattttaagaaatgcaggggtccagagacggagaaagccccagctggggagtggatttgtgaggtatgcaacagagattttacaaccaaaattggcctgggacaacacaagagattggcacacccagcagtgagaaatcaggaaaggatcgttgcttcccaaccgaaagaaacatcaaatagaggtgctcacaaaaggtgctggacaaaggaggaggaagaattactaataagactggaggctcagttcgagggaaacaaaaatattaataagcttattgcagaacacataaccaccaaaacagctaagcagatcagtgacaaaaggcgattgctgtccagaaagccagcagaggagccacgtgaggagcctggaacgtgtcatcacaccaggagagcagctgcgagcctgagaacggagcctgagatgagtcatcacgcccaggcagaggacagagataatggacctgggagacgccctctgccaggcagggcagctgccggagggagaacaatggacgagataagacgccaccctgataagggcaacggacagcagagacccaccaagcaaaaatcagaagaacagctgcaggcttactataaaaagacactagaggaacgactttcagctggggcacttaacaccttcccccgagcattcaagcaggtaatggaaggccgggatataaagctagtaatcaatcagacagcgcaggactgcttcggatgcctggaatccataagccaaataagaacggcaacccgaaagaaaaaggacacggtgacccgggagaaacacccaaagaaaccttttcagaagtggatgaagaagagagcaatcaaaaaaggtaattatcttcggttccagcgtttattttatcttgatagagggaaactggctaaaatcattttagatgatattgaatgcttgtcttgtgacataccactcagtgaaatttattcggtttttaaaacaagatgggaaacaactggtagctttaaaagccttggggactttaaaacttacgggaaggctgacaacactgccttcagagaattaattacggctaaagaaattgagaaaaatgtgcaggaaatgagcaaaggctcggctcccggtccagacgggattactcttggggacgtcgtaaagatggatcccgagttttcccggaccatggagattttcaatttatggttaacaactggtaaaatcccggacatggtgagggggtgcagaaccgttttgattccaaaatcatcaaagccggatcgtttgaaagacattaataactggagacctatcacgatcggttccatcttgctgagactgttctccaggattgtaacagctaggctgagcaaagcgtgccccctgaacccaaggcaaagaggctttatcagagcggcgggatgctctgaaaacttaaaactcctgcaaactataatttggtcggccaaaagagaacacagaccactgggtgttgtattcgtggacatcgccaaggcttttgacaccgtaagccaccagcacatcattcatgctttgcagcaaagagaggtggatccccacatcgtcggtctggtgagcaatatgtacgagaacatcagtacgtatatcaccacaaagaggaacacacacacagacaaaatccagatccgggttggagtaaagcagggtgacccgatgtcgccccttttatttaacctggcaatggaccctctattatgcaagctggaagagagtggcaaaggataccaccgaggacagagcagcatcacagcgatggcatttgcagacgatctggttttgctgagcgactcctgggaaaatatgaatacaaatattagcatactggagaccttctgcaatctgaccggactcaaaacacaggggcaaaagtgccacggcttttacatcaagccgacaaagaagtcttacaccatcaatgactgcgctgcctggactatcaacggcacacccctgaacatgatcgaccccggcgaatctgagaaatacctcggcctgcagtttgacccgtggattggaatagcaaggtccggtctctccacaaaactagatttttggcttcagcggatcgatcaagcaccacttaaacctctgcagaaaactgatattctcaaaacatacaccatccctcggctgatctacatagctgaccactcagaagtgaaaagcgcactactcgaaacccttgaccagaagatccggacagcggtcaaggaatggcttcacctacctccgtgcacctgcgatgccatcctgtactcgagcacgagagacggcggtttgggcatcaccaaattggcaggactgatccccagcgtgcaggcccgtagactgcatcggatcgcacagtcatctgacgatacgatgaaatgcttcatggaaaaagagaaaatggaacagctgcataagaaattgtggattcaagctggaggggacagagagaacataccctcgatttgggaagcaccaccgtcgagtgaaccaccaaacaacgtgagcacaaattcggaatgggaagcaccgacccagaaagataaatttccaaagccttgcaattggaggaaaaacgaattcaaaaaatggaccaaattggcatcccaaggccgcggaattgtaaattttgaaagagacaaaattagtaaccattggatccaatactacagacgcatacctcacaggaaactcctcactgcactacaactcagggccaacgtttaccccacgagagaatttctagccaggggtagacaagaccaatacatcaaggcgtgtaggcactgcgatgcggacaacgaatcctgcgcccacatcatcggcaactgcccagtgacacaggacgcccgaatcaagaggcacaattacatctgcgaactgcttctcgaggaggcgaagaagaaggactgggtagtgttcaaggaaccgcacataagggattccaacaaggaactgtacaaacctgacctgatatttgtgaaggatgggcgtgcacttgtcgtggatgtgacagtacggtatgaagcagccaaatcatcgctggaggaagccgctgcagagaaagtgagaaagtacaaacacctggaaacggaagtaagacatctcacgaatgcaaaggacgttacttttgtgggctttcccctaggagcgcgggggaaatggcaccaagataactttaaacttttgactgagcttggcctctccaaatcgaggcaagtgaaaatggcagagactttttccacagtagcgctcttttcatctgtggacattgtacatatgtttgccagtagggccagaaaatctatggttatgtgataataggctgccttctgcggggcttgccttctggccatgcccttcttctctcccttgcacctgtacctcttggtctttgaataaagcctgagtaggaaggaccggtaaaaaaaaaaaaaaaaaaaaaaaaaaaaaaacgttgactaaaaaaaaaaaaaaaaaaaaaaaaaaaaaaaaaaaaaaaaaaaaaaaaaaaaaaaaaaaaaaaaaaaaaa

SEQ ID NO: 10881 - DNA, 5264 bp, synthetic construct
  source 1..5264: mol_type = other DNA
gaaataagagagaaaagaagagtaagaagaaatataagagaattcgccaccatggcccctaagaaaaagcggaaggtgaatatcagcggctctagctgcggcagccccaacagcgccgacaccagcagcgacttcaaggacctgtggaccaagctgaaggaatgccacgaccgggaagtgcagggactccaggtgaaggtcaccaaactcaagcaagaaagaatcctggacgcccagagactggaagaattcttcaccaagaaccagcagctgagagagcagcagaaagtgctgcacgagacaatcaaggttctggaagatagactgcgggccggcctgtgcgacagatgcgccgtgaccgaggaacacatgcgcaaaaagcagcaggagttcgagaacattagacagcaaaatctgaaattgatcacagagctgatgaacgagagaaacacactgcaggaggagaacaagaagctgagcgagcagctgcaacagaagatcgagaatgatcagcaacaccaggccgctgagctggaatgtgaagaggacgtgatccccgacagcccaatcacagctttcagcttttctggcgtgaacagactgaggcggaaggaaaacccccacgtgcggtacatcgagcagacccataccaagctggaacacagcgtgtgtgccaacgagatgagaaaggtgtccaagtcctccacccatccccagcacaaccctaacgaaaatgagatcctggtggctgatacctacgaccagtctcagagccctatggccaaggcccacggcaccagctcttatacccctgataagagctccttcaacctggccaccgtggtggccgagacactgggcctgggcgtgcaggaggaaagcgagacacagggcccaatgagccctctgggagatgagctgtaccactgcctggaaggcaaccacaagaaacagccttttgagtccggctccgagactcctggaacaagcgagagcgctacacctgagggcagccctaagagaaaggtgtccagcgccgagggcgctgccaaggaagagcctaaacggagaagcgccagactgagcgccaagccccccgccaaggtggaagccaagcctaagaaggccgccgctaaggacaagagcagcgataagaaagtccagaccaagggcaagcggggcgccaaaggcaaacaggccgaggtggccaaccaggagacaaaggaagatctgcctgctgagaacggcgaaaccaagaccgaggaatctccagcttctgacgaggccggagagaaggaggccaaaagcgacagcggctctgagacacctggaacaagcgagagcgccaccccggaatcctatgaacaacttgcaccacaaccgtgtgtgggagaaactttacattctagcctcccacgagacagtgaactgtttgtgcctgaagaggggagcagcgagaaggagagcgaggacgcgccaaaaacatctcctccgacgcctgggaaacatggtttggaacagactggggaggaaaaagtgatggtgactgttcctgacaaaaatccaccttgtccttgctgtggtacccgggtaaactctgtgttgaatctgattgaacatctgaaagtgtcacacgggaaaaggggggtttgttttcggtgtgcaaaatgtggaaaggaaaatagtaactatcacagtgttgtttgtcattttaagaaatgcaggggtccagagacggagaaagccccagctggggagtggatttgtgaggtatgcaacagagattttacaaccaaaattggcctgggacaacacaagagattggcacacccagcagtgagaaatcaggaaaggatcgttgcttcccaaccgaaagaaacatcaaatagaggtgctcacaaaaggtgctggacaaaggaggaggaagaattactaataagactggaggctcagttcgagggaaacaaaaatattaataagcttattgcagaacacataaccaccaaaacagctaagcagatcagtgacaaaaggcgattgctgtccagaaagccagcagaggagccacgtgaggagcctggaacgtgtcatcacaccaggagagcagctgcgagcctgagaacggagcctgagatgagtcatcacgcccaggcagaggacagagataatggacctgggagacgccctctgccaggcagggcagctgccggagggagaacaatggacgagataagacgccaccctgataagggcaacggacagcagagacccaccaagcaaaaatcagaagaacagctgcaggcttactataaaaagacactagaggaacgactttcagctggggcacttaacaccttcccccgagcattcaagcaggtaatggaaggccgggatataaagctagtaatcaatcagacagcgcaggactgcttcggatgcctggaatccataagccaaataagaacggcaacccgagataaaaaggacacggtgacccgggagaaacacaagaagaaaccttttcagaagtggatgaagaagagagcaatcaaaaaaggtaattatcttcggttccagcgtttattttatcttgatagagggaaactggctaaaatcattttagatgatattgaatgcttgtcttgtgacataccactcagtgaaatttattcggtttttaaaacaagatgggaaacaactggtagctttaaaagccttggggactttaaaacttacgggaaggctgacaacactgccttcagagaattaattacggctaaagaaattgagaaaaatgtgcaggaaatgagcaaaggctcggctcccggtccagacgggattactcttggggacgtcgtaaagatggatcccgagttttcccggaccatggagattttcaatttatggttaacaactggtaaaatcccggacatggtgagggggtgcagaaccgttttgattccaaaatcatcaaagccggatcgtttgaaagacattaataactggagacctatcacgatcggttccatcttgctgagactgttctccaggattgtaacagctaggctgagcaaagcgtgccccctgaacccaaggcaaagaggctttatcagagcggcgggatgctctgaaaacttaaaactcctgcaaactataatttggtcggccaaaagagaacacagaccactgggtgttgtattcgtggacatcgccaaggcttttgacaccgtaagccaccagcacatcattcatgctttgcagcaaagagaggtggatccccacatcgtcggtctggtgagcaatatgtacgagaacatcagtacgtatatcaccacaaagaggaacacacacacagacaaaatccagatccgggttggagtaaagcagggtgacccgatgtcgccccttttatttaacctggcaatggaccctctattatgcaagctggaagagagtggcaaaggataccaccgaggacagagcagcatcacagcgatggcatttgcagacgatctggttttgctgagcgactcctgggaaaatatgaatacaaatattagcatactggagaccttctgcaatctgaccggactcaaaacacaggggcaaaagtgccacggcttttacatcaagccgacaaagaagtcttacaccatcaatgactgcgctgcctggactatcaacggcacacccctgaacatgatcgaccccggcgaatctgagaaatacctcggcctgcagtttgacccgtggattggaatagcaaggtccggtctctccacaaaactagatttttggcttcagcggatcgatcaagcaccacttaaacctctgcagaaaactgatattctcaaaacatacaccatccctcggctgatctacatagctgaccactcagaagtgaaaagcgcactactcgaaacccttgaccagaagatccggacagcggtcaaggaatggcttcacctacctccgtgcacctgcgatgccatcctgtactcgagcacgagagacggcggtttgggcatcaccaaattggcaggactgatccccagcgtgcaggcccgtagactgcatcggatcgcacagtcatctgacgatacgatgaaatgcttcatggaaaaagagaaaatggaacagctgcataagaaattgtggattcaagctggaggggacagagagaacataccctcgatttgggaagcaccaccgtcgagtgaaccaccaaacaacgtgagcacaaattcggaatgggaagcaccgacccagaaagataaatttccaaagccttgcaattggaggaaaaacgaattcaaaaaatggaccaaattggcatcccaaggccgcggaattgtaaattttgaaagagacaaaattagtaaccattggatccaatactacagacgcatacctcacaggaaactcctcactgcactacaactcagggccaacgtttaccccacgagagaatttctagccaggggtagacaagaccaatacatcaaggcgtgtaggcactgcgatgcggacaacgaatcctgcgcccacatcatcggcaactgcccagtgacacaggacgcccgaatcaagaggcacaattacatctgcgaactgcttctcgaggaggcgaagaagaaggactgggtagtgttcaaggaaccgcacataagggattccaacaaggaactgtacaaacctgacctgatatttgtgaaggatgggcgtgcacttgtcgtggatgtgacagtacggtatgaagcagccaaatcatcgctggaggaagccgctgcagagaaagtgagaaagtacaaacacctggaaacggaagtaagacatctcacgaatgcaaaggacgttacttttgtgggctttcccctaggagcgcgggggaaatggcaccaagataactttaaacttttgactgagcttggcctctccaaatcgaggcaagtgaaaatggcagagactttttccacagtagcgctcttttcatctgtggacattgtacatatgtttgccagtagggccagaaaatctatggttatgtgataataggctgccttctgcggggcttgccttctggccatgcccttcttctctcccttgcacctgtacctcttggtctttgaataaagcctgagtaggaaggaccggtaaaaaaaaaaaaaaaaaaaaaaaaaaaaaaacgttgactaaaaaaaaaaaaaaaaaaaaaaaaaaaaaaaaaaaaaaaaaaaaaaaaaaaaaaaaaaaaaaaaaaaaaa

SEQ ID NO: 10882 - DNA, 5264 bp, synthetic construct
  source 1..5264: mol_type = other DNA
gaaataagagagaaaagaagagtaagaagaaatataagagaattcgccaccatggcccctaagaaaaagcggaaggtgaatatcagcggctctagctgcggcagccccaacagcgccgacaccagcagcgacttcaaggacctgtggaccaagctgaaggaatgccacgaccgggaagtgcagggactccaggtgaaggtcaccaaactcaagcaagaaagaatcctggacgcccagagactggaagaattcttcaccaagaaccagcagctgagagagcagcagaaagtgctgcacgagacaatcaaggttctggaagatagactgcgggccggcctgtgcgacagatgcgccgtgaccgaggaacacatgcgcaaaaagcagcaggagttcgagaacattagacagcaaaatctgaaattgatcacagagctgatgaacgagagaaacacactgcaggaggagaacaagaagctgagcgagcagctgcaacagaagatcgagaatgatcagcaacaccaggccgctgagctggaatgtgaagaggacgtgatccccgacagcccaatcacagctttcagcttttctggcgtgaacagactgaggcggaaggaaaacccccacgtgcggtacatcgagcagacccataccaagctggaacacagcgtgtgtgccaacgagatgagaaaggtgtccaagtcctccacccatccccagcacaaccctaacgaaaatgagatcctggtggctgatacctacgaccagtctcagagccctatggccaaggcccacggcaccagctcttatacccctgataagagctccttcaacctggccaccgtggtggccgagacactgggcctgggcgtgcaggaggaaagcgagacacagggcccaatgagccctctgggagatgagctgtaccactgcctggaaggcaaccacaagaaacagccttttgagtccggctccgagactcctggaacaagcgagagcgctacacctgagggcagccctaagagaaaggtgtccagcgccgagggcgctgccaaggaagagcctaaacggagaagcgccagactgagcgccaagccccccgccaaggtggaagccaagcctaagaaggccgccgctaaggacaagagcagcgataagaaagtccagaccaagggcaagcggggcgccaaaggcaaacaggccgaggtggccaaccaggagacaaaggaagatctgcctgctgagaacggcgaaaccaagaccgaggaatctccagcttctgacgaggccggagagaaggaggccaaaagcgacagcggctctgagacacctggaacaagcgagagcgccaccccggaatcctatgaacaacttgcaccacaaccgtgtgtgggagaaactttacattctagcctcccacgagacagtgaactgtttgtgcctgaagaggggagcagcgagaaggagagcgaggacgcgccaaaaacatctcctccgacgcctgggaaacatggtttggaacagactggggaggaaaaagtgatggtgactgttcctgacaaaaatccaccttgtccttgctgtggtacccgggtaaactctgtgttgaatctgattgaacatctgaaagtgtcacacgggaaaaggggggtttgttttcggtgtgcaaaatgtggaaaggaaaatagtaactatcacagtgttgtttgtcattttaagaaatgcaggggtccagagacggagaaagccccagctggggagtggatttgtgaggtatgcaacagagattttacaaccaaaattggcctgggacaacacaagagattggcacacccagcagtgagaaatcaggaaaggatcgttgcttcccaaccgaaagaaacatcaaatagaggtgctcacaaaaggtgctggacaaaggaggaggaagaattactaataagactggaggctcagttcgagggaaacaaaaatattaataagcttattgcagaacacataaccaccaaaacagctaagcagatcagtgacaaaaggcgattgctgtccagaaagccagcagaggagccacgtgaggagcctggaacgtgtcatcacaccaggagagcagctgcgagcctgagaacggagcctgagatgagtcatcacgcccaggcagaggacagagataatggacctgggagacgccctctgccaggcagggcagctgccggagggagaacaatggacgagataagacgccaccctgataagggcaacggacagcagagacccaccaagcaaaaatcagaagaacagctgcaggcttactataaaaagacactagaggaacgactttcagctggggcacttaacaccttcccccgagcattcaagcaggtaatggaaggccgggatataaagctagtaatcaatcagacagcgcaggactgcttcggatgcctggaatccataagccaaataagaacggcaacccgagataaaaaggacacggtgacccgggagaaacacccaaagaaaccttttcagaagtggatgaagaagagaagaatcaaaaaaggtaattatcttcggttccagcgtttattttatcttgatagagggaaactggctaaaatcattttagatgatattgaatgcttgtcttgtgacataccactcagtgaaatttattcggtttttaaaacaagatgggaaacaactggtagctttaaaagccttggggactttaaaacttacgggaaggctgacaacactgccttcagagaattaattacggctaaagaaattgagaaaaatgtgcaggaaatgagcaaaggctcggctcccggtccagacgggattactcttggggacgtcgtaaagatggatcccgagttttcccggaccatggagattttcaatttatggttaacaactggtaaaatcccggacatggtgagggggtgcagaaccgttttgattccaaaatcatcaaagccggatcgtttgaaagacattaataactggagacctatcacgatcggttccatcttgctgagactgttctccaggattgtaacagctaggctgagcaaagcgtgccccctgaacccaaggcaaagaggctttatcagagcggcgggatgctctgaaaacttaaaactcctgcaaactataatttggtcggccaaaagagaacacagaccactgggtgttgtattcgtggacatcgccaaggcttttgacaccgtaagccaccagcacatcattcatgctttgcagcaaagagaggtggatccccacatcgtcggtctggtgagcaatatgtacgagaacatcagtacgtatatcaccacaaagaggaacacacacacagacaaaatccagatccgggttggagtaaagcagggtgacccgatgtcgccccttttatttaacctggcaatggaccctctattatgcaagctggaagagagtggcaaaggataccaccgaggacagagcagcatcacagcgatggcatttgcagacgatctggttttgctgagcgactcctgggaaaatatgaatacaaatattagcatactggagaccttctgcaatctgaccggactcaaaacacaggggcaaaagtgccacggcttttacatcaagccgacaaagaagtcttacaccatcaatgactgcgctgcctggactatcaacggcacacccctgaacatgatcgaccccggcgaatctgagaaatacctcggcctgcagtttgacccgtggattggaatagcaaggtccggtctctccacaaaactagatttttggcttcagcggatcgatcaagcaccacttaaacctctgcagaaaactgatattctcaaaacatacaccatccctcggctgatctacatagctgaccactcagaagtgaaaagcgcactactcgaaacccttgaccagaagatccggacagcggtcaaggaatggcttcacctacctccgtgcacctgcgatgccatcctgtactcgagcacgagagacggcggtttgggcatcaccaaattggcaggactgatccccagcgtgcaggcccgtagactgcatcggatcgcacagtcatctgacgatacgatgaaatgcttcatggaaaaagagaaaatggaacagctgcataagaaattgtggattcaagctggaggggacagagagaacataccctcgatttgggaagcaccaccgtcgagtgaaccaccaaacaacgtgagcacaaattcggaatgggaagcaccgacccagaaagataaatttccaaagccttgcaattggaggaaaaacgaattcaaaaaatggaccaaattggcatcccaaggccgcggaattgtaaattttgaaagagacaaaattagtaaccattggatccaatactacagacgcatacctcacaggaaactcctcactgcactacaactcagggccaacgtttaccccacgagagaatttctagccaggggtagacaagaccaatacatcaaggcgtgtaggcactgcgatgcggacaacgaatcctgcgcccacatcatcggcaactgcccagtgacacaggacgcccgaatcaagaggcacaattacatctgcgaactgcttctcgaggaggcgaagaagaaggactgggtagtgttcaaggaaccgcacataagggattccaacaaggaactgtacaaacctgacctgatatttgtgaaggatgggcgtgcacttgtcgtggatgtgacagtacggtatgaagcagccaaatcatcgctggaggaagccgctgcagagaaagtgagaaagtacaaacacctggaaacggaagtaagacatctcacgaatgcaaaggacgttacttttgtgggctttcccctaggagcgcgggggaaatggcaccaagataactttaaacttttgactgagcttggcctctccaaatcgaggcaagtgaaaatggcagagactttttccacagtagcgctcttttcatctgtggacattgtacatatgtttgccagtagggccagaaaatctatggttatgtgataataggctgccttctgcggggcttgccttctggccatgcccttcttctctcccttgcacctgtacctcttggtctttgaataaagcctgagtaggaaggaccggtaaaaaaaaaaaaaaaaaaaaaaaaaaaaaaacgttgactaaaaaaaaaaaaaaaaaaaaaaaaaaaaaaaaaaaaaaaaaaaaaaaaaaaaaaaaaaaaaaaaaaaaaa

SEQ ID NO: 10883 - DNA, 5264 bp, synthetic construct
  source 1..5264: mol_type = other DNA
gaaataagagagaaaagaagagtaagaagaaatataagagaattcgccaccatggcccctaagaaaaagcggaaggtgaatatcagcggctctagctgcggcagccccaacagcgccgacaccagcagcgacttcaaggacctgtggaccaagctgaaggaatgccacgaccgggaagtgcagggactccaggtgaaggtcaccaaactcaagcaagaaagaatcctggacgcccagagactggaagaattcttcaccaagaaccagcagctgagagagcagcagaaagtgctgcacgagacaatcaaggttctggaagatagactgcgggccggcctgtgcgacagatgcgccgtgaccgaggaacacatgcgcaaaaagcagcaggagttcgagaacattagacagcaaaatctgaaattgatcacagagctgatgaacgagagaaacacactgcaggaggagaacaagaagctgagcgagcagctgcaacagaagatcgagaatgatcagcaacaccaggccgctgagctggaatgtgaagaggacgtgatccccgacagcccaatcacagctttcagcttttctggcgtgaacagactgaggcggaaggaaaacccccacgtgcggtacatcgagcagacccataccaagctggaacacagcgtgtgtgccaacgagatgagaaaggtgtccaagtcctccacccatccccagcacaaccctaacgaaaatgagatcctggtggctgatacctacgaccagtctcagagccctatggccaaggcccacggcaccagctcttatacccctgataagagctccttcaacctggccaccgtggtggccgagacactgggcctgggcgtgcaggaggaaagcgagacacagggcccaatgagccctctgggagatgagctgtaccactgcctggaaggcaaccacaagaaacagccttttgagtccggctccgagactcctggaacaagcgagagcgctacacctgagggcagccctaagagaaaggtgtccagcgccgagggcgctgccaaggaagagcctaaacggagaagcgccagactgagcgccaagccccccgccaaggtggaagccaagcctaagaaggccgccgctaaggacaagagcagcgataagaaagtccagaccaagggcaagcggggcgccaaaggcaaacaggccgaggtggccaaccaggagacaaaggaagatctgcctgctgagaacggcgaaaccaagaccgaggaatctccagcttctgacgaggccggagagaaggaggccaaaagcgacagcggctctgagacacctggaacaagcgagagcgccaccccggaatcctatgaacaacttgcaccacaaccgtgtgtgggagaaactttacattctagcctcccacgagacagtgaactgtttgtgcctgaagaggggagcagcgagaaggagagcgaggacgcgccaaaaacatctcctccgacgcctgggaaacatggtttggaacagactggggaggaaaaagtgatggtgactgttcctgacaaaaatccaccttgtccttgctgtggtacccgggtaaactctgtgttgaatctgattgaacatctgaaagtgtcacacgggaaaaggggggtttgttttcggtgtgcaaaatgtggaaaggaaaatagtaactatcacagtgttgtttgtcattttaagaaatgcaggggtccagagacggagaaagccccagctggggagtggatttgtgaggtatgcaacagagattttacaaccaaaattggcctgggacaacacaagagattggcacacccagcagtgagaaatcaggaaaggatcgttgcttcccaaccgaaagaaacatcaaatagaggtgctcacaaaaggtgctggacaaaggaggaggaagaattactaataagactggaggctcagttcgagggaaacaaaaatattaataagcttattgcagaacacataaccaccaaaacagctaagcagatcagtgacaaaaggcgattgctgtccagaaagccagcagaggagccacgtgaggagcctggaacgtgtcatcacaccaggagagcagctgcgagcctgagaacggagcctgagatgagtcatcacgcccaggcagaggacagagataatggacctgggagacgccctctgccaggcagggcagctgccggagggagaacaatggacgagataagacgccaccctgataagggcaacggacagcagagacccaccaagcaaaaatcagaagaacagctgcaggcttactataaaaagacactagaggaacgactttcagctggggcacttaacaccttcccccgagcattcaagcaggtaatggaaggccgggatataaagctagtaatcaatcagacagcgcaggactgcttcggatgcctggaatccataagccaaataagaacggcaacccgagataaaaaggacacggtgacccgggagaaacacccaaagaaaccttttcagaagtggatgaagaagagagcaatcaaaaaaggtaattatagacggttccagcgtttattttatcttgatagagggaaactggctaaaatcattttagatgatattgaatgcttgtcttgtgacataccactcagtgaaatttattcggtttttaaaacaagatgggaaacaactggtagctttaaaagccttggggactttaaaacttacgggaaggctgacaacactgccttcagagaattaattacggctaaagaaattgagaaaaatgtgcaggaaatgagcaaaggctcggctcccggtccagacgggattactcttggggacgtcgtaaagatggatcccgagttttcccggaccatggagattttcaatttatggttaacaactggtaaaatcccggacatggtgagggggtgcagaaccgttttgattccaaaatcatcaaagccggatcgtttgaaagacattaataactggagacctatcacgatcggttccatcttgctgagactgttctccaggattgtaacagctaggctgagcaaagcgtgccccctgaacccaaggcaaagaggctttatcagagcggcgggatgctctgaaaacttaaaactcctgcaaactataatttggtcggccaaaagagaacacagaccactgggtgttgtattcgtggacatcgccaaggcttttgacaccgtaagccaccagcacatcattcatgctttgcagcaaagagaggtggatccccacatcgtcggtctggtgagcaatatgtacgagaacatcagtacgtatatcaccacaaagaggaacacacacacagacaaaatccagatccgggttggagtaaagcagggtgacccgatgtcgccccttttatttaacctggcaatggaccctctattatgcaagctggaagagagtggcaaaggataccaccgaggacagagcagcatcacagcgatggcatttgcagacgatctggttttgctgagcgactcctgggaaaatatgaatacaaatattagcatactggagaccttctgcaatctgaccggactcaaaacacaggggcaaaagtgccacggcttttacatcaagccgacaaagaagtcttacaccatcaatgactgcgctgcctggactatcaacggcacacccctgaacatgatcgaccccggcgaatctgagaaatacctcggcctgcagtttgacccgtggattggaatagcaaggtccggtctctccacaaaactagatttttggcttcagcggatcgatcaagcaccacttaaacctctgcagaaaactgatattctcaaaacatacaccatccctcggctgatctacatagctgaccactcagaagtgaaaagcgcactactcgaaacccttgaccagaagatccggacagcggtcaaggaatggcttcacctacctccgtgcacctgcgatgccatcctgtactcgagcacgagagacggcggtttgggcatcaccaaattggcaggactgatccccagcgtgcaggcccgtagactgcatcggatcgcacagtcatctgacgatacgatgaaatgcttcatggaaaaagagaaaatggaacagctgcataagaaattgtggattcaagctggaggggacagagagaacataccctcgatttgggaagcaccaccgtcgagtgaaccaccaaacaacgtgagcacaaattcggaatgggaagcaccgacccagaaagataaatttccaaagccttgcaattggaggaaaaacgaattcaaaaaatggaccaaattggcatcccaaggccgcggaattgtaaattttgaaagagacaaaattagtaaccattggatccaatactacagacgcatacctcacaggaaactcctcactgcactacaactcagggccaacgtttaccccacgagagaatttctagccaggggtagacaagaccaatacatcaaggcgtgtaggcactgcgatgcggacaacgaatcctgcgcccacatcatcggcaactgcccagtgacacaggacgcccgaatcaagaggcacaattacatctgcgaactgcttctcgaggaggcgaagaagaaggactgggtagtgttcaaggaaccgcacataagggattccaacaaggaactgtacaaacctgacctgatatttgtgaaggatgggcgtgcacttgtcgtggatgtgacagtacggtatgaagcagccaaatcatcgctggaggaagccgctgcagagaaagtgagaaagtacaaacacctggaaacggaagtaagacatctcacgaatgcaaaggacgttacttttgtgggctttcccctaggagcgcgggggaaatggcaccaagataactttaaacttttgactgagcttggcctctccaaatcgaggcaagtgaaaatggcagagactttttccacagtagcgctcttttcatctgtggacattgtacatatgtttgccagtagggccagaaaatctatggttatgtgataataggctgccttctgcggggcttgccttctggccatgcccttcttctctcccttgcacctgtacctcttggtctttgaataaagcctgagtaggaaggaccggtaaaaaaaaaaaaaaaaaaaaaaaaaaaaaaacgttgactaaaaaaaaaaaaaaaaaaaaaaaaaaaaaaaaaaaaaaaaaaaaaaaaaaaaaaaaaaaaaaaaaaaaaa

SEQ ID NO: 10884 - DNA, 5264 bp, synthetic construct
  source 1..5264: mol_type = other DNA
gaaataagagagaaaagaagagtaagaagaaatataagagaattcgccaccatggcccctaagaaaaagcggaaggtgaatatcagcggctctagctgcggcagccccaacagcgccgacaccagcagcgacttcaaggacctgtggaccaagctgaaggaatgccacgaccgggaagtgcagggactccaggtgaaggtcaccaaactcaagcaagaaagaatcctggacgcccagagactggaagaattcttcaccaagaaccagcagctgagagagcagcagaaagtgctgcacgagacaatcaaggttctggaagatagactgcgggccggcctgtgcgacagatgcgccgtgaccgaggaacacatgcgcaaaaagcagcaggagttcgagaacattagacagcaaaatctgaaattgatcacagagctgatgaacgagagaaacacactgcaggaggagaacaagaagctgagcgagcagctgcaacagaagatcgagaatgatcagcaacaccaggccgctgagctggaatgtgaagaggacgtgatccccgacagcccaatcacagctttcagcttttctggcgtgaacagactgaggcggaaggaaaacccccacgtgcggtacatcgagcagacccataccaagctggaacacagcgtgtgtgccaacgagatgagaaaggtgtccaagtcctccacccatccccagcacaaccctaacgaaaatgagatcctggtggctgatacctacgaccagtctcagagccctatggccaaggcccacggcaccagctcttatacccctgataagagctccttcaacctggccaccgtggtggccgagacactgggcctgggcgtgcaggaggaaagcgagacacagggcccaatgagccctctgggagatgagctgtaccactgcctggaaggcaaccacaagaaacagccttttgagtccggctccgagactcctggaacaagcgagagcgctacacctgagggcagccctaagagaaaggtgtccagcgccgagggcgctgccaaggaagagcctaaacggagaagcgccagactgagcgccaagccccccgccaaggtggaagccaagcctaagaaggccgccgctaaggacaagagcagcgataagaaagtccagaccaagggcaagcggggcgccaaaggcaaacaggccgaggtggccaaccaggagacaaaggaagatctgcctgctgagaacggcgaaaccaagaccgaggaatctccagcttctgacgaggccggagagaaggaggccaaaagcgacagcggctctgagacacctggaacaagcgagagcgccaccccggaatcctatgaacaacttgcaccacaaccgtgtgtgggagaaactttacattctagcctcccacgagacagtgaactgtttgtgcctgaagaggggagcagcgagaaggagagcgaggacgcgccaaaaacatctcctccgacgcctgggaaacatggtttggaacagactggggaggaaaaagtgatggtgactgttcctgacaaaaatccaccttgtccttgctgtggtacccgggtaaactctgtgttgaatctgattgaacatctgaaagtgtcacacgggaaaaggggggtttgttttcggtgtgcaaaatgtggaaaggaaaatagtaactatcacagtgttgtttgtcattttaagaaatgcaggggtccagagacggagaaagccccagctggggagtggatttgtgaggtatgcaacagagattttacaaccaaaattggcctgggacaacacaagagattggcacacccagcagtgagaaatcaggaaaggatcgttgcttcccaaccgaaagaaacatcaaatagaggtgctcacaaaaggtgctggacaaaggaggaggaagaattactaataagactggaggctcagttcgagggaaacaaaaatattaataagcttattgcagaacacataaccaccaaaacagctaagcagatcagtgacaaaaggcgattgctgtccagaaagccagcagaggagccacgtgaggagcctggaacgtgtcatcacaccaggagagcagctgcgagcctgagaacggagcctgagatgagtcatcacgcccaggcagaggacagagataatggacctgggagacgccctctgccaggcagggcagctgccggagggagaacaatggacgagataagacgccaccctgataagggcaacggacagcagagacccaccaagcaaaaatcagaagaacagctgcaggcttactataaaaagacactagaggaacgactttcagctggggcacttaacaccttcccccgagcattcaagcaggtaatggaaggccgggatataaagctagtaatcaatcagacagcgcaggactgcttcggatgcctggaatccataagccaaataagaacggcaacccgagataaaaaggacacggtgacccgggagaaacacccaaagaaaccttttcagaagtggatgaagaagagagcaatcaaaaaaggtaattatcttcggttccagcgtttattttatcttaacagagggaaactggctaaaatcattttagatgatattgaatgcttgtcttgtgacataccactcagtgaaatttattcggtttttaaaacaagatgggaaacaactggtagctttaaaagccttggggactttaaaacttacgggaaggctgacaacactgccttcagagaattaattacggctaaagaaattgagaaaaatgtgcaggaaatgagcaaaggctcggctcccggtccagacgggattactcttggggacgtcgtaaagatggatcccgagttttcccggaccatggagattttcaatttatggttaacaactggtaaaatcccggacatggtgagggggtgcagaaccgttttgattccaaaatcatcaaagccggatcgtttgaaagacattaataactggagacctatcacgatcggttccatcttgctgagactgttctccaggattgtaacagctaggctgagcaaagcgtgccccctgaacccaaggcaaagaggctttatcagagcggcgggatgctctgaaaacttaaaactcctgcaaactataatttggtcggccaaaagagaacacagaccactgggtgttgtattcgtggacatcgccaaggcttttgacaccgtaagccaccagcacatcattcatgctttgcagcaaagagaggtggatccccacatcgtcggtctggtgagcaatatgtacgagaacatcagtacgtatatcaccacaaagaggaacacacacacagacaaaatccagatccgggttggagtaaagcagggtgacccgatgtcgccccttttatttaacctggcaatggaccctctattatgcaagctggaagagagtggcaaaggataccaccgaggacagagcagcatcacagcgatggcatttgcagacgatctggttttgctgagcgactcctgggaaaatatgaatacaaatattagcatactggagaccttctgcaatctgaccggactcaaaacacaggggcaaaagtgccacggcttttacatcaagccgacaaagaagtcttacaccatcaatgactgcgctgcctggactatcaacggcacacccctgaacatgatcgaccccggcgaatctgagaaatacctcggcctgcagtttgacccgtggattggaatagcaaggtccggtctctccacaaaactagatttttggcttcagcggatcgatcaagcaccacttaaacctctgcagaaaactgatattctcaaaacatacaccatccctcggctgatctacatagctgaccactcagaagtgaaaagcgcactactcgaaacccttgaccagaagatccggacagcggtcaaggaatggcttcacctacctccgtgcacctgcgatgccatcctgtactcgagcacgagagacggcggtttgggcatcaccaaattggcaggactgatccccagcgtgcaggcccgtagactgcatcggatcgcacagtcatctgacgatacgatgaaatgcttcatggaaaaagagaaaatggaacagctgcataagaaattgtggattcaagctggaggggacagagagaacataccctcgatttgggaagcaccaccgtcgagtgaaccaccaaacaacgtgagcacaaattcggaatgggaagcaccgacccagaaagataaatttccaaagccttgcaattggaggaaaaacgaattcaaaaaatggaccaaattggcatcccaaggccgcggaattgtaaattttgaaagagacaaaattagtaaccattggatccaatactacagacgcatacctcacaggaaactcctcactgcactacaactcagggccaacgtttaccccacgagagaatttctagccaggggtagacaagaccaatacatcaaggcgtgtaggcactgcgatgcggacaacgaatcctgcgcccacatcatcggcaactgcccagtgacacaggacgcccgaatcaagaggcacaattacatctgcgaactgcttctcgaggaggcgaagaagaaggactgggtagtgttcaaggaaccgcacataagggattccaacaaggaactgtacaaacctgacctgatatttgtgaaggatgggcgtgcacttgtcgtggatgtgacagtacggtatgaagcagccaaatcatcgctggaggaagccgctgcagagaaagtgagaaagtacaaacacctggaaacggaagtaagacatctcacgaatgcaaaggacgttacttttgtgggctttcccctaggagcgcgggggaaatggcaccaagataactttaaacttttgactgagcttggcctctccaaatcgaggcaagtgaaaatggcagagactttttccacagtagcgctcttttcatctgtggacattgtacatatgtttgccagtagggccagaaaatctatggttatgtgataataggctgccttctgcggggcttgccttctggccatgcccttcttctctcccttgcacctgtacctcttggtctttgaataaagcctgagtaggaaggaccggtaaaaaaaaaaaaaaaaaaaaaaaaaaaaaaacgttgactaaaaaaaaaaaaaaaaaaaaaaaaaaaaaaaaaaaaaaaaaaaaaaaaaaaaaaaaaaaaaaaaaaaaaa

SEQ ID NO: 10885 - DNA, 5264 bp, synthetic construct
  source 1..5264: mol_type = other DNA
gaaataagagagaaaagaagagtaagaagaaatataagagaattcgccaccatggcccctaagaaaaagcggaaggtgaatatcagcggctctagctgcggcagccccaacagcgccgacaccagcagcgacttcaaggacctgtggaccaagctgaaggaatgccacgaccgggaagtgcagggactccaggtgaaggtcaccaaactcaagcaagaaagaatcctggacgcccagagactggaagaattcttcaccaagaaccagcagctgagagagcagcagaaagtgctgcacgagacaatcaaggttctggaagatagactgcgggccggcctgtgcgacagatgcgccgtgaccgaggaacacatgcgcaaaaagcagcaggagttcgagaacattagacagcaaaatctgaaattgatcacagagctgatgaacgagagaaacacactgcaggaggagaacaagaagctgagcgagcagctgcaacagaagatcgagaatgatcagcaacaccaggccgctgagctggaatgtgaagaggacgtgatccccgacagcccaatcacagctttcagcttttctggcgtgaacagactgaggcggaaggaaaacccccacgtgcggtacatcgagcagacccataccaagctggaacacagcgtgtgtgccaacgagatgagaaaggtgtccaagtcctccacccatccccagcacaaccctaacgaaaatgagatcctggtggctgatacctacgaccagtctcagagccctatggccaaggcccacggcaccagctcttatacccctgataagagctccttcaacctggccaccgtggtggccgagacactgggcctgggcgtgcaggaggaaagcgagacacagggcccaatgagccctctgggagatgagctgtaccactgcctggaaggcaaccacaagaaacagccttttgagtccggctccgagactcctggaacaagcgagagcgctacacctgagggcagccctaagagaaaggtgtccagcgccgagggcgctgccaaggaagagcctaaacggagaagcgccagactgagcgccaagccccccgccaaggtggaagccaagcctaagaaggccgccgctaaggacaagagcagcgataagaaagtccagaccaagggcaagcggggcgccaaaggcaaacaggccgaggtggccaaccaggagacaaaggaagatctgcctgctgagaacggcgaaaccaagaccgaggaatctccagcttctgacgaggccggagagaaggaggccaaaagcgacagcggctctgagacacctggaacaagcgagagcgccaccccggaatcctatgaacaacttgcaccacaaccgtgtgtgggagaaactttacattctagcctcccacgagacagtgaactgtttgtgcctgaagaggggagcagcgagaaggagagcgaggacgcgccaaaaacatctcctccgacgcctgggaaacatggtttggaacagactggggaggaaaaagtgatggtgactgttcctgacaaaaatccaccttgtccttgctgtggtacccgggtaaactctgtgttgaatctgattgaacatctgaaagtgtcacacgggaaaaggggggtttgttttcggtgtgcaaaatgtggaaaggaaaatagtaactatcacagtgttgtttgtcattttaagaaatgcaggggtccagagacggagaaagccccagctggggagtggatttgtgaggtatgcaacagagattttacaaccaaaattggcctgggacaacacaagagattggcacacccagcagtgagaaatcaggaaaggatcgttgcttcccaaccgaaagaaacatcaaatagaggtgctcacaaaaggtgctggacaaaggaggaggaagaattactaataagactggaggctcagttcgagggaaacaaaaatattaataagcttattgcagaacacataaccaccaaaacagctaagcagatcagtgacaaaaggcgattgctgtccagaaagccagcagaggagccacgtgaggagcctggaacgtgtcatcacaccaggagagcagctgcgagcctgagaacggagcctgagatgagtcatcacgcccaggcagaggacagagataatggacctgggagacgccctctgccaggcagggcagctgccggagggagaacaatggacgagataagacgccaccctgataagggcaacggacagcagagacccaccaagcaaaaatcagaagaacagctgcaggcttactataaaaagacactagaggaacgactttcagctggggcacttaacaccttcccccgagcattcaagcaggtaatggaaggccgggatataaagctagtaatcaatcagacagcgcaggactgcttcggatgcctggaatccataagccaaataagaacggcaacccgagataaaaaggacacggtgacccgggagaaacacccaaagaaaccttttcagaagtggatgaagaagagagcaatcaaaaaaggtaattatcttcggttccagcgtttattttatcttgatagagggaaactggctaaaatcattatcgatgatattgaatgcttgtcttgtgacataccactcagtgaaatttattcggtttttaaaacaagatgggaaacaactggtagctttaaaagccttggggactttaaaacttacgggaaggctgacaacactgccttcagagaattaattacggctaaagaaattgagaaaaatgtgcaggaaatgagcaaaggctcggctcccggtccagacgggattactcttggggacgtcgtaaagatggatcccgagttttcccggaccatggagattttcaatttatggttaacaactggtaaaatcccggacatggtgagggggtgcagaaccgttttgattccaaaatcatcaaagccggatcgtttgaaagacattaataactggagacctatcacgatcggttccatcttgctgagactgttctccaggattgtaacagctaggctgagcaaagcgtgccccctgaacccaaggcaaagaggctttatcagagcggcgggatgctctgaaaacttaaaactcctgcaaactataatttggtcggccaaaagagaacacagaccactgggtgttgtattcgtggacatcgccaaggcttttgacaccgtaagccaccagcacatcattcatgctttgcagcaaagagaggtggatccccacatcgtcggtctggtgagcaatatgtacgagaacatcagtacgtatatcaccacaaagaggaacacacacacagacaaaatccagatccgggttggagtaaagcagggtgacccgatgtcgccccttttatttaacctggcaatggaccctctattatgcaagctggaagagagtggcaaaggataccaccgaggacagagcagcatcacagcgatggcatttgcagacgatctggttttgctgagcgactcctgggaaaatatgaatacaaatattagcatactggagaccttctgcaatctgaccggactcaaaacacaggggcaaaagtgccacggcttttacatcaagccgacaaagaagtcttacaccatcaatgactgcgctgcctggactatcaacggcacacccctgaacatgatcgaccccggcgaatctgagaaatacctcggcctgcagtttgacccgtggattggaatagcaaggtccggtctctccacaaaactagatttttggcttcagcggatcgatcaagcaccacttaaacctctgcagaaaactgatattctcaaaacatacaccatccctcggctgatctacatagctgaccactcagaagtgaaaagcgcactactcgaaacccttgaccagaagatccggacagcggtcaaggaatggcttcacctacctccgtgcacctgcgatgccatcctgtactcgagcacgagagacggcggtttgggcatcaccaaattggcaggactgatccccagcgtgcaggcccgtagactgcatcggatcgcacagtcatctgacgatacgatgaaatgcttcatggaaaaagagaaaatggaacagctgcataagaaattgtggattcaagctggaggggacagagagaacataccctcgatttgggaagcaccaccgtcgagtgaaccaccaaacaacgtgagcacaaattcggaatgggaagcaccgacccagaaagataaatttccaaagccttgcaattggaggaaaaacgaattcaaaaaatggaccaaattggcatcccaaggccgcggaattgtaaattttgaaagagacaaaattagtaaccattggatccaatactacagacgcatacctcacaggaaactcctcactgcactacaactcagggccaacgtttaccccacgagagaatttctagccaggggtagacaagaccaatacatcaaggcgtgtaggcactgcgatgcggacaacgaatcctgcgcccacatcatcggcaactgcccagtgacacaggacgcccgaatcaagaggcacaattacatctgcgaactgcttctcgaggaggcgaagaagaaggactgggtagtgttcaaggaaccgcacataagggattccaacaaggaactgtacaaacctgacctgatatttgtgaaggatgggcgtgcacttgtcgtggatgtgacagtacggtatgaagcagccaaatcatcgctggaggaagccgctgcagagaaagtgagaaagtacaaacacctggaaacggaagtaagacatctcacgaatgcaaaggacgttacttttgtgggctttcccctaggagcgcgggggaaatggcaccaagataactttaaacttttgactgagcttggcctctccaaatcgaggcaagtgaaaatggcagagactttttccacagtagcgctcttttcatctgtggacattgtacatatgtttgccagtagggccagaaaatctatggttatgtgataataggctgccttctgcggggcttgccttctggccatgcccttcttctctcccttgcacctgtacctcttggtctttgaataaagcctgagtaggaaggaccggtaaaaaaaaaaaaaaaaaaaaaaaaaaaaaaacgttgactaaaaaaaaaaaaaaaaaaaaaaaaaaaaaaaaaaaaaaaaaaaaaaaaaaaaaaaaaaaaaaaaaaaaaa

SEQ ID NO: 10886 - DNA, 5264 bp, synthetic construct
  source 1..5264: mol_type = other DNA
gaaataagagagaaaagaagagtaagaagaaatataagagaattcgccaccatggcccctaagaaaaagcggaaggtgaatatcagcggctctagctgcggcagccccaacagcgccgacaccagcagcgacttcaaggacctgtggaccaagctgaaggaatgccacgaccgggaagtgcagggactccaggtgaaggtcaccaaactcaagcaagaaagaatcctggacgcccagagactggaagaattcttcaccaagaaccagcagctgagagagcagcagaaagtgctgcacgagacaatcaaggttctggaagatagactgcgggccggcctgtgcgacagatgcgccgtgaccgaggaacacatgcgcaaaaagcagcaggagttcgagaacattagacagcaaaatctgaaattgatcacagagctgatgaacgagagaaacacactgcaggaggagaacaagaagctgagcgagcagctgcaacagaagatcgagaatgatcagcaacaccaggccgctgagctggaatgtgaagaggacgtgatccccgacagcccaatcacagctttcagcttttctggcgtgaacagactgaggcggaaggaaaacccccacgtgcggtacatcgagcagacccataccaagctggaacacagcgtgtgtgccaacgagatgagaaaggtgtccaagtcctccacccatccccagcacaaccctaacgaaaatgagatcctggtggctgatacctacgaccagtctcagagccctatggccaaggcccacggcaccagctcttatacccctgataagagctccttcaacctggccaccgtggtggccgagacactgggcctgggcgtgcaggaggaaagcgagacacagggcccaatgagccctctgggagatgagctgtaccactgcctggaaggcaaccacaagaaacagccttttgagtccggctccgagactcctggaacaagcgagagcgctacacctgagggcagccctaagagaaaggtgtccagcgccgagggcgctgccaaggaagagcctaaacggagaagcgccagactgagcgccaagccccccgccaaggtggaagccaagcctaagaaggccgccgctaaggacaagagcagcgataagaaagtccagaccaagggcaagcggggcgccaaaggcaaacaggccgaggtggccaaccaggagacaaaggaagatctgcctgctgagaacggcgaaaccaagaccgaggaatctccagcttctgacgaggccggagagaaggaggccaaaagcgacagcggctctgagacacctggaacaagcgagagcgccaccccggaatcctatgaacaacttgcaccacaaccgtgtgtgggagaaactttacattctagcctcccacgagacagtgaactgtttgtgcctgaagaggggagcagcgagaaggagagcgaggacgcgccaaaaacatctcctccgacgcctgggaaacatggtttggaacagactggggaggaaaaagtgatggtgactgttcctgacaaaaatccaccttgtccttgctgtggtacccgggtaaactctgtgttgaatctgattgaacatctgaaagtgtcacacgggaaaaggggggtttgttttcggtgtgcaaaatgtggaaaggaaaatagtaactatcacagtgttgtttgtcattttaagaaatgcaggggtccagagacggagaaagccccagctggggagtggatttgtgaggtatgcaacagagattttacaaccaaaattggcctgggacaacacaagagattggcacacccagcagtgagaaatcaggaaaggatcgttgcttcccaaccgaaagaaacatcaaatagaggtgctcacaaaaggtgctggacaaaggaggaggaagaattactaataagactggaggctcagttcgagggaaacaaaaatattaataagcttattgcagaacacataaccaccaaaacagctaagcagatcagtgacaaaaggcgattgctgtccagaaagccagcagaggagccacgtgaggagcctggaacgtgtcatcacaccaggagagcagctgcgagcctgagaacggagcctgagatgagtcatcacgcccaggcagaggacagagataatggacctgggagacgccctctgccaggcagggcagctgccggagggagaacaatggacgagataagacgccaccctgataagggcaacggacagcagagacccaccaagcaaaaatcagaagaacagctgcaggcttactataaaaagacactagaggaacgactttcagctggggcacttaacaccttcccccgagcattcaagcaggtaatggaaggccgggatataaagctagtaatcaatcagacagcgcaggactgcttcggatgcctggaatccataagccaaataagaacggcaacccgagataaaaaggacacggtgacccgggagaaacacccaaagaaaccttttcagaagtggatgaagaagagagcaatcaaaaaaggtaattatcttcggttccagcgtttattttatcttgatagagggaaactggctaaaatcattttagatgataaggaatgcttgtcttgtgacataccactcagtgaaatttattcggtttttaaaacaagatgggaaacaactggtagctttaaaagccttggggactttaaaacttacgggaaggctgacaacactgccttcagagaattaattacggctaaagaaattgagaaaaatgtgcaggaaatgagcaaaggctcggctcccggtccagacgggattactcttggggacgtcgtaaagatggatcccgagttttcccggaccatggagattttcaatttatggttaacaactggtaaaatcccggacatggtgagggggtgcagaaccgttttgattccaaaatcatcaaagccggatcgtttgaaagacattaataactggagacctatcacgatcggttccatcttgctgagactgttctccaggattgtaacagctaggctgagcaaagcgtgccccctgaacccaaggcaaagaggctttatcagagcggcgggatgctctgaaaacttaaaactcctgcaaactataatttggtcggccaaaagagaacacagaccactgggtgttgtattcgtggacatcgccaaggcttttgacaccgtaagccaccagcacatcattcatgctttgcagcaaagagaggtggatccccacatcgtcggtctggtgagcaatatgtacgagaacatcagtacgtatatcaccacaaagaggaacacacacacagacaaaatccagatccgggttggagtaaagcagggtgacccgatgtcgccccttttatttaacctggcaatggaccctctattatgcaagctggaagagagtggcaaaggataccaccgaggacagagcagcatcacagcgatggcatttgcagacgatctggttttgctgagcgactcctgggaaaatatgaatacaaatattagcatactggagaccttctgcaatctgaccggactcaaaacacaggggcaaaagtgccacggcttttacatcaagccgacaaagaagtcttacaccatcaatgactgcgctgcctggactatcaacggcacacccctgaacatgatcgaccccggcgaatctgagaaatacctcggcctgcagtttgacccgtggattggaatagcaaggtccggtctctccacaaaactagatttttggcttcagcggatcgatcaagcaccacttaaacctctgcagaaaactgatattctcaaaacatacaccatccctcggctgatctacatagctgaccactcagaagtgaaaagcgcactactcgaaacccttgaccagaagatccggacagcggtcaaggaatggcttcacctacctccgtgcacctgcgatgccatcctgtactcgagcacgagagacggcggtttgggcatcaccaaattggcaggactgatccccagcgtgcaggcccgtagactgcatcggatcgcacagtcatctgacgatacgatgaaatgcttcatggaaaaagagaaaatggaacagctgcataagaaattgtggattcaagctggaggggacagagagaacataccctcgatttgggaagcaccaccgtcgagtgaaccaccaaacaacgtgagcacaaattcggaatgggaagcaccgacccagaaagataaatttccaaagccttgcaattggaggaaaaacgaattcaaaaaatggaccaaattggcatcccaaggccgcggaattgtaaattttgaaagagacaaaattagtaaccattggatccaatactacagacgcatacctcacaggaaactcctcactgcactacaactcagggccaacgtttaccccacgagagaatttctagccaggggtagacaagaccaatacatcaaggcgtgtaggcactgcgatgcggacaacgaatcctgcgcccacatcatcggcaactgcccagtgacacaggacgcccgaatcaagaggcacaattacatctgcgaactgcttctcgaggaggcgaagaagaaggactgggtagtgttcaaggaaccgcacataagggattccaacaaggaactgtacaaacctgacctgatatttgtgaaggatgggcgtgcacttgtcgtggatgtgacagtacggtatgaagcagccaaatcatcgctggaggaagccgctgcagagaaagtgagaaagtacaaacacctggaaacggaagtaagacatctcacgaatgcaaaggacgttacttttgtgggctttcccctaggagcgcgggggaaatggcaccaagataactttaaacttttgactgagcttggcctctccaaatcgaggcaagtgaaaatggcagagactttttccacagtagcgctcttttcatctgtggacattgtacatatgtttgccagtagggccagaaaatctatggttatgtgataataggctgccttctgcggggcttgccttctggccatgcccttcttctctcccttgcacctgtacctcttggtctttgaataaagcctgagtaggaaggaccggtaaaaaaaaaaaaaaaaaaaaaaaaaaaaaaacgttgactaaaaaaaaaaaaaaaaaaaaaaaaaaaaaaaaaaaaaaaaaaaaaaaaaaaaaaaaaaaaaaaaaaaaaa

SEQ ID NO: 10887 - DNA, 5264 bp, synthetic construct
  source 1..5264: mol_type = other DNA
gaaataagagagaaaagaagagtaagaagaaatataagagaattcgccaccatggcccctaagaaaaagcggaaggtgaatatcagcggctctagctgcggcagccccaacagcgccgacaccagcagcgacttcaaggacctgtggaccaagctgaaggaatgccacgaccgggaagtgcagggactccaggtgaaggtcaccaaactcaagcaagaaagaatcctggacgcccagagactggaagaattcttcaccaagaaccagcagctgagagagcagcagaaagtgctgcacgagacaatcaaggttctggaagatagactgcgggccggcctgtgcgacagatgcgccgtgaccgaggaacacatgcgcaaaaagcagcaggagttcgagaacattagacagcaaaatctgaaattgatcacagagctgatgaacgagagaaacacactgcaggaggagaacaagaagctgagcgagcagctgcaacagaagatcgagaatgatcagcaacaccaggccgctgagctggaatgtgaagaggacgtgatccccgacagcccaatcacagctttcagcttttctggcgtgaacagactgaggcggaaggaaaacccccacgtgcggtacatcgagcagacccataccaagctggaacacagcgtgtgtgccaacgagatgagaaaggtgtccaagtcctccacccatccccagcacaaccctaacgaaaatgagatcctggtggctgatacctacgaccagtctcagagccctatggccaaggcccacggcaccagctcttatacccctgataagagctccttcaacctggccaccgtggtggccgagacactgggcctgggcgtgcaggaggaaagcgagacacagggcccaatgagccctctgggagatgagctgtaccactgcctggaaggcaaccacaagaaacagccttttgagtccggctccgagactcctggaacaagcgagagcgctacacctgagggcagccctaagagaaaggtgtccagcgccgagggcgctgccaaggaagagcctaaacggagaagcgccagactgagcgccaagccccccgccaaggtggaagccaagcctaagaaggccgccgctaaggacaagagcagcgataagaaagtccagaccaagggcaagcggggcgccaaaggcaaacaggccgaggtggccaaccaggagacaaaggaagatctgcctgctgagaacggcgaaaccaagaccgaggaatctccagcttctgacgaggccggagagaaggaggccaaaagcgacagcggctctgagacacctggaacaagcgagagcgccaccccggaatcctatgaacaacttgcaccacaaccgtgtgtgggagaaactttacattctagcctcccacgagacagtgaactgtttgtgcctgaagaggggagcagcgagaaggagagcgaggacgcgccaaaaacatctcctccgacgcctgggaaacatggtttggaacagactggggaggaaaaagtgatggtgactgttcctgacaaaaatccaccttgtccttgctgtggtacccgggtaaactctgtgttgaatctgattgaacatctgaaagtgtcacacgggaaaaggggggtttgttttcggtgtgcaaaatgtggaaaggaaaatagtaactatcacagtgttgtttgtcattttaagaaatgcaggggtccagagacggagaaagccccagctggggagtggatttgtgaggtatgcaacagagattttacaaccaaaattggcctgggacaacacaagagattggcacacccagcagtgagaaatcaggaaaggatcgttgcttcccaaccgaaagaaacatcaaatagaggtgctcacaaaaggtgctggacaaaggaggaggaagaattactaataagactggaggctcagttcgagggaaacaaaaatattaataagcttattgcagaacacataaccaccaaaacagctaagcagatcagtgacaaaaggcgattgctgtccagaaagccagcagaggagccacgtgaggagcctggaacgtgtcatcacaccaggagagcagctgcgagcctgagaacggagcctgagatgagtcatcacgcccaggcagaggacagagataatggacctgggagacgccctctgccaggcagggcagctgccggagggagaacaatggacgagataagacgccaccctgataagggcaacggacagcagagacccaccaagcaaaaatcagaagaacagctgcaggcttactataaaaagacactagaggaacgactttcagctggggcacttaacaccttcccccgagcattcaagcaggtaatggaaggccgggatataaagctagtaatcaatcagacagcgcaggactgcttcggatgcctggaatccataagccaaataagaacggcaacccgagataaaaaggacacggtgacccgggagaaacacccaaagaaaccttttcagaagtggatgaagaagagagcaatcaaaaaaggtaattatcttcggttccagcgtttattttatcttgatagagggaaactggctaaaatcattttagatgatattgaatgcttgtcttgtgacataccactcagtgaagtgtattcggtttttaaaacaagatgggaaacaactggtagctttaaaagccttggggactttaaaacttacgggaaggctgacaacactgccttcagagaattaattacggctaaagaaattgagaaaaatgtgcaggaaatgagcaaaggctcggctcccggtccagacgggattactcttggggacgtcgtaaagatggatcccgagttttcccggaccatggagattttcaatttatggttaacaactggtaaaatcccggacatggtgagggggtgcagaaccgttttgattccaaaatcatcaaagccggatcgtttgaaagacattaataactggagacctatcacgatcggttccatcttgctgagactgttctccaggattgtaacagctaggctgagcaaagcgtgccccctgaacccaaggcaaagaggctttatcagagcggcgggatgctctgaaaacttaaaactcctgcaaactataatttggtcggccaaaagagaacacagaccactgggtgttgtattcgtggacatcgccaaggcttttgacaccgtaagccaccagcacatcattcatgctttgcagcaaagagaggtggatccccacatcgtcggtctggtgagcaatatgtacgagaacatcagtacgtatatcaccacaaagaggaacacacacacagacaaaatccagatccgggttggagtaaagcagggtgacccgatgtcgccccttttatttaacctggcaatggaccctctattatgcaagctggaagagagtggcaaaggataccaccgaggacagagcagcatcacagcgatggcatttgcagacgatctggttttgctgagcgactcctgggaaaatatgaatacaaatattagcatactggagaccttctgcaatctgaccggactcaaaacacaggggcaaaagtgccacggcttttacatcaagccgacaaagaagtcttacaccatcaatgactgcgctgcctggactatcaacggcacacccctgaacatgatcgaccccggcgaatctgagaaatacctcggcctgcagtttgacccgtggattggaatagcaaggtccggtctctccacaaaactagatttttggcttcagcggatcgatcaagcaccacttaaacctctgcagaaaactgatattctcaaaacatacaccatccctcggctgatctacatagctgaccactcagaagtgaaaagcgcactactcgaaacccttgaccagaagatccggacagcggtcaaggaatggcttcacctacctccgtgcacctgcgatgccatcctgtactcgagcacgagagacggcggtttgggcatcaccaaattggcaggactgatccccagcgtgcaggcccgtagactgcatcggatcgcacagtcatctgacgatacgatgaaatgcttcatggaaaaagagaaaatggaacagctgcataagaaattgtggattcaagctggaggggacagagagaacataccctcgatttgggaagcaccaccgtcgagtgaaccaccaaacaacgtgagcacaaattcggaatgggaagcaccgacccagaaagataaatttccaaagccttgcaattggaggaaaaacgaattcaaaaaatggaccaaattggcatcccaaggccgcggaattgtaaattttgaaagagacaaaattagtaaccattggatccaatactacagacgcatacctcacaggaaactcctcactgcactacaactcagggccaacgtttaccccacgagagaatttctagccaggggtagacaagaccaatacatcaaggcgtgtaggcactgcgatgcggacaacgaatcctgcgcccacatcatcggcaactgcccagtgacacaggacgcccgaatcaagaggcacaattacatctgcgaactgcttctcgaggaggcgaagaagaaggactgggtagtgttcaaggaaccgcacataagggattccaacaaggaactgtacaaacctgacctgatatttgtgaaggatgggcgtgcacttgtcgtggatgtgacagtacggtatgaagcagccaaatcatcgctggaggaagccgctgcagagaaagtgagaaagtacaaacacctggaaacggaagtaagacatctcacgaatgcaaaggacgttacttttgtgggctttcccctaggagcgcgggggaaatggcaccaagataactttaaacttttgactgagcttggcctctccaaatcgaggcaagtgaaaatggcagagactttttccacagtagcgctcttttcatctgtggacattgtacatatgtttgccagtagggccagaaaatctatggttatgtgataataggctgccttctgcggggcttgccttctggccatgcccttcttctctcccttgcacctgtacctcttggtctttgaataaagcctgagtaggaaggaccggtaaaaaaaaaaaaaaaaaaaaaaaaaaaaaaacgttgactaaaaaaaaaaaaaaaaaaaaaaaaaaaaaaaaaaaaaaaaaaaaaaaaaaaaaaaaaaaaaaaaaaaaaa

SEQ ID NO: 10888 - DNA, 5264 bp, synthetic construct
  source 1..5264: mol_type = other DNA
gaaataagagagaaaagaagagtaagaagaaatataagagaattcgccaccatggcccctaagaaaaagcggaaggtgaatatcagcggctctagctgcggcagccccaacagcgccgacaccagcagcgacttcaaggacctgtggaccaagctgaaggaatgccacgaccgggaagtgcagggactccaggtgaaggtcaccaaactcaagcaagaaagaatcctggacgcccagagactggaagaattcttcaccaagaaccagcagctgagagagcagcagaaagtgctgcacgagacaatcaaggttctggaagatagactgcgggccggcctgtgcgacagatgcgccgtgaccgaggaacacatgcgcaaaaagcagcaggagttcgagaacattagacagcaaaatctgaaattgatcacagagctgatgaacgagagaaacacactgcaggaggagaacaagaagctgagcgagcagctgcaacagaagatcgagaatgatcagcaacaccaggccgctgagctggaatgtgaagaggacgtgatccccgacagcccaatcacagctttcagcttttctggcgtgaacagactgaggcggaaggaaaacccccacgtgcggtacatcgagcagacccataccaagctggaacacagcgtgtgtgccaacgagatgagaaaggtgtccaagtcctccacccatccccagcacaaccctaacgaaaatgagatcctggtggctgatacctacgaccagtctcagagccctatggccaaggcccacggcaccagctcttatacccctgataagagctccttcaacctggccaccgtggtggccgagacactgggcctgggcgtgcaggaggaaagcgagacacagggcccaatgagccctctgggagatgagctgtaccactgcctggaaggcaaccacaagaaacagccttttgagtccggctccgagactcctggaacaagcgagagcgctacacctgagggcagccctaagagaaaggtgtccagcgccgagggcgctgccaaggaagagcctaaacggagaagcgccagactgagcgccaagccccccgccaaggtggaagccaagcctaagaaggccgccgctaaggacaagagcagcgataagaaagtccagaccaagggcaagcggggcgccaaaggcaaacaggccgaggtggccaaccaggagacaaaggaagatctgcctgctgagaacggcgaaaccaagaccgaggaatctccagcttctgacgaggccggagagaaggaggccaaaagcgacagcggctctgagacacctggaacaagcgagagcgccaccccggaatcctatgaacaacttgcaccacaaccgtgtgtgggagaaactttacattctagcctcccacgagacagtgaactgtttgtgcctgaagaggggagcagcgagaaggagagcgaggacgcgccaaaaacatctcctccgacgcctgggaaacatggtttggaacagactggggaggaaaaagtgatggtgactgttcctgacaaaaatccaccttgtccttgctgtggtacccgggtaaactctgtgttgaatctgattgaacatctgaaagtgtcacacgggaaaaggggggtttgttttcggtgtgcaaaatgtggaaaggaaaatagtaactatcacagtgttgtttgtcattttaagaaatgcaggggtccagagacggagaaagccccagctggggagtggatttgtgaggtatgcaacagagattttacaaccaaaattggcctgggacaacacaagagattggcacacccagcagtgagaaatcaggaaaggatcgttgcttcccaaccgaaagaaacatcaaatagaggtgctcacaaaaggtgctggacaaaggaggaggaagaattactaataagactggaggctcagttcgagggaaacaaaaatattaataagcttattgcagaacacataaccaccaaaacagctaagcagatcagtgacaaaaggcgattgctgtccagaaagccagcagaggagccacgtgaggagcctggaacgtgtcatcacaccaggagagcagctgcgagcctgagaacggagcctgagatgagtcatcacgcccaggcagaggacagagataatggacctgggagacgccctctgccaggcagggcagctgccggagggagaacaatggacgagataagacgccaccctgataagggcaacggacagcagagacccaccaagcaaaaatcagaagaacagctgcaggcttactataaaaagacactagaggaacgactttcagctggggcacttaacaccttcccccgagcattcaagcaggtaatggaaggccgggatataaagctagtaatcaatcagacagcgcaggactgcttcggatgcctggaatccataagccaaataagaacggcaacccgagataaaaaggacacggtgacccgggagaaacacccaaagaaaccttttcagaagtggatgaagaagagagcaatcaaaaaaggtaattatcttcggttccagcgtttattttatcttgatagagggaaactggctaaaatcattttagatgatattgaatgcttgtcttgtgacataccactcagtgaaatttattcggtttacaaaacaagatgggaaacaactggtagctttaaaagccttggggactttaaaacttacgggaaggctgacaacactgccttcagagaattaattacggctaaagaaattgagaaaaatgtgcaggaaatgagcaaaggctcggctcccggtccagacgggattactcttggggacgtcgtaaagatggatcccgagttttcccggaccatggagattttcaatttatggttaacaactggtaaaatcccggacatggtgagggggtgcagaaccgttttgattccaaaatcatcaaagccggatcgtttgaaagacattaataactggagacctatcacgatcggttccatcttgctgagactgttctccaggattgtaacagctaggctgagcaaagcgtgccccctgaacccaaggcaaagaggctttatcagagcggcgggatgctctgaaaacttaaaactcctgcaaactataatttggtcggccaaaagagaacacagaccactgggtgttgtattcgtggacatcgccaaggcttttgacaccgtaagccaccagcacatcattcatgctttgcagcaaagagaggtggatccccacatcgtcggtctggtgagcaatatgtacgagaacatcagtacgtatatcaccacaaagaggaacacacacacagacaaaatccagatccgggttggagtaaagcagggtgacccgatgtcgccccttttatttaacctggcaatggaccctctattatgcaagctggaagagagtggcaaaggataccaccgaggacagagcagcatcacagcgatggcatttgcagacgatctggttttgctgagcgactcctgggaaaatatgaatacaaatattagcatactggagaccttctgcaatctgaccggactcaaaacacaggggcaaaagtgccacggcttttacatcaagccgacaaagaagtcttacaccatcaatgactgcgctgcctggactatcaacggcacacccctgaacatgatcgaccccggcgaatctgagaaatacctcggcctgcagtttgacccgtggattggaatagcaaggtccggtctctccacaaaactagatttttggcttcagcggatcgatcaagcaccacttaaacctctgcagaaaactgatattctcaaaacatacaccatccctcggctgatctacatagctgaccactcagaagtgaaaagcgcactactcgaaacccttgaccagaagatccggacagcggtcaaggaatggcttcacctacctccgtgcacctgcgatgccatcctgtactcgagcacgagagacggcggtttgggcatcaccaaattggcaggactgatccccagcgtgcaggcccgtagactgcatcggatcgcacagtcatctgacgatacgatgaaatgcttcatggaaaaagagaaaatggaacagctgcataagaaattgtggattcaagctggaggggacagagagaacataccctcgatttgggaagcaccaccgtcgagtgaaccaccaaacaacgtgagcacaaattcggaatgggaagcaccgacccagaaagataaatttccaaagccttgcaattggaggaaaaacgaattcaaaaaatggaccaaattggcatcccaaggccgcggaattgtaaattttgaaagagacaaaattagtaaccattggatccaatactacagacgcatacctcacaggaaactcctcactgcactacaactcagggccaacgtttaccccacgagagaatttctagccaggggtagacaagaccaatacatcaaggcgtgtaggcactgcgatgcggacaacgaatcctgcgcccacatcatcggcaactgcccagtgacacaggacgcccgaatcaagaggcacaattacatctgcgaactgcttctcgaggaggcgaagaagaaggactgggtagtgttcaaggaaccgcacataagggattccaacaaggaactgtacaaacctgacctgatatttgtgaaggatgggcgtgcacttgtcgtggatgtgacagtacggtatgaagcagccaaatcatcgctggaggaagccgctgcagagaaagtgagaaagtacaaacacctggaaacggaagtaagacatctcacgaatgcaaaggacgttacttttgtgggctttcccctaggagcgcgggggaaatggcaccaagataactttaaacttttgactgagcttggcctctccaaatcgaggcaagtgaaaatggcagagactttttccacagtagcgctcttttcatctgtggacattgtacatatgtttgccagtagggccagaaaatctatggttatgtgataataggctgccttctgcggggcttgccttctggccatgcccttcttctctcccttgcacctgtacctcttggtctttgaataaagcctgagtaggaaggaccggtaaaaaaaaaaaaaaaaaaaaaaaaaaaaaaacgttgactaaaaaaaaaaaaaaaaaaaaaaaaaaaaaaaaaaaaaaaaaaaaaaaaaaaaaaaaaaaaaaaaaaaaaa

SEQ ID NO: 10889 - DNA, 5264 bp, synthetic construct
  source 1..5264: mol_type = other DNA
gaaataagagagaaaagaagagtaagaagaaatataagagaattcgccaccatggcccctaagaaaaagcggaaggtgaatatcagcggctctagctgcggcagccccaacagcgccgacaccagcagcgacttcaaggacctgtggaccaagctgaaggaatgccacgaccgggaagtgcagggactccaggtgaaggtcaccaaactcaagcaagaaagaatcctggacgcccagagactggaagaattcttcaccaagaaccagcagctgagagagcagcagaaagtgctgcacgagacaatcaaggttctggaagatagactgcgggccggcctgtgcgacagatgcgccgtgaccgaggaacacatgcgcaaaaagcagcaggagttcgagaacattagacagcaaaatctgaaattgatcacagagctgatgaacgagagaaacacactgcaggaggagaacaagaagctgagcgagcagctgcaacagaagatcgagaatgatcagcaacaccaggccgctgagctggaatgtgaagaggacgtgatccccgacagcccaatcacagctttcagcttttctggcgtgaacagactgaggcggaaggaaaacccccacgtgcggtacatcgagcagacccataccaagctggaacacagcgtgtgtgccaacgagatgagaaaggtgtccaagtcctccacccatccccagcacaaccctaacgaaaatgagatcctggtggctgatacctacgaccagtctcagagccctatggccaaggcccacggcaccagctcttatacccctgataagagctccttcaacctggccaccgtggtggccgagacactgggcctgggcgtgcaggaggaaagcgagacacagggcccaatgagccctctgggagatgagctgtaccactgcctggaaggcaaccacaagaaacagccttttgagtccggctccgagactcctggaacaagcgagagcgctacacctgagggcagccctaagagaaaggtgtccagcgccgagggcgctgccaaggaagagcctaaacggagaagcgccagactgagcgccaagccccccgccaaggtggaagccaagcctaagaaggccgccgctaaggacaagagcagcgataagaaagtccagaccaagggcaagcggggcgccaaaggcaaacaggccgaggtggccaaccaggagacaaaggaagatctgcctgctgagaacggcgaaaccaagaccgaggaatctccagcttctgacgaggccggagagaaggaggccaaaagcgacagcggctctgagacacctggaacaagcgagagcgccaccccggaatcctatgaacaacttgcaccacaaccgtgtgtgggagaaactttacattctagcctcccacgagacagtgaactgtttgtgcctgaagaggggagcagcgagaaggagagcgaggacgcgccaaaaacatctcctccgacgcctgggaaacatggtttggaacagactggggaggaaaaagtgatggtgactgttcctgacaaaaatccaccttgtccttgctgtggtacccgggtaaactctgtgttgaatctgattgaacatctgaaagtgtcacacgggaaaaggggggtttgttttcggtgtgcaaaatgtggaaaggaaaatagtaactatcacagtgttgtttgtcattttaagaaatgcaggggtccagagacggagaaagccccagctggggagtggatttgtgaggtatgcaacagagattttacaaccaaaattggcctgggacaacacaagagattggcacacccagcagtgagaaatcaggaaaggatcgttgcttcccaaccgaaagaaacatcaaatagaggtgctcacaaaaggtgctggacaaaggaggaggaagaattactaataagactggaggctcagttcgagggaaacaaaaatattaataagcttattgcagaacacataaccaccaaaacagctaagcagatcagtgacaaaaggcgattgctgtccagaaagccagcagaggagccacgtgaggagcctggaacgtgtcatcacaccaggagagcagctgcgagcctgagaacggagcctgagatgagtcatcacgcccaggcagaggacagagataatggacctgggagacgccctctgccaggcagggcagctgccggagggagaacaatggacgagataagacgccaccctgataagggcaacggacagcagagacccaccaagcaaaaatcagaagaacagctgcaggcttactataaaaagacactagaggaacgactttcagctggggcacttaacaccttcccccgagcattcaagcaggtaatggaaggccgggatataaagctagtaatcaatcagacagcgcaggactgcttcggatgcctggaatccataagccaaataagaacggcaacccgagataaaaaggacacggtgacccgggagaaacacccaaagaaaccttttcagaagtggatgaagaagagagcaatcaaaaaaggtaattatcttcggttccagcgtttattttatcttgatagagggaaactggctaaaatcattttagatgatattgaatgcttgtcttgtgacataccactcagtgaaatttattcggtttttaaaacaagatgggaaacaactggtagctttaaaagccttggggactttaaaacttacgggaaggctgacaacactgccctgagagaattaattacggctaaagaaattgagaaaaatgtgcaggaaatgagcaaaggctcggctcccggtccagacgggattactcttggggacgtcgtaaagatggatcccgagttttcccggaccatggagattttcaatttatggttaacaactggtaaaatcccggacatggtgagggggtgcagaaccgttttgattccaaaatcatcaaagccggatcgtttgaaagacattaataactggagacctatcacgatcggttccatcttgctgagactgttctccaggattgtaacagctaggctgagcaaagcgtgccccctgaacccaaggcaaagaggctttatcagagcggcgggatgctctgaaaacttaaaactcctgcaaactataatttggtcggccaaaagagaacacagaccactgggtgttgtattcgtggacatcgccaaggcttttgacaccgtaagccaccagcacatcattcatgctttgcagcaaagagaggtggatccccacatcgtcggtctggtgagcaatatgtacgagaacatcagtacgtatatcaccacaaagaggaacacacacacagacaaaatccagatccgggttggagtaaagcagggtgacccgatgtcgccccttttatttaacctggcaatggaccctctattatgcaagctggaagagagtggcaaaggataccaccgaggacagagcagcatcacagcgatggcatttgcagacgatctggttttgctgagcgactcctgggaaaatatgaatacaaatattagcatactggagaccttctgcaatctgaccggactcaaaacacaggggcaaaagtgccacggcttttacatcaagccgacaaagaagtcttacaccatcaatgactgcgctgcctggactatcaacggcacacccctgaacatgatcgaccccggcgaatctgagaaatacctcggcctgcagtttgacccgtggattggaatagcaaggtccggtctctccacaaaactagatttttggcttcagcggatcgatcaagcaccacttaaacctctgcagaaaactgatattctcaaaacatacaccatccctcggctgatctacatagctgaccactcagaagtgaaaagcgcactactcgaaacccttgaccagaagatccggacagcggtcaaggaatggcttcacctacctccgtgcacctgcgatgccatcctgtactcgagcacgagagacggcggtttgggcatcaccaaattggcaggactgatccccagcgtgcaggcccgtagactgcatcggatcgcacagtcatctgacgatacgatgaaatgcttcatggaaaaagagaaaatggaacagctgcataagaaattgtggattcaagctggaggggacagagagaacataccctcgatttgggaagcaccaccgtcgagtgaaccaccaaacaacgtgagcacaaattcggaatgggaagcaccgacccagaaagataaatttccaaagccttgcaattggaggaaaaacgaattcaaaaaatggaccaaattggcatcccaaggccgcggaattgtaaattttgaaagagacaaaattagtaaccattggatccaatactacagacgcatacctcacaggaaactcctcactgcactacaactcagggccaacgtttaccccacgagagaatttctagccaggggtagacaagaccaatacatcaaggcgtgtaggcactgcgatgcggacaacgaatcctgcgcccacatcatcggcaactgcccagtgacacaggacgcccgaatcaagaggcacaattacatctgcgaactgcttctcgaggaggcgaagaagaaggactgggtagtgttcaaggaaccgcacataagggattccaacaaggaactgtacaaacctgacctgatatttgtgaaggatgggcgtgcacttgtcgtggatgtgacagtacggtatgaagcagccaaatcatcgctggaggaagccgctgcagagaaagtgagaaagtacaaacacctggaaacggaagtaagacatctcacgaatgcaaaggacgttacttttgtgggctttcccctaggagcgcgggggaaatggcaccaagataactttaaacttttgactgagcttggcctctccaaatcgaggcaagtgaaaatggcagagactttttccacagtagcgctcttttcatctgtggacattgtacatatgtttgccagtagggccagaaaatctatggttatgtgataataggctgccttctgcggggcttgccttctggccatgcccttcttctctcccttgcacctgtacctcttggtctttgaataaagcctgagtaggaaggaccggtaaaaaaaaaaaaaaaaaaaaaaaaaaaaaaacgttgactaaaaaaaaaaaaaaaaaaaaaaaaaaaaaaaaaaaaaaaaaaaaaaaaaaaaaaaaaaaaaaaaaaaaaa

SEQ ID NO: 10890 - DNA, 5264 bp, synthetic construct
  source 1..5264: mol_type = other DNA
gaaataagagagaaaagaagagtaagaagaaatataagagaattcgccaccatggcccctaagaaaaagcggaaggtgaatatcagcggctctagctgcggcagccccaacagcgccgacaccagcagcgacttcaaggacctgtggaccaagctgaaggaatgccacgaccgggaagtgcagggactccaggtgaaggtcaccaaactcaagcaagaaagaatcctggacgcccagagactggaagaattcttcaccaagaaccagcagctgagagagcagcagaaagtgctgcacgagacaatcaaggttctggaagatagactgcgggccggcctgtgcgacagatgcgccgtgaccgaggaacacatgcgcaaaaagcagcaggagttcgagaacattagacagcaaaatctgaaattgatcacagagctgatgaacgagagaaacacactgcaggaggagaacaagaagctgagcgagcagctgcaacagaagatcgagaatgatcagcaacaccaggccgctgagctggaatgtgaagaggacgtgatccccgacagcccaatcacagctttcagcttttctggcgtgaacagactgaggcggaaggaaaacccccacgtgcggtacatcgagcagacccataccaagctggaacacagcgtgtgtgccaacgagatgagaaaggtgtccaagtcctccacccatccccagcacaaccctaacgaaaatgagatcctggtggctgatacctacgaccagtctcagagccctatggccaaggcccacggcaccagctcttatacccctgataagagctccttcaacctggccaccgtggtggccgagacactgggcctgggcgtgcaggaggaaagcgagacacagggcccaatgagccctctgggagatgagctgtaccactgcctggaaggcaaccacaagaaacagccttttgagtccggctccgagactcctggaacaagcgagagcgctacacctgagggcagccctaagagaaaggtgtccagcgccgagggcgctgccaaggaagagcctaaacggagaagcgccagactgagcgccaagccccccgccaaggtggaagccaagcctaagaaggccgccgctaaggacaagagcagcgataagaaagtccagaccaagggcaagcggggcgccaaaggcaaacaggccgaggtggccaaccaggagacaaaggaagatctgcctgctgagaacggcgaaaccaagaccgaggaatctccagcttctgacgaggccggagagaaggaggccaaaagcgacagcggctctgagacacctggaacaagcgagagcgccaccccggaatcctatgaacaacttgcaccacaaccgtgtgtgggagaaactttacattctagcctcccacgagacagtgaactgtttgtgcctgaagaggggagcagcgagaaggagagcgaggacgcgccaaaaacatctcctccgacgcctgggaaacatggtttggaacagactggggaggaaaaagtgatggtgactgttcctgacaaaaatccaccttgtccttgctgtggtacccgggtaaactctgtgttgaatctgattgaacatctgaaagtgtcacacgggaaaaggggggtttgttttcggtgtgcaaaatgtggaaaggaaaatagtaactatcacagtgttgtttgtcattttaagaaatgcaggggtccagagacggagaaagccccagctggggagtggatttgtgaggtatgcaacagagattttacaaccaaaattggcctgggacaacacaagagattggcacacccagcagtgagaaatcaggaaaggatcgttgcttcccaaccgaaagaaacatcaaatagaggtgctcacaaaaggtgctggacaaaggaggaggaagaattactaataagactggaggctcagttcgagggaaacaaaaatattaataagcttattgcagaacacataaccaccaaaacagctaagcagatcagtgacaaaaggcgattgctgtccagaaagccagcagaggagccacgtgaggagcctggaacgtgtcatcacaccaggagagcagctgcgagcctgagaacggagcctgagatgagtcatcacgcccaggcagaggacagagataatggacctgggagacgccctctgccaggcagggcagctgccggagggagaacaatggacgagataagacgccaccctgataagggcaacggacagcagagacccaccaagcaaaaatcagaagaacagctgcaggcttactataaaaagacactagaggaacgactttcagctggggcacttaacaccttcccccgagcattcaagcaggtaatggaaggccgggatataaagctagtaatcaatcagacagcgcaggactgcttcggatgcctggaatccataagccaaataagaacggcaacccgagataaaaaggacacggtgacccgggagaaacacccaaagaaaccttttcagaagtggatgaagaagagagcaatcaaaaaaggtaattatcttcggttccagcgtttattttatcttgatagagggaaactggctaaaatcattttagatgatattgaatgcttgtcttgtgacataccactcagtgaaatttattcggtttttaaaacaagatgggaaacaactggtagctttaaaagccttggggactttaaaacttacgggaaggctgacaacactgccttcagagaacccattacggctaaagaaattgagaaaaatgtgcaggaaatgagcaaaggctcggctcccggtccagacgggattactcttggggacgtcgtaaagatggatcccgagttttcccggaccatggagattttcaatttatggttaacaactggtaaaatcccggacatggtgagggggtgcagaaccgttttgattccaaaatcatcaaagccggatcgtttgaaagacattaataactggagacctatcacgatcggttccatcttgctgagactgttctccaggattgtaacagctaggctgagcaaagcgtgccccctgaacccaaggcaaagaggctttatcagagcggcgggatgctctgaaaacttaaaactcctgcaaactataatttggtcggccaaaagagaacacagaccactgggtgttgtattcgtggacatcgccaaggcttttgacaccgtaagccaccagcacatcattcatgctttgcagcaaagagaggtggatccccacatcgtcggtctggtgagcaatatgtacgagaacatcagtacgtatatcaccacaaagaggaacacacacacagacaaaatccagatccgggttggagtaaagcagggtgacccgatgtcgccccttttatttaacctggcaatggaccctctattatgcaagctggaagagagtggcaaaggataccaccgaggacagagcagcatcacagcgatggcatttgcagacgatctggttttgctgagcgactcctgggaaaatatgaatacaaatattagcatactggagaccttctgcaatctgaccggactcaaaacacaggggcaaaagtgccacggcttttacatcaagccgacaaagaagtcttacaccatcaatgactgcgctgcctggactatcaacggcacacccctgaacatgatcgaccccggcgaatctgagaaatacctcggcctgcagtttgacccgtggattggaatagcaaggtccggtctctccacaaaactagatttttggcttcagcggatcgatcaagcaccacttaaacctctgcagaaaactgatattctcaaaacatacaccatccctcggctgatctacatagctgaccactcagaagtgaaaagcgcactactcgaaacccttgaccagaagatccggacagcggtcaaggaatggcttcacctacctccgtgcacctgcgatgccatcctgtactcgagcacgagagacggcggtttgggcatcaccaaattggcaggactgatccccagcgtgcaggcccgtagactgcatcggatcgcacagtcatctgacgatacgatgaaatgcttcatggaaaaagagaaaatggaacagctgcataagaaattgtggattcaagctggaggggacagagagaacataccctcgatttgggaagcaccaccgtcgagtgaaccaccaaacaacgtgagcacaaattcggaatgggaagcaccgacccagaaagataaatttccaaagccttgcaattggaggaaaaacgaattcaaaaaatggaccaaattggcatcccaaggccgcggaattgtaaattttgaaagagacaaaattagtaaccattggatccaatactacagacgcatacctcacaggaaactcctcactgcactacaactcagggccaacgtttaccccacgagagaatttctagccaggggtagacaagaccaatacatcaaggcgtgtaggcactgcgatgcggacaacgaatcctgcgcccacatcatcggcaactgcccagtgacacaggacgcccgaatcaagaggcacaattacatctgcgaactgcttctcgaggaggcgaagaagaaggactgggtagtgttcaaggaaccgcacataagggattccaacaaggaactgtacaaacctgacctgatatttgtgaaggatgggcgtgcacttgtcgtggatgtgacagtacggtatgaagcagccaaatcatcgctggaggaagccgctgcagagaaagtgagaaagtacaaacacctggaaacggaagtaagacatctcacgaatgcaaaggacgttacttttgtgggctttcccctaggagcgcgggggaaatggcaccaagataactttaaacttttgactgagcttggcctctccaaatcgaggcaagtgaaaatggcagagactttttccacagtagcgctcttttcatctgtggacattgtacatatgtttgccagtagggccagaaaatctatggttatgtgataataggctgccttctgcggggcttgccttctggccatgcccttcttctctcccttgcacctgtacctcttggtctttgaataaagcctgagtaggaaggaccggtaaaaaaaaaaaaaaaaaaaaaaaaaaaaaaacgttgactaaaaaaaaaaaaaaaaaaaaaaaaaaaaaaaaaaaaaaaaaaaaaaaaaaaaaaaaaaaaaaaaaaaaaa

SEQ ID NO: 10891 - DNA, 5264 bp, synthetic construct
  source 1..5264: mol_type = other DNA
gaaataagagagaaaagaagagtaagaagaaatataagagaattcgccaccatggcccctaagaaaaagcggaaggtgaatatcagcggctctagctgcggcagccccaacagcgccgacaccagcagcgacttcaaggacctgtggaccaagctgaaggaatgccacgaccgggaagtgcagggactccaggtgaaggtcaccaaactcaagcaagaaagaatcctggacgcccagagactggaagaattcttcaccaagaaccagcagctgagagagcagcagaaagtgctgcacgagacaatcaaggttctggaagatagactgcgggccggcctgtgcgacagatgcgccgtgaccgaggaacacatgcgcaaaaagcagcaggagttcgagaacattagacagcaaaatctgaaattgatcacagagctgatgaacgagagaaacacactgcaggaggagaacaagaagctgagcgagcagctgcaacagaagatcgagaatgatcagcaacaccaggccgctgagctggaatgtgaagaggacgtgatccccgacagcccaatcacagctttcagcttttctggcgtgaacagactgaggcggaaggaaaacccccacgtgcggtacatcgagcagacccataccaagctggaacacagcgtgtgtgccaacgagatgagaaaggtgtccaagtcctccacccatccccagcacaaccctaacgaaaatgagatcctggtggctgatacctacgaccagtctcagagccctatggccaaggcccacggcaccagctcttatacccctgataagagctccttcaacctggccaccgtggtggccgagacactgggcctgggcgtgcaggaggaaagcgagacacagggcccaatgagccctctgggagatgagctgtaccactgcctggaaggcaaccacaagaaacagccttttgagtccggctccgagactcctggaacaagcgagagcgctacacctgagggcagccctaagagaaaggtgtccagcgccgagggcgctgccaaggaagagcctaaacggagaagcgccagactgagcgccaagccccccgccaaggtggaagccaagcctaagaaggccgccgctaaggacaagagcagcgataagaaagtccagaccaagggcaagcggggcgccaaaggcaaacaggccgaggtggccaaccaggagacaaaggaagatctgcctgctgagaacggcgaaaccaagaccgaggaatctccagcttctgacgaggccggagagaaggaggccaaaagcgacagcggctctgagacacctggaacaagcgagagcgccaccccggaatcctatgaacaacttgcaccacaaccgtgtgtgggagaaactttacattctagcctcccacgagacagtgaactgtttgtgcctgaagaggggagcagcgagaaggagagcgaggacgcgccaaaaacatctcctccgacgcctgggaaacatggtttggaacagactggggaggaaaaagtgatggtgactgttcctgacaaaaatccaccttgtccttgctgtggtacccgggtaaactctgtgttgaatctgattgaacatctgaaagtgtcacacgggaaaaggggggtttgttttcggtgtgcaaaatgtggaaaggaaaatagtaactatcacagtgttgtttgtcattttaagaaatgcaggggtccagagacggagaaagccccagctggggagtggatttgtgaggtatgcaacagagattttacaaccaaaattggcctgggacaacacaagagattggcacacccagcagtgagaaatcaggaaaggatcgttgcttcccaaccgaaagaaacatcaaatagaggtgctcacaaaaggtgctggacaaaggaggaggaagaattactaataagactggaggctcagttcgagggaaacaaaaatattaataagcttattgcagaacacataaccaccaaaacagctaagcagatcagtgacaaaaggcgattgctgtccagaaagccagcagaggagccacgtgaggagcctggaacgtgtcatcacaccaggagagcagctgcgagcctgagaacggagcctgagatgagtcatcacgcccaggcagaggacagagataatggacctgggagacgccctctgccaggcagggcagctgccggagggagaacaatggacgagataagacgccaccctgataagggcaacggacagcagagacccaccaagcaaaaatcagaagaacagctgcaggcttactataaaaagacactagaggaacgactttcagctggggcacttaacaccttcccccgagcattcaagcaggtaatggaaggccgggatataaagctagtaatcaatcagacagcgcaggactgcttcggatgcctggaatccataagccaaataagaacggcaacccgagataaaaaggacacggtgacccgggagaaacacccaaagaaaccttttcagaagtggatgaagaagagagcaatcaaaaaaggtaattatcttcggttccagcgtttattttatcttgatagagggaaactggctaaaatcattttagatgatattgaatgcttgtcttgtgacataccactcagtgaaatttattcggtttttaaaacaagatgggaaacaactggtagctttaaaagccttggggactttaaaacttacgggaaggctgacaacactgccttcagagaattaattacggctaaagaaattgagaaaaatctgcaggaaatgagcaaaggctcggctcccggtccagacgggattactcttggggacgtcgtaaagatggatcccgagttttcccggaccatggagattttcaatttatggttaacaactggtaaaatcccggacatggtgagggggtgcagaaccgttttgattccaaaatcatcaaagccggatcgtttgaaagacattaataactggagacctatcacgatcggttccatcttgctgagactgttctccaggattgtaacagctaggctgagcaaagcgtgccccctgaacccaaggcaaagaggctttatcagagcggcgggatgctctgaaaacttaaaactcctgcaaactataatttggtcggccaaaagagaacacagaccactgggtgttgtattcgtggacatcgccaaggcttttgacaccgtaagccaccagcacatcattcatgctttgcagcaaagagaggtggatccccacatcgtcggtctggtgagcaatatgtacgagaacatcagtacgtatatcaccacaaagaggaacacacacacagacaaaatccagatccgggttggagtaaagcagggtgacccgatgtcgccccttttatttaacctggcaatggaccctctattatgcaagctggaagagagtggcaaaggataccaccgaggacagagcagcatcacagcgatggcatttgcagacgatctggttttgctgagcgactcctgggaaaatatgaatacaaatattagcatactggagaccttctgcaatctgaccggactcaaaacacaggggcaaaagtgccacggcttttacatcaagccgacaaagaagtcttacaccatcaatgactgcgctgcctggactatcaacggcacacccctgaacatgatcgaccccggcgaatctgagaaatacctcggcctgcagtttgacccgtggattggaatagcaaggtccggtctctccacaaaactagatttttggcttcagcggatcgatcaagcaccacttaaacctctgcagaaaactgatattctcaaaacatacaccatccctcggctgatctacatagctgaccactcagaagtgaaaagcgcactactcgaaacccttgaccagaagatccggacagcggtcaaggaatggcttcacctacctccgtgcacctgcgatgccatcctgtactcgagcacgagagacggcggtttgggcatcaccaaattggcaggactgatccccagcgtgcaggcccgtagactgcatcggatcgcacagtcatctgacgatacgatgaaatgcttcatggaaaaagagaaaatggaacagctgcataagaaattgtggattcaagctggaggggacagagagaacataccctcgatttgggaagcaccaccgtcgagtgaaccaccaaacaacgtgagcacaaattcggaatgggaagcaccgacccagaaagataaatttccaaagccttgcaattggaggaaaaacgaattcaaaaaatggaccaaattggcatcccaaggccgcggaattgtaaattttgaaagagacaaaattagtaaccattggatccaatactacagacgcatacctcacaggaaactcctcactgcactacaactcagggccaacgtttaccccacgagagaatttctagccaggggtagacaagaccaatacatcaaggcgtgtaggcactgcgatgcggacaacgaatcctgcgcccacatcatcggcaactgcccagtgacacaggacgcccgaatcaagaggcacaattacatctgcgaactgcttctcgaggaggcgaagaagaaggactgggtagtgttcaaggaaccgcacataagggattccaacaaggaactgtacaaacctgacctgatatttgtgaaggatgggcgtgcacttgtcgtggatgtgacagtacggtatgaagcagccaaatcatcgctggaggaagccgctgcagagaaagtgagaaagtacaaacacctggaaacggaagtaagacatctcacgaatgcaaaggacgttacttttgtgggctttcccctaggagcgcgggggaaatggcaccaagataactttaaacttttgactgagcttggcctctccaaatcgaggcaagtgaaaatggcagagactttttccacagtagcgctcttttcatctgtggacattgtacatatgtttgccagtagggccagaaaatctatggttatgtgataataggctgccttctgcggggcttgccttctggccatgcccttcttctctcccttgcacctgtacctcttggtctttgaataaagcctgagtaggaaggaccggtaaaaaaaaaaaaaaaaaaaaaaaaaaaaaaacgttgactaaaaaaaaaaaaaaaaaaaaaaaaaaaaaaaaaaaaaaaaaaaaaaaaaaaaaaaaaaaaaaaaaaaaaa

SEQ ID NO: 10892 - DNA, 5264 bp, synthetic construct
  source 1..5264: mol_type = other DNA
gaaataagagagaaaagaagagtaagaagaaatataagagaattcgccaccatggcccctaagaaaaagcggaaggtgaatatcagcggctctagctgcggcagccccaacagcgccgacaccagcagcgacttcaaggacctgtggaccaagctgaaggaatgccacgaccgggaagtgcagggactccaggtgaaggtcaccaaactcaagcaagaaagaatcctggacgcccagagactggaagaattcttcaccaagaaccagcagctgagagagcagcagaaagtgctgcacgagacaatcaaggttctggaagatagactgcgggccggcctgtgcgacagatgcgccgtgaccgaggaacacatgcgcaaaaagcagcaggagttcgagaacattagacagcaaaatctgaaattgatcacagagctgatgaacgagagaaacacactgcaggaggagaacaagaagctgagcgagcagctgcaacagaagatcgagaatgatcagcaacaccaggccgctgagctggaatgtgaagaggacgtgatccccgacagcccaatcacagctttcagcttttctggcgtgaacagactgaggcggaaggaaaacccccacgtgcggtacatcgagcagacccataccaagctggaacacagcgtgtgtgccaacgagatgagaaaggtgtccaagtcctccacccatccccagcacaaccctaacgaaaatgagatcctggtggctgatacctacgaccagtctcagagccctatggccaaggcccacggcaccagctcttatacccctgataagagctccttcaacctggccaccgtggtggccgagacactgggcctgggcgtgcaggaggaaagcgagacacagggcccaatgagccctctgggagatgagctgtaccactgcctggaaggcaaccacaagaaacagccttttgagtccggctccgagactcctggaacaagcgagagcgctacacctgagggcagccctaagagaaaggtgtccagcgccgagggcgctgccaaggaagagcctaaacggagaagcgccagactgagcgccaagccccccgccaaggtggaagccaagcctaagaaggccgccgctaaggacaagagcagcgataagaaagtccagaccaagggcaagcggggcgccaaaggcaaacaggccgaggtggccaaccaggagacaaaggaagatctgcctgctgagaacggcgaaaccaagaccgaggaatctccagcttctgacgaggccggagagaaggaggccaaaagcgacagcggctctgagacacctggaacaagcgagagcgccaccccggaatcctatgaacaacttgcaccacaaccgtgtgtgggagaaactttacattctagcctcccacgagacagtgaactgtttgtgcctgaagaggggagcagcgagaaggagagcgaggacgcgccaaaaacatctcctccgacgcctgggaaacatggtttggaacagactggggaggaaaaagtgatggtgactgttcctgacaaaaatccaccttgtccttgctgtggtacccgggtaaactctgtgttgaatctgattgaacatctgaaagtgtcacacgggaaaaggggggtttgttttcggtgtgcaaaatgtggaaaggaaaatagtaactatcacagtgttgtttgtcattttaagaaatgcaggggtccagagacggagaaagccccagctggggagtggatttgtgaggtatgcaacagagattttacaaccaaaattggcctgggacaacacaagagattggcacacccagcagtgagaaatcaggaaaggatcgttgcttcccaaccgaaagaaacatcaaatagaggtgctcacaaaaggtgctggacaaaggaggaggaagaattactaataagactggaggctcagttcgagggaaacaaaaatattaataagcttattgcagaacacataaccaccaaaacagctaagcagatcagtgacaaaaggcgattgctgtccagaaagccagcagaggagccacgtgaggagcctggaacgtgtcatcacaccaggagagcagctgcgagcctgagaacggagcctgagatgagtcatcacgcccaggcagaggacagagataatggacctgggagacgccctctgccaggcagggcagctgccggagggagaacaatggacgagataagacgccaccctgataagggcaacggacagcagagacccaccaagcaaaaatcagaagaacagctgcaggcttactataaaaagacactagaggaacgactttcagctggggcacttaacaccttcccccgagcattcaagcaggtaatggaaggccgggatataaagctagtaatcaatcagacagcgcaggactgcttcggatgcctggaatccataagccaaataagaacggcaacccgagataaaaaggacacggtgacccgggagaaacacccaaagaaaccttttcagaagtggatgaagaagagagcaatcaaaaaaggtaattatcttcggttccagcgtttattttatcttgatagagggaaactggctaaaatcattttagatgatattgaatgcttgtcttgtgacataccactcagtgaaatttattcggtttttaaaacaagatgggaaacaactggtagctttaaaagccttggggactttaaaacttacgggaaggctgacaacactgccttcagagaattaattacggctaaagaaattgagaaaaatgtgcaggaaatgagcaaaggctcgagccccggtccagacgggattactcttggggacgtcgtaaagatggatcccgagttttcccggaccatggagattttcaatttatggttaacaactggtaaaatcccggacatggtgagggggtgcagaaccgttttgattccaaaatcatcaaagccggatcgtttgaaagacattaataactggagacctatcacgatcggttccatcttgctgagactgttctccaggattgtaacagctaggctgagcaaagcgtgccccctgaacccaaggcaaagaggctttatcagagcggcgggatgctctgaaaacttaaaactcctgcaaactataatttggtcggccaaaagagaacacagaccactgggtgttgtattcgtggacatcgccaaggcttttgacaccgtaagccaccagcacatcattcatgctttgcagcaaagagaggtggatccccacatcgtcggtctggtgagcaatatgtacgagaacatcagtacgtatatcaccacaaagaggaacacacacacagacaaaatccagatccgggttggagtaaagcagggtgacccgatgtcgccccttttatttaacctggcaatggaccctctattatgcaagctggaagagagtggcaaaggataccaccgaggacagagcagcatcacagcgatggcatttgcagacgatctggttttgctgagcgactcctgggaaaatatgaatacaaatattagcatactggagaccttctgcaatctgaccggactcaaaacacaggggcaaaagtgccacggcttttacatcaagccgacaaagaagtcttacaccatcaatgactgcgctgcctggactatcaacggcacacccctgaacatgatcgaccccggcgaatctgagaaatacctcggcctgcagtttgacccgtggattggaatagcaaggtccggtctctccacaaaactagatttttggcttcagcggatcgatcaagcaccacttaaacctctgcagaaaactgatattctcaaaacatacaccatccctcggctgatctacatagctgaccactcagaagtgaaaagcgcactactcgaaacccttgaccagaagatccggacagcggtcaaggaatggcttcacctacctccgtgcacctgcgatgccatcctgtactcgagcacgagagacggcggtttgggcatcaccaaattggcaggactgatccccagcgtgcaggcccgtagactgcatcggatcgcacagtcatctgacgatacgatgaaatgcttcatggaaaaagagaaaatggaacagctgcataagaaattgtggattcaagctggaggggacagagagaacataccctcgatttgggaagcaccaccgtcgagtgaaccaccaaacaacgtgagcacaaattcggaatgggaagcaccgacccagaaagataaatttccaaagccttgcaattggaggaaaaacgaattcaaaaaatggaccaaattggcatcccaaggccgcggaattgtaaattttgaaagagacaaaattagtaaccattggatccaatactacagacgcatacctcacaggaaactcctcactgcactacaactcagggccaacgtttaccccacgagagaatttctagccaggggtagacaagaccaatacatcaaggcgtgtaggcactgcgatgcggacaacgaatcctgcgcccacatcatcggcaactgcccagtgacacaggacgcccgaatcaagaggcacaattacatctgcgaactgcttctcgaggaggcgaagaagaaggactgggtagtgttcaaggaaccgcacataagggattccaacaaggaactgtacaaacctgacctgatatttgtgaaggatgggcgtgcacttgtcgtggatgtgacagtacggtatgaagcagccaaatcatcgctggaggaagccgctgcagagaaagtgagaaagtacaaacacctggaaacggaagtaagacatctcacgaatgcaaaggacgttacttttgtgggctttcccctaggagcgcgggggaaatggcaccaagataactttaaacttttgactgagcttggcctctccaaatcgaggcaagtgaaaatggcagagactttttccacagtagcgctcttttcatctgtggacattgtacatatgtttgccagtagggccagaaaatctatggttatgtgataataggctgccttctgcggggcttgccttctggccatgcccttcttctctcccttgcacctgtacctcttggtctttgaataaagcctgagtaggaaggaccggtaaaaaaaaaaaaaaaaaaaaaaaaaaaaaaacgttgactaaaaaaaaaaaaaaaaaaaaaaaaaaaaaaaaaaaaaaaaaaaaaaaaaaaaaaaaaaaaaaaaaaaaaa

SEQ ID NO: 10893 - DNA, 5264 bp, synthetic construct
  source 1..5264: mol_type = other DNA
gaaataagagagaaaagaagagtaagaagaaatataagagaattcgccaccatggcccctaagaaaaagcggaaggtgaatatcagcggctctagctgcggcagccccaacagcgccgacaccagcagcgacttcaaggacctgtggaccaagctgaaggaatgccacgaccgggaagtgcagggactccaggtgaaggtcaccaaactcaagcaagaaagaatcctggacgcccagagactggaagaattcttcaccaagaaccagcagctgagagagcagcagaaagtgctgcacgagacaatcaaggttctggaagatagactgcgggccggcctgtgcgacagatgcgccgtgaccgaggaacacatgcgcaaaaagcagcaggagttcgagaacattagacagcaaaatctgaaattgatcacagagctgatgaacgagagaaacacactgcaggaggagaacaagaagctgagcgagcagctgcaacagaagatcgagaatgatcagcaacaccaggccgctgagctggaatgtgaagaggacgtgatccccgacagcccaatcacagctttcagcttttctggcgtgaacagactgaggcggaaggaaaacccccacgtgcggtacatcgagcagacccataccaagctggaacacagcgtgtgtgccaacgagatgagaaaggtgtccaagtcctccacccatccccagcacaaccctaacgaaaatgagatcctggtggctgatacctacgaccagtctcagagccctatggccaaggcccacggcaccagctcttatacccctgataagagctccttcaacctggccaccgtggtggccgagacactgggcctgggcgtgcaggaggaaagcgagacacagggcccaatgagccctctgggagatgagctgtaccactgcctggaaggcaaccacaagaaacagccttttgagtccggctccgagactcctggaacaagcgagagcgctacacctgagggcagccctaagagaaaggtgtccagcgccgagggcgctgccaaggaagagcctaaacggagaagcgccagactgagcgccaagccccccgccaaggtggaagccaagcctaagaaggccgccgctaaggacaagagcagcgataagaaagtccagaccaagggcaagcggggcgccaaaggcaaacaggccgaggtggccaaccaggagacaaaggaagatctgcctgctgagaacggcgaaaccaagaccgaggaatctccagcttctgacgaggccggagagaaggaggccaaaagcgacagcggctctgagacacctggaacaagcgagagcgccaccccggaatcctatgaacaacttgcaccacaaccgtgtgtgggagaaactttacattctagcctcccacgagacagtgaactgtttgtgcctgaagaggggagcagcgagaaggagagcgaggacgcgccaaaaacatctcctccgacgcctgggaaacatggtttggaacagactggggaggaaaaagtgatggtgactgttcctgacaaaaatccaccttgtccttgctgtggtacccgggtaaactctgtgttgaatctgattgaacatctgaaagtgtcacacgggaaaaggggggtttgttttcggtgtgcaaaatgtggaaaggaaaatagtaactatcacagtgttgtttgtcattttaagaaatgcaggggtccagagacggagaaagccccagctggggagtggatttgtgaggtatgcaacagagattttacaaccaaaattggcctgggacaacacaagagattggcacacccagcagtgagaaatcaggaaaggatcgttgcttcccaaccgaaagaaacatcaaatagaggtgctcacaaaaggtgctggacaaaggaggaggaagaattactaataagactggaggctcagttcgagggaaacaaaaatattaataagcttattgcagaacacataaccaccaaaacagctaagcagatcagtgacaaaaggcgattgctgtccagaaagccagcagaggagccacgtgaggagcctggaacgtgtcatcacaccaggagagcagctgcgagcctgagaacggagcctgagatgagtcatcacgcccaggcagaggacagagataatggacctgggagacgccctctgccaggcagggcagctgccggagggagaacaatggacgagataagacgccaccctgataagggcaacggacagcagagacccaccaagcaaaaatcagaagaacagctgcaggcttactataaaaagacactagaggaacgactttcagctggggcacttaacaccttcccccgagcattcaagcaggtaatggaaggccgggatataaagctagtaatcaatcagacagcgcaggactgcttcggatgcctggaatccataagccaaataagaacggcaacccgagataaaaaggacacggtgacccgggagaaacacccaaagaaaccttttcagaagtggatgaagaagagagcaatcaaaaaaggtaattatcttcggttccagcgtttattttatcttgatagagggaaactggctaaaatcattttagatgatattgaatgcttgtcttgtgacataccactcagtgaaatttattcggtttttaaaacaagatgggaaacaactggtagctttaaaagccttggggactttaaaacttacgggaaggctgacaacactgccttcagagaattaattacggctaaagaaattgagaaaaatgtgcaggaaatgagcaaaggctcggctgccggtccagacgggattactcttggggacgtcgtaaagatggatcccgagttttcccggaccatggagattttcaatttatggttaacaactggtaaaatcccggacatggtgagggggtgcagaaccgttttgattccaaaatcatcaaagccggatcgtttgaaagacattaataactggagacctatcacgatcggttccatcttgctgagactgttctccaggattgtaacagctaggctgagcaaagcgtgccccctgaacccaaggcaaagaggctttatcagagcggcgggatgctctgaaaacttaaaactcctgcaaactataatttggtcggccaaaagagaacacagaccactgggtgttgtattcgtggacatcgccaaggcttttgacaccgtaagccaccagcacatcattcatgctttgcagcaaagagaggtggatccccacatcgtcggtctggtgagcaatatgtacgagaacatcagtacgtatatcaccacaaagaggaacacacacacagacaaaatccagatccgggttggagtaaagcagggtgacccgatgtcgccccttttatttaacctggcaatggaccctctattatgcaagctggaagagagtggcaaaggataccaccgaggacagagcagcatcacagcgatggcatttgcagacgatctggttttgctgagcgactcctgggaaaatatgaatacaaatattagcatactggagaccttctgcaatctgaccggactcaaaacacaggggcaaaagtgccacggcttttacatcaagccgacaaagaagtcttacaccatcaatgactgcgctgcctggactatcaacggcacacccctgaacatgatcgaccccggcgaatctgagaaatacctcggcctgcagtttgacccgtggattggaatagcaaggtccggtctctccacaaaactagatttttggcttcagcggatcgatcaagcaccacttaaacctctgcagaaaactgatattctcaaaacatacaccatccctcggctgatctacatagctgaccactcagaagtgaaaagcgcactactcgaaacccttgaccagaagatccggacagcggtcaaggaatggcttcacctacctccgtgcacctgcgatgccatcctgtactcgagcacgagagacggcggtttgggcatcaccaaattggcaggactgatccccagcgtgcaggcccgtagactgcatcggatcgcacagtcatctgacgatacgatgaaatgcttcatggaaaaagagaaaatggaacagctgcataagaaattgtggattcaagctggaggggacagagagaacataccctcgatttgggaagcaccaccgtcgagtgaaccaccaaacaacgtgagcacaaattcggaatgggaagcaccgacccagaaagataaatttccaaagccttgcaattggaggaaaaacgaattcaaaaaatggaccaaattggcatcccaaggccgcggaattgtaaattttgaaagagacaaaattagtaaccattggatccaatactacagacgcatacctcacaggaaactcctcactgcactacaactcagggccaacgtttaccccacgagagaatttctagccaggggtagacaagaccaatacatcaaggcgtgtaggcactgcgatgcggacaacgaatcctgcgcccacatcatcggcaactgcccagtgacacaggacgcccgaatcaagaggcacaattacatctgcgaactgcttctcgaggaggcgaagaagaaggactgggtagtgttcaaggaaccgcacataagggattccaacaaggaactgtacaaacctgacctgatatttgtgaaggatgggcgtgcacttgtcgtggatgtgacagtacggtatgaagcagccaaatcatcgctggaggaagccgctgcagagaaagtgagaaagtacaaacacctggaaacggaagtaagacatctcacgaatgcaaaggacgttacttttgtgggctttcccctaggagcgcgggggaaatggcaccaagataactttaaacttttgactgagcttggcctctccaaatcgaggcaagtgaaaatggcagagactttttccacagtagcgctcttttcatctgtggacattgtacatatgtttgccagtagggccagaaaatctatggttatgtgataataggctgccttctgcggggcttgccttctggccatgcccttcttctctcccttgcacctgtacctcttggtctttgaataaagcctgagtaggaaggaccggtaaaaaaaaaaaaaaaaaaaaaaaaaaaaaaacgttgactaaaaaaaaaaaaaaaaaaaaaaaaaaaaaaaaaaaaaaaaaaaaaaaaaaaaaaaaaaaaaaaaaaaaaa

SEQ ID NO: 10894 - DNA, 5264 bp, synthetic construct
  source 1..5264: mol_type = other DNA
gaaataagagagaaaagaagagtaagaagaaatataagagaattcgccaccatggcccctaagaaaaagcggaaggtgaatatcagcggctctagctgcggcagccccaacagcgccgacaccagcagcgacttcaaggacctgtggaccaagctgaaggaatgccacgaccgggaagtgcagggactccaggtgaaggtcaccaaactcaagcaagaaagaatcctggacgcccagagactggaagaattcttcaccaagaaccagcagctgagagagcagcagaaagtgctgcacgagacaatcaaggttctggaagatagactgcgggccggcctgtgcgacagatgcgccgtgaccgaggaacacatgcgcaaaaagcagcaggagttcgagaacattagacagcaaaatctgaaattgatcacagagctgatgaacgagagaaacacactgcaggaggagaacaagaagctgagcgagcagctgcaacagaagatcgagaatgatcagcaacaccaggccgctgagctggaatgtgaagaggacgtgatccccgacagcccaatcacagctttcagcttttctggcgtgaacagactgaggcggaaggaaaacccccacgtgcggtacatcgagcagacccataccaagctggaacacagcgtgtgtgccaacgagatgagaaaggtgtccaagtcctccacccatccccagcacaaccctaacgaaaatgagatcctggtggctgatacctacgaccagtctcagagccctatggccaaggcccacggcaccagctcttatacccctgataagagctccttcaacctggccaccgtggtggccgagacactgggcctgggcgtgcaggaggaaagcgagacacagggcccaatgagccctctgggagatgagctgtaccactgcctggaaggcaaccacaagaaacagccttttgagtccggctccgagactcctggaacaagcgagagcgctacacctgagggcagccctaagagaaaggtgtccagcgccgagggcgctgccaaggaagagcctaaacggagaagcgccagactgagcgccaagccccccgccaaggtggaagccaagcctaagaaggccgccgctaaggacaagagcagcgataagaaagtccagaccaagggcaagcggggcgccaaaggcaaacaggccgaggtggccaaccaggagacaaaggaagatctgcctgctgagaacggcgaaaccaagaccgaggaatctccagcttctgacgaggccggagagaaggaggccaaaagcgacagcggctctgagacacctggaacaagcgagagcgccaccccggaatcctatgaacaacttgcaccacaaccgtgtgtgggagaaactttacattctagcctcccacgagacagtgaactgtttgtgcctgaagaggggagcagcgagaaggagagcgaggacgcgccaaaaacatctcctccgacgcctgggaaacatggtttggaacagactggggaggaaaaagtgatggtgactgttcctgacaaaaatccaccttgtccttgctgtggtacccgggtaaactctgtgttgaatctgattgaacatctgaaagtgtcacacgggaaaaggggggtttgttttcggtgtgcaaaatgtggaaaggaaaatagtaactatcacagtgttgtttgtcattttaagaaatgcaggggtccagagacggagaaagccccagctggggagtggatttgtgaggtatgcaacagagattttacaaccaaaattggcctgggacaacacaagagattggcacacccagcagtgagaaatcaggaaaggatcgttgcttcccaaccgaaagaaacatcaaatagaggtgctcacaaaaggtgctggacaaaggaggaggaagaattactaataagactggaggctcagttcgagggaaacaaaaatattaataagcttattgcagaacacataaccaccaaaacagctaagcagatcagtgacaaaaggcgattgctgtccagaaagccagcagaggagccacgtgaggagcctggaacgtgtcatcacaccaggagagcagctgcgagcctgagaacggagcctgagatgagtcatcacgcccaggcagaggacagagataatggacctgggagacgccctctgccaggcagggcagctgccggagggagaacaatggacgagataagacgccaccctgataagggcaacggacagcagagacccaccaagcaaaaatcagaagaacagctgcaggcttactataaaaagacactagaggaacgactttcagctggggcacttaacaccttcccccgagcattcaagcaggtaatggaaggccgggatataaagctagtaatcaatcagacagcgcaggactgcttcggatgcctggaatccataagccaaataagaacggcaacccgagataaaaaggacacggtgacccgggagaaacacccaaagaaaccttttcagaagtggatgaagaagagagcaatcaaaaaaggtaattatcttcggttccagcgtttattttatcttgatagagggaaactggctaaaatcattttagatgatattgaatgcttgtcttgtgacataccactcagtgaaatttattcggtttttaaaacaagatgggaaacaactggtagctttaaaagccttggggactttaaaacttacgggaaggctgacaacactgccttcagagaattaattacggctaaagaaattgagaaaaatgtgcaggaaatgagcaaaggctcggctcccggtccagacgggattactcttggggacatcgtaaagatggatcccgagttttcccggaccatggagattttcaatttatggttaacaactggtaaaatcccggacatggtgagggggtgcagaaccgttttgattccaaaatcatcaaagccggatcgtttgaaagacattaataactggagacctatcacgatcggttccatcttgctgagactgttctccaggattgtaacagctaggctgagcaaagcgtgccccctgaacccaaggcaaagaggctttatcagagcggcgggatgctctgaaaacttaaaactcctgcaaactataatttggtcggccaaaagagaacacagaccactgggtgttgtattcgtggacatcgccaaggcttttgacaccgtaagccaccagcacatcattcatgctttgcagcaaagagaggtggatccccacatcgtcggtctggtgagcaatatgtacgagaacatcagtacgtatatcaccacaaagaggaacacacacacagacaaaatccagatccgggttggagtaaagcagggtgacccgatgtcgccccttttatttaacctggcaatggaccctctattatgcaagctggaagagagtggcaaaggataccaccgaggacagagcagcatcacagcgatggcatttgcagacgatctggttttgctgagcgactcctgggaaaatatgaatacaaatattagcatactggagaccttctgcaatctgaccggactcaaaacacaggggcaaaagtgccacggcttttacatcaagccgacaaagaagtcttacaccatcaatgactgcgctgcctggactatcaacggcacacccctgaacatgatcgaccccggcgaatctgagaaatacctcggcctgcagtttgacccgtggattggaatagcaaggtccggtctctccacaaaactagatttttggcttcagcggatcgatcaagcaccacttaaacctctgcagaaaactgatattctcaaaacatacaccatccctcggctgatctacatagctgaccactcagaagtgaaaagcgcactactcgaaacccttgaccagaagatccggacagcggtcaaggaatggcttcacctacctccgtgcacctgcgatgccatcctgtactcgagcacgagagacggcggtttgggcatcaccaaattggcaggactgatccccagcgtgcaggcccgtagactgcatcggatcgcacagtcatctgacgatacgatgaaatgcttcatggaaaaagagaaaatggaacagctgcataagaaattgtggattcaagctggaggggacagagagaacataccctcgatttgggaagcaccaccgtcgagtgaaccaccaaacaacgtgagcacaaattcggaatgggaagcaccgacccagaaagataaatttccaaagccttgcaattggaggaaaaacgaattcaaaaaatggaccaaattggcatcccaaggccgcggaattgtaaattttgaaagagacaaaattagtaaccattggatccaatactacagacgcatacctcacaggaaactcctcactgcactacaactcagggccaacgtttaccccacgagagaatttctagccaggggtagacaagaccaatacatcaaggcgtgtaggcactgcgatgcggacaacgaatcctgcgcccacatcatcggcaactgcccagtgacacaggacgcccgaatcaagaggcacaattacatctgcgaactgcttctcgaggaggcgaagaagaaggactgggtagtgttcaaggaaccgcacataagggattccaacaaggaactgtacaaacctgacctgatatttgtgaaggatgggcgtgcacttgtcgtggatgtgacagtacggtatgaagcagccaaatcatcgctggaggaagccgctgcagagaaagtgagaaagtacaaacacctggaaacggaagtaagacatctcacgaatgcaaaggacgttacttttgtgggctttcccctaggagcgcgggggaaatggcaccaagataactttaaacttttgactgagcttggcctctccaaatcgaggcaagtgaaaatggcagagactttttccacagtagcgctcttttcatctgtggacattgtacatatgtttgccagtagggccagaaaatctatggttatgtgataataggctgccttctgcggggcttgccttctggccatgcccttcttctctcccttgcacctgtacctcttggtctttgaataaagcctgagtaggaaggaccggtaaaaaaaaaaaaaaaaaaaaaaaaaaaaaaacgttgactaaaaaaaaaaaaaaaaaaaaaaaaaaaaaaaaaaaaaaaaaaaaaaaaaaaaaaaaaaaaaaaaaaaaaa

SEQ ID NO: 10895 - DNA, 5264 bp, synthetic construct
  source 1..5264: mol_type = other DNA
gaaataagagagaaaagaagagtaagaagaaatataagagaattcgccaccatggcccctaagaaaaagcggaaggtgaatatcagcggctctagctgcggcagccccaacagcgccgacaccagcagcgacttcaaggacctgtggaccaagctgaaggaatgccacgaccgggaagtgcagggactccaggtgaaggtcaccaaactcaagcaagaaagaatcctggacgcccagagactggaagaattcttcaccaagaaccagcagctgagagagcagcagaaagtgctgcacgagacaatcaaggttctggaagatagactgcgggccggcctgtgcgacagatgcgccgtgaccgaggaacacatgcgcaaaaagcagcaggagttcgagaacattagacagcaaaatctgaaattgatcacagagctgatgaacgagagaaacacactgcaggaggagaacaagaagctgagcgagcagctgcaacagaagatcgagaatgatcagcaacaccaggccgctgagctggaatgtgaagaggacgtgatccccgacagcccaatcacagctttcagcttttctggcgtgaacagactgaggcggaaggaaaacccccacgtgcggtacatcgagcagacccataccaagctggaacacagcgtgtgtgccaacgagatgagaaaggtgtccaagtcctccacccatccccagcacaaccctaacgaaaatgagatcctggtggctgatacctacgaccagtctcagagccctatggccaaggcccacggcaccagctcttatacccctgataagagctccttcaacctggccaccgtggtggccgagacactgggcctgggcgtgcaggaggaaagcgagacacagggcccaatgagccctctgggagatgagctgtaccactgcctggaaggcaaccacaagaaacagccttttgagtccggctccgagactcctggaacaagcgagagcgctacacctgagggcagccctaagagaaaggtgtccagcgccgagggcgctgccaaggaagagcctaaacggagaagcgccagactgagcgccaagccccccgccaaggtggaagccaagcctaagaaggccgccgctaaggacaagagcagcgataagaaagtccagaccaagggcaagcggggcgccaaaggcaaacaggccgaggtggccaaccaggagacaaaggaagatctgcctgctgagaacggcgaaaccaagaccgaggaatctccagcttctgacgaggccggagagaaggaggccaaaagcgacagcggctctgagacacctggaacaagcgagagcgccaccccggaatcctatgaacaacttgcaccacaaccgtgtgtgggagaaactttacattctagcctcccacgagacagtgaactgtttgtgcctgaagaggggagcagcgagaaggagagcgaggacgcgccaaaaacatctcctccgacgcctgggaaacatggtttggaacagactggggaggaaaaagtgatggtgactgttcctgacaaaaatccaccttgtccttgctgtggtacccgggtaaactctgtgttgaatctgattgaacatctgaaagtgtcacacgggaaaaggggggtttgttttcggtgtgcaaaatgtggaaaggaaaatagtaactatcacagtgttgtttgtcattttaagaaatgcaggggtccagagacggagaaagccccagctggggagtggatttgtgaggtatgcaacagagattttacaaccaaaattggcctgggacaacacaagagattggcacacccagcagtgagaaatcaggaaaggatcgttgcttcccaaccgaaagaaacatcaaatagaggtgctcacaaaaggtgctggacaaaggaggaggaagaattactaataagactggaggctcagttcgagggaaacaaaaatattaataagcttattgcagaacacataaccaccaaaacagctaagcagatcagtgacaaaaggcgattgctgtccagaaagccagcagaggagccacgtgaggagcctggaacgtgtcatcacaccaggagagcagctgcgagcctgagaacggagcctgagatgagtcatcacgcccaggcagaggacagagataatggacctgggagacgccctctgccaggcagggcagctgccggagggagaacaatggacgagataagacgccaccctgataagggcaacggacagcagagacccaccaagcaaaaatcagaagaacagctgcaggcttactataaaaagacactagaggaacgactttcagctggggcacttaacaccttcccccgagcattcaagcaggtaatggaaggccgggatataaagctagtaatcaatcagacagcgcaggactgcttcggatgcctggaatccataagccaaataagaacggcaacccgagataaaaaggacacggtgacccgggagaaacacccaaagaaaccttttcagaagtggatgaagaagagagcaatcaaaaaaggtaattatcttcggttccagcgtttattttatcttgatagagggaaactggctaaaatcattttagatgatattgaatgcttgtcttgtgacataccactcagtgaaatttattcggtttttaaaacaagatgggaaacaactggtagctttaaaagccttggggactttaaaacttacgggaaggctgacaacactgccttcagagaattaattacggctaaagaaattgagaaaaatgtgcaggaaatgagcaaaggctcggctcccggtccagacgggattactcttggggacgtcaagaagatggatcccgagttttcccggaccatggagattttcaatttatggttaacaactggtaaaatcccggacatggtgagggggtgcagaaccgttttgattccaaaatcatcaaagccggatcgtttgaaagacattaataactggagacctatcacgatcggttccatcttgctgagactgttctccaggattgtaacagctaggctgagcaaagcgtgccccctgaacccaaggcaaagaggctttatcagagcggcgggatgctctgaaaacttaaaactcctgcaaactataatttggtcggccaaaagagaacacagaccactgggtgttgtattcgtggacatcgccaaggcttttgacaccgtaagccaccagcacatcattcatgctttgcagcaaagagaggtggatccccacatcgtcggtctggtgagcaatatgtacgagaacatcagtacgtatatcaccacaaagaggaacacacacacagacaaaatccagatccgggttggagtaaagcagggtgacccgatgtcgccccttttatttaacctggcaatggaccctctattatgcaagctggaagagagtggcaaaggataccaccgaggacagagcagcatcacagcgatggcatttgcagacgatctggttttgctgagcgactcctgggaaaatatgaatacaaatattagcatactggagaccttctgcaatctgaccggactcaaaacacaggggcaaaagtgccacggcttttacatcaagccgacaaagaagtcttacaccatcaatgactgcgctgcctggactatcaacggcacacccctgaacatgatcgaccccggcgaatctgagaaatacctcggcctgcagtttgacccgtggattggaatagcaaggtccggtctctccacaaaactagatttttggcttcagcggatcgatcaagcaccacttaaacctctgcagaaaactgatattctcaaaacatacaccatccctcggctgatctacatagctgaccactcagaagtgaaaagcgcactactcgaaacccttgaccagaagatccggacagcggtcaaggaatggcttcacctacctccgtgcacctgcgatgccatcctgtactcgagcacgagagacggcggtttgggcatcaccaaattggcaggactgatccccagcgtgcaggcccgtagactgcatcggatcgcacagtcatctgacgatacgatgaaatgcttcatggaaaaagagaaaatggaacagctgcataagaaattgtggattcaagctggaggggacagagagaacataccctcgatttgggaagcaccaccgtcgagtgaaccaccaaacaacgtgagcacaaattcggaatgggaagcaccgacccagaaagataaatttccaaagccttgcaattggaggaaaaacgaattcaaaaaatggaccaaattggcatcccaaggccgcggaattgtaaattttgaaagagacaaaattagtaaccattggatccaatactacagacgcatacctcacaggaaactcctcactgcactacaactcagggccaacgtttaccccacgagagaatttctagccaggggtagacaagaccaatacatcaaggcgtgtaggcactgcgatgcggacaacgaatcctgcgcccacatcatcggcaactgcccagtgacacaggacgcccgaatcaagaggcacaattacatctgcgaactgcttctcgaggaggcgaagaagaaggactgggtagtgttcaaggaaccgcacataagggattccaacaaggaactgtacaaacctgacctgatatttgtgaaggatgggcgtgcacttgtcgtggatgtgacagtacggtatgaagcagccaaatcatcgctggaggaagccgctgcagagaaagtgagaaagtacaaacacctggaaacggaagtaagacatctcacgaatgcaaaggacgttacttttgtgggctttcccctaggagcgcgggggaaatggcaccaagataactttaaacttttgactgagcttggcctctccaaatcgaggcaagtgaaaatggcagagactttttccacagtagcgctcttttcatctgtggacattgtacatatgtttgccagtagggccagaaaatctatggttatgtgataataggctgccttctgcggggcttgccttctggccatgcccttcttctctcccttgcacctgtacctcttggtctttgaataaagcctgagtaggaaggaccggtaaaaaaaaaaaaaaaaaaaaaaaaaaaaaaacgttgactaaaaaaaaaaaaaaaaaaaaaaaaaaaaaaaaaaaaaaaaaaaaaaaaaaaaaaaaaaaaaaaaaaaaaa

SEQ ID NO: 10896 - DNA, 5264 bp, synthetic construct
  source 1..5264: mol_type = other DNA
gaaataagagagaaaagaagagtaagaagaaatataagagaattcgccaccatggcccctaagaaaaagcggaaggtgaatatcagcggctctagctgcggcagccccaacagcgccgacaccagcagcgacttcaaggacctgtggaccaagctgaaggaatgccacgaccgggaagtgcagggactccaggtgaaggtcaccaaactcaagcaagaaagaatcctggacgcccagagactggaagaattcttcaccaagaaccagcagctgagagagcagcagaaagtgctgcacgagacaatcaaggttctggaagatagactgcgggccggcctgtgcgacagatgcgccgtgaccgaggaacacatgcgcaaaaagcagcaggagttcgagaacattagacagcaaaatctgaaattgatcacagagctgatgaacgagagaaacacactgcaggaggagaacaagaagctgagcgagcagctgcaacagaagatcgagaatgatcagcaacaccaggccgctgagctggaatgtgaagaggacgtgatccccgacagcccaatcacagctttcagcttttctggcgtgaacagactgaggcggaaggaaaacccccacgtgcggtacatcgagcagacccataccaagctggaacacagcgtgtgtgccaacgagatgagaaaggtgtccaagtcctccacccatccccagcacaaccctaacgaaaatgagatcctggtggctgatacctacgaccagtctcagagccctatggccaaggcccacggcaccagctcttatacccctgataagagctccttcaacctggccaccgtggtggccgagacactgggcctgggcgtgcaggaggaaagcgagacacagggcccaatgagccctctgggagatgagctgtaccactgcctggaaggcaaccacaagaaacagccttttgagtccggctccgagactcctggaacaagcgagagcgctacacctgagggcagccctaagagaaaggtgtccagcgccgagggcgctgccaaggaagagcctaaacggagaagcgccagactgagcgccaagccccccgccaaggtggaagccaagcctaagaaggccgccgctaaggacaagagcagcgataagaaagtccagaccaagggcaagcggggcgccaaaggcaaacaggccgaggtggccaaccaggagacaaaggaagatctgcctgctgagaacggcgaaaccaagaccgaggaatctccagcttctgacgaggccggagagaaggaggccaaaagcgacagcggctctgagacacctggaacaagcgagagcgccaccccggaatcctatgaacaacttgcaccacaaccgtgtgtgggagaaactttacattctagcctcccacgagacagtgaactgtttgtgcctgaagaggggagcagcgagaaggagagcgaggacgcgccaaaaacatctcctccgacgcctgggaaacatggtttggaacagactggggaggaaaaagtgatggtgactgttcctgacaaaaatccaccttgtccttgctgtggtacccgggtaaactctgtgttgaatctgattgaacatctgaaagtgtcacacgggaaaaggggggtttgttttcggtgtgcaaaatgtggaaaggaaaatagtaactatcacagtgttgtttgtcattttaagaaatgcaggggtccagagacggagaaagccccagctggggagtggatttgtgaggtatgcaacagagattttacaaccaaaattggcctgggacaacacaagagattggcacacccagcagtgagaaatcaggaaaggatcgttgcttcccaaccgaaagaaacatcaaatagaggtgctcacaaaaggtgctggacaaaggaggaggaagaattactaataagactggaggctcagttcgagggaaacaaaaatattaataagcttattgcagaacacataaccaccaaaacagctaagcagatcagtgacaaaaggcgattgctgtccagaaagccagcagaggagccacgtgaggagcctggaacgtgtcatcacaccaggagagcagctgcgagcctgagaacggagcctgagatgagtcatcacgcccaggcagaggacagagataatggacctgggagacgccctctgccaggcagggcagctgccggagggagaacaatggacgagataagacgccaccctgataagggcaacggacagcagagacccaccaagcaaaaatcagaagaacagctgcaggcttactataaaaagacactagaggaacgactttcagctggggcacttaacaccttcccccgagcattcaagcaggtaatggaaggccgggatataaagctagtaatcaatcagacagcgcaggactgcttcggatgcctggaatccataagccaaataagaacggcaacccgagataaaaaggacacggtgacccgggagaaacacccaaagaaaccttttcagaagtggatgaagaagagagcaatcaaaaaaggtaattatcttcggttccagcgtttattttatcttgatagagggaaactggctaaaatcattttagatgatattgaatgcttgtcttgtgacataccactcagtgaaatttattcggtttttaaaacaagatgggaaacaactggtagctttaaaagccttggggactttaaaacttacgggaaggctgacaacactgccttcagagaattaattacggctaaagaaattgagaaaaatgtgcaggaaatgagcaaaggctcggctcccggtccagacgggattactcttggggacgtcgtaaagatggatcccaagttttcccggaccatggagattttcaatttatggttaacaactggtaaaatcccggacatggtgagggggtgcagaaccgttttgattccaaaatcatcaaagccggatcgtttgaaagacattaataactggagacctatcacgatcggttccatcttgctgagactgttctccaggattgtaacagctaggctgagcaaagcgtgccccctgaacccaaggcaaagaggctttatcagagcggcgggatgctctgaaaacttaaaactcctgcaaactataatttggtcggccaaaagagaacacagaccactgggtgttgtattcgtggacatcgccaaggcttttgacaccgtaagccaccagcacatcattcatgctttgcagcaaagagaggtggatccccacatcgtcggtctggtgagcaatatgtacgagaacatcagtacgtatatcaccacaaagaggaacacacacacagacaaaatccagatccgggttggagtaaagcagggtgacccgatgtcgccccttttatttaacctggcaatggaccctctattatgcaagctggaagagagtggcaaaggataccaccgaggacagagcagcatcacagcgatggcatttgcagacgatctggttttgctgagcgactcctgggaaaatatgaatacaaatattagcatactggagaccttctgcaatctgaccggactcaaaacacaggggcaaaagtgccacggcttttacatcaagccgacaaagaagtcttacaccatcaatgactgcgctgcctggactatcaacggcacacccctgaacatgatcgaccccggcgaatctgagaaatacctcggcctgcagtttgacccgtggattggaatagcaaggtccggtctctccacaaaactagatttttggcttcagcggatcgatcaagcaccacttaaacctctgcagaaaactgatattctcaaaacatacaccatccctcggctgatctacatagctgaccactcagaagtgaaaagcgcactactcgaaacccttgaccagaagatccggacagcggtcaaggaatggcttcacctacctccgtgcacctgcgatgccatcctgtactcgagcacgagagacggcggtttgggcatcaccaaattggcaggactgatccccagcgtgcaggcccgtagactgcatcggatcgcacagtcatctgacgatacgatgaaatgcttcatggaaaaagagaaaatggaacagctgcataagaaattgtggattcaagctggaggggacagagagaacataccctcgatttgggaagcaccaccgtcgagtgaaccaccaaacaacgtgagcacaaattcggaatgggaagcaccgacccagaaagataaatttccaaagccttgcaattggaggaaaaacgaattcaaaaaatggaccaaattggcatcccaaggccgcggaattgtaaattttgaaagagacaaaattagtaaccattggatccaatactacagacgcatacctcacaggaaactcctcactgcactacaactcagggccaacgtttaccccacgagagaatttctagccaggggtagacaagaccaatacatcaaggcgtgtaggcactgcgatgcggacaacgaatcctgcgcccacatcatcggcaactgcccagtgacacaggacgcccgaatcaagaggcacaattacatctgcgaactgcttctcgaggaggcgaagaagaaggactgggtagtgttcaaggaaccgcacataagggattccaacaaggaactgtacaaacctgacctgatatttgtgaaggatgggcgtgcacttgtcgtggatgtgacagtacggtatgaagcagccaaatcatcgctggaggaagccgctgcagagaaagtgagaaagtacaaacacctggaaacggaagtaagacatctcacgaatgcaaaggacgttacttttgtgggctttcccctaggagcgcgggggaaatggcaccaagataactttaaacttttgactgagcttggcctctccaaatcgaggcaagtgaaaatggcagagactttttccacagtagcgctcttttcatctgtggacattgtacatatgtttgccagtagggccagaaaatctatggttatgtgataataggctgccttctgcggggcttgccttctggccatgcccttcttctctcccttgcacctgtacctcttggtctttgaataaagcctgagtaggaaggaccggtaaaaaaaaaaaaaaaaaaaaaaaaaaaaaaacgttgactaaaaaaaaaaaaaaaaaaaaaaaaaaaaaaaaaaaaaaaaaaaaaaaaaaaaaaaaaaaaaaaaaaaaaa

SEQ ID NO: 10897 - DNA, 5264 bp, synthetic construct
  source 1..5264: mol_type = other DNA
gaaataagagagaaaagaagagtaagaagaaatataagagaattcgccaccatggcccctaagaaaaagcggaaggtgaatatcagcggctctagctgcggcagccccaacagcgccgacaccagcagcgacttcaaggacctgtggaccaagctgaaggaatgccacgaccgggaagtgcagggactccaggtgaaggtcaccaaactcaagcaagaaagaatcctggacgcccagagactggaagaattcttcaccaagaaccagcagctgagagagcagcagaaagtgctgcacgagacaatcaaggttctggaagatagactgcgggccggcctgtgcgacagatgcgccgtgaccgaggaacacatgcgcaaaaagcagcaggagttcgagaacattagacagcaaaatctgaaattgatcacagagctgatgaacgagagaaacacactgcaggaggagaacaagaagctgagcgagcagctgcaacagaagatcgagaatgatcagcaacaccaggccgctgagctggaatgtgaagaggacgtgatccccgacagcccaatcacagctttcagcttttctggcgtgaacagactgaggcggaaggaaaacccccacgtgcggtacatcgagcagacccataccaagctggaacacagcgtgtgtgccaacgagatgagaaaggtgtccaagtcctccacccatccccagcacaaccctaacgaaaatgagatcctggtggctgatacctacgaccagtctcagagccctatggccaaggcccacggcaccagctcttatacccctgataagagctccttcaacctggccaccgtggtggccgagacactgggcctgggcgtgcaggaggaaagcgagacacagggcccaatgagccctctgggagatgagctgtaccactgcctggaaggcaaccacaagaaacagccttttgagtccggctccgagactcctggaacaagcgagagcgctacacctgagggcagccctaagagaaaggtgtccagcgccgagggcgctgccaaggaagagcctaaacggagaagcgccagactgagcgccaagccccccgccaaggtggaagccaagcctaagaaggccgccgctaaggacaagagcagcgataagaaagtccagaccaagggcaagcggggcgccaaaggcaaacaggccgaggtggccaaccaggagacaaaggaagatctgcctgctgagaacggcgaaaccaagaccgaggaatctccagcttctgacgaggccggagagaaggaggccaaaagcgacagcggctctgagacacctggaacaagcgagagcgccaccccggaatcctatgaacaacttgcaccacaaccgtgtgtgggagaaactttacattctagcctcccacgagacagtgaactgtttgtgcctgaagaggggagcagcgagaaggagagcgaggacgcgccaaaaacatctcctccgacgcctgggaaacatggtttggaacagactggggaggaaaaagtgatggtgactgttcctgacaaaaatccaccttgtccttgctgtggtacccgggtaaactctgtgttgaatctgattgaacatctgaaagtgtcacacgggaaaaggggggtttgttttcggtgtgcaaaatgtggaaaggaaaatagtaactatcacagtgttgtttgtcattttaagaaatgcaggggtccagagacggagaaagccccagctggggagtggatttgtgaggtatgcaacagagattttacaaccaaaattggcctgggacaacacaagagattggcacacccagcagtgagaaatcaggaaaggatcgttgcttcccaaccgaaagaaacatcaaatagaggtgctcacaaaaggtgctggacaaaggaggaggaagaattactaataagactggaggctcagttcgagggaaacaaaaatattaataagcttattgcagaacacataaccaccaaaacagctaagcagatcagtgacaaaaggcgattgctgtccagaaagccagcagaggagccacgtgaggagcctggaacgtgtcatcacaccaggagagcagctgcgagcctgagaacggagcctgagatgagtcatcacgcccaggcagaggacagagataatggacctgggagacgccctctgccaggcagggcagctgccggagggagaacaatggacgagataagacgccaccctgataagggcaacggacagcagagacccaccaagcaaaaatcagaagaacagctgcaggcttactataaaaagacactagaggaacgactttcagctggggcacttaacaccttcccccgagcattcaagcaggtaatggaaggccgggatataaagctagtaatcaatcagacagcgcaggactgcttcggatgcctggaatccataagccaaataagaacggcaacccgagataaaaaggacacggtgacccgggagaaacacccaaagaaaccttttcagaagtggatgaagaagagagcaatcaaaaaaggtaattatcttcggttccagcgtttattttatcttgatagagggaaactggctaaaatcattttagatgatattgaatgcttgtcttgtgacataccactcagtgaaatttattcggtttttaaaacaagatgggaaacaactggtagctttaaaagccttggggactttaaaacttacgggaaggctgacaacactgccttcagagaattaattacggctaaagaaattgagaaaaatgtgcaggaaatgagcaaaggctcggctcccggtccagacgggattactcttggggacgtcgtaaagatggatcccgagttttcccggaccatgagaattttcaatttatggttaacaactggtaaaatcccggacatggtgagggggtgcagaaccgttttgattccaaaatcatcaaagccggatcgtttgaaagacattaataactggagacctatcacgatcggttccatcttgctgagactgttctccaggattgtaacagctaggctgagcaaagcgtgccccctgaacccaaggcaaagaggctttatcagagcggcgggatgctctgaaaacttaaaactcctgcaaactataatttggtcggccaaaagagaacacagaccactgggtgttgtattcgtggacatcgccaaggcttttgacaccgtaagccaccagcacatcattcatgctttgcagcaaagagaggtggatccccacatcgtcggtctggtgagcaatatgtacgagaacatcagtacgtatatcaccacaaagaggaacacacacacagacaaaatccagatccgggttggagtaaagcagggtgacccgatgtcgccccttttatttaacctggcaatggaccctctattatgcaagctggaagagagtggcaaaggataccaccgaggacagagcagcatcacagcgatggcatttgcagacgatctggttttgctgagcgactcctgggaaaatatgaatacaaatattagcatactggagaccttctgcaatctgaccggactcaaaacacaggggcaaaagtgccacggcttttacatcaagccgacaaagaagtcttacaccatcaatgactgcgctgcctggactatcaacggcacacccctgaacatgatcgaccccggcgaatctgagaaatacctcggcctgcagtttgacccgtggattggaatagcaaggtccggtctctccacaaaactagatttttggcttcagcggatcgatcaagcaccacttaaacctctgcagaaaactgatattctcaaaacatacaccatccctcggctgatctacatagctgaccactcagaagtgaaaagcgcactactcgaaacccttgaccagaagatccggacagcggtcaaggaatggcttcacctacctccgtgcacctgcgatgccatcctgtactcgagcacgagagacggcggtttgggcatcaccaaattggcaggactgatccccagcgtgcaggcccgtagactgcatcggatcgcacagtcatctgacgatacgatgaaatgcttcatggaaaaagagaaaatggaacagctgcataagaaattgtggattcaagctggaggggacagagagaacataccctcgatttgggaagcaccaccgtcgagtgaaccaccaaacaacgtgagcacaaattcggaatgggaagcaccgacccagaaagataaatttccaaagccttgcaattggaggaaaaacgaattcaaaaaatggaccaaattggcatcccaaggccgcggaattgtaaattttgaaagagacaaaattagtaaccattggatccaatactacagacgcatacctcacaggaaactcctcactgcactacaactcagggccaacgtttaccccacgagagaatttctagccaggggtagacaagaccaatacatcaaggcgtgtaggcactgcgatgcggacaacgaatcctgcgcccacatcatcggcaactgcccagtgacacaggacgcccgaatcaagaggcacaattacatctgcgaactgcttctcgaggaggcgaagaagaaggactgggtagtgttcaaggaaccgcacataagggattccaacaaggaactgtacaaacctgacctgatatttgtgaaggatgggcgtgcacttgtcgtggatgtgacagtacggtatgaagcagccaaatcatcgctggaggaagccgctgcagagaaagtgagaaagtacaaacacctggaaacggaagtaagacatctcacgaatgcaaaggacgttacttttgtgggctttcccctaggagcgcgggggaaatggcaccaagataactttaaacttttgactgagcttggcctctccaaatcgaggcaagtgaaaatggcagagactttttccacagtagcgctcttttcatctgtggacattgtacatatgtttgccagtagggccagaaaatctatggttatgtgataataggctgccttctgcggggcttgccttctggccatgcccttcttctctcccttgcacctgtacctcttggtctttgaataaagcctgagtaggaaggaccggtaaaaaaaaaaaaaaaaaaaaaaaaaaaaaaacgttgactaaaaaaaaaaaaaaaaaaaaaaaaaaaaaaaaaaaaaaaaaaaaaaaaaaaaaaaaaaaaaaaaaaaaaa

SEQ ID NO: 10898 - DNA, 5264 bp, synthetic construct
  source 1..5264: mol_type = other DNA
gaaataagagagaaaagaagagtaagaagaaatataagagaattcgccaccatggcccctaagaaaaagcggaaggtgaatatcagcggctctagctgcggcagccccaacagcgccgacaccagcagcgacttcaaggacctgtggaccaagctgaaggaatgccacgaccgggaagtgcagggactccaggtgaaggtcaccaaactcaagcaagaaagaatcctggacgcccagagactggaagaattcttcaccaagaaccagcagctgagagagcagcagaaagtgctgcacgagacaatcaaggttctggaagatagactgcgggccggcctgtgcgacagatgcgccgtgaccgaggaacacatgcgcaaaaagcagcaggagttcgagaacattagacagcaaaatctgaaattgatcacagagctgatgaacgagagaaacacactgcaggaggagaacaagaagctgagcgagcagctgcaacagaagatcgagaatgatcagcaacaccaggccgctgagctggaatgtgaagaggacgtgatccccgacagcccaatcacagctttcagcttttctggcgtgaacagactgaggcggaaggaaaacccccacgtgcggtacatcgagcagacccataccaagctggaacacagcgtgtgtgccaacgagatgagaaaggtgtccaagtcctccacccatccccagcacaaccctaacgaaaatgagatcctggtggctgatacctacgaccagtctcagagccctatggccaaggcccacggcaccagctcttatacccctgataagagctccttcaacctggccaccgtggtggccgagacactgggcctgggcgtgcaggaggaaagcgagacacagggcccaatgagccctctgggagatgagctgtaccactgcctggaaggcaaccacaagaaacagccttttgagtccggctccgagactcctggaacaagcgagagcgctacacctgagggcagccctaagagaaaggtgtccagcgccgagggcgctgccaaggaagagcctaaacggagaagcgccagactgagcgccaagccccccgccaaggtggaagccaagcctaagaaggccgccgctaaggacaagagcagcgataagaaagtccagaccaagggcaagcggggcgccaaaggcaaacaggccgaggtggccaaccaggagacaaaggaagatctgcctgctgagaacggcgaaaccaagaccgaggaatctccagcttctgacgaggccggagagaaggaggccaaaagcgacagcggctctgagacacctggaacaagcgagagcgccaccccggaatcctatgaacaacttgcaccacaaccgtgtgtgggagaaactttacattctagcctcccacgagacagtgaactgtttgtgcctgaagaggggagcagcgagaaggagagcgaggacgcgccaaaaacatctcctccgacgcctgggaaacatggtttggaacagactggggaggaaaaagtgatggtgactgttcctgacaaaaatccaccttgtccttgctgtggtacccgggtaaactctgtgttgaatctgattgaacatctgaaagtgtcacacgggaaaaggggggtttgttttcggtgtgcaaaatgtggaaaggaaaatagtaactatcacagtgttgtttgtcattttaagaaatgcaggggtccagagacggagaaagccccagctggggagtggatttgtgaggtatgcaacagagattttacaaccaaaattggcctgggacaacacaagagattggcacacccagcagtgagaaatcaggaaaggatcgttgcttcccaaccgaaagaaacatcaaatagaggtgctcacaaaaggtgctggacaaaggaggaggaagaattactaataagactggaggctcagttcgagggaaacaaaaatattaataagcttattgcagaacacataaccaccaaaacagctaagcagatcagtgacaaaaggcgattgctgtccagaaagccagcagaggagccacgtgaggagcctggaacgtgtcatcacaccaggagagcagctgcgagcctgagaacggagcctgagatgagtcatcacgcccaggcagaggacagagataatggacctgggagacgccctctgccaggcagggcagctgccggagggagaacaatggacgagataagacgccaccctgataagggcaacggacagcagagacccaccaagcaaaaatcagaagaacagctgcaggcttactataaaaagacactagaggaacgactttcagctggggcacttaacaccttcccccgagcattcaagcaggtaatggaaggccgggatataaagctagtaatcaatcagacagcgcaggactgcttcggatgcctggaatccataagccaaataagaacggcaacccgagataaaaaggacacggtgacccgggagaaacacccaaagaaaccttttcagaagtggatgaagaagagagcaatcaaaaaaggtaattatcttcggttccagcgtttattttatcttgatagagggaaactggctaaaatcattttagatgatattgaatgcttgtcttgtgacataccactcagtgaaatttattcggtttttaaaacaagatgggaaacaactggtagctttaaaagccttggggactttaaaacttacgggaaggctgacaacactgccttcagagaattaattacggctaaagaaattgagaaaaatgtgcaggaaatgagcaaaggctcggctcccggtccagacgggattactcttggggacgtcgtaaagatggatcccgagttttcccggaccatggagatttacaatttatggttaacaactggtaaaatcccggacatggtgagggggtgcagaaccgttttgattccaaaatcatcaaagccggatcgtttgaaagacattaataactggagacctatcacgatcggttccatcttgctgagactgttctccaggattgtaacagctaggctgagcaaagcgtgccccctgaacccaaggcaaagaggctttatcagagcggcgggatgctctgaaaacttaaaactcctgcaaactataatttggtcggccaaaagagaacacagaccactgggtgttgtattcgtggacatcgccaaggcttttgacaccgtaagccaccagcacatcattcatgctttgcagcaaagagaggtggatccccacatcgtcggtctggtgagcaatatgtacgagaacatcagtacgtatatcaccacaaagaggaacacacacacagacaaaatccagatccgggttggagtaaagcagggtgacccgatgtcgccccttttatttaacctggcaatggaccctctattatgcaagctggaagagagtggcaaaggataccaccgaggacagagcagcatcacagcgatggcatttgcagacgatctggttttgctgagcgactcctgggaaaatatgaatacaaatattagcatactggagaccttctgcaatctgaccggactcaaaacacaggggcaaaagtgccacggcttttacatcaagccgacaaagaagtcttacaccatcaatgactgcgctgcctggactatcaacggcacacccctgaacatgatcgaccccggcgaatctgagaaatacctcggcctgcagtttgacccgtggattggaatagcaaggtccggtctctccacaaaactagatttttggcttcagcggatcgatcaagcaccacttaaacctctgcagaaaactgatattctcaaaacatacaccatccctcggctgatctacatagctgaccactcagaagtgaaaagcgcactactcgaaacccttgaccagaagatccggacagcggtcaaggaatggcttcacctacctccgtgcacctgcgatgccatcctgtactcgagcacgagagacggcggtttgggcatcaccaaattggcaggactgatccccagcgtgcaggcccgtagactgcatcggatcgcacagtcatctgacgatacgatgaaatgcttcatggaaaaagagaaaatggaacagctgcataagaaattgtggattcaagctggaggggacagagagaacataccctcgatttgggaagcaccaccgtcgagtgaaccaccaaacaacgtgagcacaaattcggaatgggaagcaccgacccagaaagataaatttccaaagccttgcaattggaggaaaaacgaattcaaaaaatggaccaaattggcatcccaaggccgcggaattgtaaattttgaaagagacaaaattagtaaccattggatccaatactacagacgcatacctcacaggaaactcctcactgcactacaactcagggccaacgtttaccccacgagagaatttctagccaggggtagacaagaccaatacatcaaggcgtgtaggcactgcgatgcggacaacgaatcctgcgcccacatcatcggcaactgcccagtgacacaggacgcccgaatcaagaggcacaattacatctgcgaactgcttctcgaggaggcgaagaagaaggactgggtagtgttcaaggaaccgcacataagggattccaacaaggaactgtacaaacctgacctgatatttgtgaaggatgggcgtgcacttgtcgtggatgtgacagtacggtatgaagcagccaaatcatcgctggaggaagccgctgcagagaaagtgagaaagtacaaacacctggaaacggaagtaagacatctcacgaatgcaaaggacgttacttttgtgggctttcccctaggagcgcgggggaaatggcaccaagataactttaaacttttgactgagcttggcctctccaaatcgaggcaagtgaaaatggcagagactttttccacagtagcgctcttttcatctgtggacattgtacatatgtttgccagtagggccagaaaatctatggttatgtgataataggctgccttctgcggggcttgccttctggccatgcccttcttctctcccttgcacctgtacctcttggtctttgaataaagcctgagtaggaaggaccggtaaaaaaaaaaaaaaaaaaaaaaaaaaaaaaacgttgactaaaaaaaaaaaaaaaaaaaaaaaaaaaaaaaaaaaaaaaaaaaaaaaaaaaaaaaaaaaaaaaaaaaaaa

SEQ ID NO: 10899 - DNA, 5264 bp, synthetic construct
  source 1..5264: mol_type = other DNA
gaaataagagagaaaagaagagtaagaagaaatataagagaattcgccaccatggcccctaagaaaaagcggaaggtgaatatcagcggctctagctgcggcagccccaacagcgccgacaccagcagcgacttcaaggacctgtggaccaagctgaaggaatgccacgaccgggaagtgcagggactccaggtgaaggtcaccaaactcaagcaagaaagaatcctggacgcccagagactggaagaattcttcaccaagaaccagcagctgagagagcagcagaaagtgctgcacgagacaatcaaggttctggaagatagactgcgggccggcctgtgcgacagatgcgccgtgaccgaggaacacatgcgcaaaaagcagcaggagttcgagaacattagacagcaaaatctgaaattgatcacagagctgatgaacgagagaaacacactgcaggaggagaacaagaagctgagcgagcagctgcaacagaagatcgagaatgatcagcaacaccaggccgctgagctggaatgtgaagaggacgtgatccccgacagcccaatcacagctttcagcttttctggcgtgaacagactgaggcggaaggaaaacccccacgtgcggtacatcgagcagacccataccaagctggaacacagcgtgtgtgccaacgagatgagaaaggtgtccaagtcctccacccatccccagcacaaccctaacgaaaatgagatcctggtggctgatacctacgaccagtctcagagccctatggccaaggcccacggcaccagctcttatacccctgataagagctccttcaacctggccaccgtggtggccgagacactgggcctgggcgtgcaggaggaaagcgagacacagggcccaatgagccctctgggagatgagctgtaccactgcctggaaggcaaccacaagaaacagccttttgagtccggctccgagactcctggaacaagcgagagcgctacacctgagggcagccctaagagaaaggtgtccagcgccgagggcgctgccaaggaagagcctaaacggagaagcgccagactgagcgccaagccccccgccaaggtggaagccaagcctaagaaggccgccgctaaggacaagagcagcgataagaaagtccagaccaagggcaagcggggcgccaaaggcaaacaggccgaggtggccaaccaggagacaaaggaagatctgcctgctgagaacggcgaaaccaagaccgaggaatctccagcttctgacgaggccggagagaaggaggccaaaagcgacagcggctctgagacacctggaacaagcgagagcgccaccccggaatcctatgaacaacttgcaccacaaccgtgtgtgggagaaactttacattctagcctcccacgagacagtgaactgtttgtgcctgaagaggggagcagcgagaaggagagcgaggacgcgccaaaaacatctcctccgacgcctgggaaacatggtttggaacagactggggaggaaaaagtgatggtgactgttcctgacaaaaatccaccttgtccttgctgtggtacccgggtaaactctgtgttgaatctgattgaacatctgaaagtgtcacacgggaaaaggggggtttgttttcggtgtgcaaaatgtggaaaggaaaatagtaactatcacagtgttgtttgtcattttaagaaatgcaggggtccagagacggagaaagccccagctggggagtggatttgtgaggtatgcaacagagattttacaaccaaaattggcctgggacaacacaagagattggcacacccagcagtgagaaatcaggaaaggatcgttgcttcccaaccgaaagaaacatcaaatagaggtgctcacaaaaggtgctggacaaaggaggaggaagaattactaataagactggaggctcagttcgagggaaacaaaaatattaataagcttattgcagaacacataaccaccaaaacagctaagcagatcagtgacaaaaggcgattgctgtccagaaagccagcagaggagccacgtgaggagcctggaacgtgtcatcacaccaggagagcagctgcgagcctgagaacggagcctgagatgagtcatcacgcccaggcagaggacagagataatggacctgggagacgccctctgccaggcagggcagctgccggagggagaacaatggacgagataagacgccaccctgataagggcaacggacagcagagacccaccaagcaaaaatcagaagaacagctgcaggcttactataaaaagacactagaggaacgactttcagctggggcacttaacaccttcccccgagcattcaagcaggtaatggaaggccgggatataaagctagtaatcaatcagacagcgcaggactgcttcggatgcctggaatccataagccaaataagaacggcaacccgagataaaaaggacacggtgacccgggagaaacacccaaagaaaccttttcagaagtggatgaagaagagagcaatcaaaaaaggtaattatcttcggttccagcgtttattttatcttgatagagggaaactggctaaaatcattttagatgatattgaatgcttgtcttgtgacataccactcagtgaaatttattcggtttttaaaacaagatgggaaacaactggtagctttaaaagccttggggactttaaaacttacgggaaggctgacaacactgccttcagagaattaattacggctaaagaaattgagaaaaatgtgcaggaaatgagcaaaggctcggctcccggtccagacgggattactcttggggacgtcgtaaagatggatcccgagttttcccggaccatggagattttcaatttaatcttaacaactggtaaaatcccggacatggtgagggggtgcagaaccgttttgattccaaaatcatcaaagccggatcgtttgaaagacattaataactggagacctatcacgatcggttccatcttgctgagactgttctccaggattgtaacagctaggctgagcaaagcgtgccccctgaacccaaggcaaagaggctttatcagagcggcgggatgctctgaaaacttaaaactcctgcaaactataatttggtcggccaaaagagaacacagaccactgggtgttgtattcgtggacatcgccaaggcttttgacaccgtaagccaccagcacatcattcatgctttgcagcaaagagaggtggatccccacatcgtcggtctggtgagcaatatgtacgagaacatcagtacgtatatcaccacaaagaggaacacacacacagacaaaatccagatccgggttggagtaaagcagggtgacccgatgtcgccccttttatttaacctggcaatggaccctctattatgcaagctggaagagagtggcaaaggataccaccgaggacagagcagcatcacagcgatggcatttgcagacgatctggttttgctgagcgactcctgggaaaatatgaatacaaatattagcatactggagaccttctgcaatctgaccggactcaaaacacaggggcaaaagtgccacggcttttacatcaagccgacaaagaagtcttacaccatcaatgactgcgctgcctggactatcaacggcacacccctgaacatgatcgaccccggcgaatctgagaaatacctcggcctgcagtttgacccgtggattggaatagcaaggtccggtctctccacaaaactagatttttggcttcagcggatcgatcaagcaccacttaaacctctgcagaaaactgatattctcaaaacatacaccatccctcggctgatctacatagctgaccactcagaagtgaaaagcgcactactcgaaacccttgaccagaagatccggacagcggtcaaggaatggcttcacctacctccgtgcacctgcgatgccatcctgtactcgagcacgagagacggcggtttgggcatcaccaaattggcaggactgatccccagcgtgcaggcccgtagactgcatcggatcgcacagtcatctgacgatacgatgaaatgcttcatggaaaaagagaaaatggaacagctgcataagaaattgtggattcaagctggaggggacagagagaacataccctcgatttgggaagcaccaccgtcgagtgaaccaccaaacaacgtgagcacaaattcggaatgggaagcaccgacccagaaagataaatttccaaagccttgcaattggaggaaaaacgaattcaaaaaatggaccaaattggcatcccaaggccgcggaattgtaaattttgaaagagacaaaattagtaaccattggatccaatactacagacgcatacctcacaggaaactcctcactgcactacaactcagggccaacgtttaccccacgagagaatttctagccaggggtagacaagaccaatacatcaaggcgtgtaggcactgcgatgcggacaacgaatcctgcgcccacatcatcggcaactgcccagtgacacaggacgcccgaatcaagaggcacaattacatctgcgaactgcttctcgaggaggcgaagaagaaggactgggtagtgttcaaggaaccgcacataagggattccaacaaggaactgtacaaacctgacctgatatttgtgaaggatgggcgtgcacttgtcgtggatgtgacagtacggtatgaagcagccaaatcatcgctggaggaagccgctgcagagaaagtgagaaagtacaaacacctggaaacggaagtaagacatctcacgaatgcaaaggacgttacttttgtgggctttcccctaggagcgcgggggaaatggcaccaagataactttaaacttttgactgagcttggcctctccaaatcgaggcaagtgaaaatggcagagactttttccacagtagcgctcttttcatctgtggacattgtacatatgtttgccagtagggccagaaaatctatggttatgtgataataggctgccttctgcggggcttgccttctggccatgcccttcttctctcccttgcacctgtacctcttggtctttgaataaagcctgagtaggaaggaccggtaaaaaaaaaaaaaaaaaaaaaaaaaaaaaaacgttgactaaaaaaaaaaaaaaaaaaaaaaaaaaaaaaaaaaaaaaaaaaaaaaaaaaaaaaaaaaaaaaaaaaaaaa

SEQ ID NO: 10900 - DNA, 5264 bp, synthetic construct
  source 1..5264: mol_type = other DNA
gaaataagagagaaaagaagagtaagaagaaatataagagaattcgccaccatggcccctaagaaaaagcggaaggtgaatatcagcggctctagctgcggcagccccaacagcgccgacaccagcagcgacttcaaggacctgtggaccaagctgaaggaatgccacgaccgggaagtgcagggactccaggtgaaggtcaccaaactcaagcaagaaagaatcctggacgcccagagactggaagaattcttcaccaagaaccagcagctgagagagcagcagaaagtgctgcacgagacaatcaaggttctggaagatagactgcgggccggcctgtgcgacagatgcgccgtgaccgaggaacacatgcgcaaaaagcagcaggagttcgagaacattagacagcaaaatctgaaattgatcacagagctgatgaacgagagaaacacactgcaggaggagaacaagaagctgagcgagcagctgcaacagaagatcgagaatgatcagcaacaccaggccgctgagctggaatgtgaagaggacgtgatccccgacagcccaatcacagctttcagcttttctggcgtgaacagactgaggcggaaggaaaacccccacgtgcggtacatcgagcagacccataccaagctggaacacagcgtgtgtgccaacgagatgagaaaggtgtccaagtcctccacccatccccagcacaaccctaacgaaaatgagatcctggtggctgatacctacgaccagtctcagagccctatggccaaggcccacggcaccagctcttatacccctgataagagctccttcaacctggccaccgtggtggccgagacactgggcctgggcgtgcaggaggaaagcgagacacagggcccaatgagccctctgggagatgagctgtaccactgcctggaaggcaaccacaagaaacagccttttgagtccggctccgagactcctggaacaagcgagagcgctacacctgagggcagccctaagagaaaggtgtccagcgccgagggcgctgccaaggaagagcctaaacggagaagcgccagactgagcgccaagccccccgccaaggtggaagccaagcctaagaaggccgccgctaaggacaagagcagcgataagaaagtccagaccaagggcaagcggggcgccaaaggcaaacaggccgaggtggccaaccaggagacaaaggaagatctgcctgctgagaacggcgaaaccaagaccgaggaatctccagcttctgacgaggccggagagaaggaggccaaaagcgacagcggctctgagacacctggaacaagcgagagcgccaccccggaatcctatgaacaacttgcaccacaaccgtgtgtgggagaaactttacattctagcctcccacgagacagtgaactgtttgtgcctgaagaggggagcagcgagaaggagagcgaggacgcgccaaaaacatctcctccgacgcctgggaaacatggtttggaacagactggggaggaaaaagtgatggtgactgttcctgacaaaaatccaccttgtccttgctgtggtacccgggtaaactctgtgttgaatctgattgaacatctgaaagtgtcacacgggaaaaggggggtttgttttcggtgtgcaaaatgtggaaaggaaaatagtaactatcacagtgttgtttgtcattttaagaaatgcaggggtccagagacggagaaagccccagctggggagtggatttgtgaggtatgcaacagagattttacaaccaaaattggcctgggacaacacaagagattggcacacccagcagtgagaaatcaggaaaggatcgttgcttcccaaccgaaagaaacatcaaatagaggtgctcacaaaaggtgctggacaaaggaggaggaagaattactaataagactggaggctcagttcgagggaaacaaaaatattaataagcttattgcagaacacataaccaccaaaacagctaagcagatcagtgacaaaaggcgattgctgtccagaaagccagcagaggagccacgtgaggagcctggaacgtgtcatcacaccaggagagcagctgcgagcctgagaacggagcctgagatgagtcatcacgcccaggcagaggacagagataatggacctgggagacgccctctgccaggcagggcagctgccggagggagaacaatggacgagataagacgccaccctgataagggcaacggacagcagagacccaccaagcaaaaatcagaagaacagctgcaggcttactataaaaagacactagaggaacgactttcagctggggcacttaacaccttcccccgagcattcaagcaggtaatggaaggccgggatataaagctagtaatcaatcagacagcgcaggactgcttcggatgcctggaatccataagccaaataagaacggcaacccgagataaaaaggacacggtgacccgggagaaacacccaaagaaaccttttcagaagtggatgaagaagagagcaatcaaaaaaggtaattatcttcggttccagcgtttattttatcttgatagagggaaactggctaaaatcattttagatgatattgaatgcttgtcttgtgacataccactcagtgaaatttattcggtttttaaaacaagatgggaaacaactggtagctttaaaagccttggggactttaaaacttacgggaaggctgacaacactgccttcagagaattaattacggctaaagaaattgagaaaaatgtgcaggaaatgagcaaaggctcggctcccggtccagacgggattactcttggggacgtcgtaaagatggatcccgagttttcccggaccatggagattttcaatttatggttaacaactggtaaaatcccggacatggtgagggggtgcagaaccgttttgattccaaaatcatcaaagccggatcgtttgaaagacattaataactggagacctatcacgatcggttccatcttgctgagactgttctccaggattgtaacagctaggctgagcaaagcgtgccccctgcacccaaggcaaagaggctttatcagagcggcgggatgctctgaaaacttaaaactcctgcaaactataatttggtcggccaaaagagaacacagaccactgggtgttgtattcgtggacatcgccaaggcttttgacaccgtaagccaccagcacatcattcatgctttgcagcaaagagaggtggatccccacatcgtcggtctggtgagcaatatgtacgagaacatcagtacgtatatcaccacaaagaggaacacacacacagacaaaatccagatccgggttggagtaaagcagggtgacccgatgtcgccccttttatttaacctggcaatggaccctctattatgcaagctggaagagagtggcaaaggataccaccgaggacagagcagcatcacagcgatggcatttgcagacgatctggttttgctgagcgactcctgggaaaatatgaatacaaatattagcatactggagaccttctgcaatctgaccggactcaaaacacaggggcaaaagtgccacggcttttacatcaagccgacaaagaagtcttacaccatcaatgactgcgctgcctggactatcaacggcacacccctgaacatgatcgaccccggcgaatctgagaaatacctcggcctgcagtttgacccgtggattggaatagcaaggtccggtctctccacaaaactagatttttggcttcagcggatcgatcaagcaccacttaaacctctgcagaaaactgatattctcaaaacatacaccatccctcggctgatctacatagctgaccactcagaagtgaaaagcgcactactcgaaacccttgaccagaagatccggacagcggtcaaggaatggcttcacctacctccgtgcacctgcgatgccatcctgtactcgagcacgagagacggcggtttgggcatcaccaaattggcaggactgatccccagcgtgcaggcccgtagactgcatcggatcgcacagtcatctgacgatacgatgaaatgcttcatggaaaaagagaaaatggaacagctgcataagaaattgtggattcaagctggaggggacagagagaacataccctcgatttgggaagcaccaccgtcgagtgaaccaccaaacaacgtgagcacaaattcggaatgggaagcaccgacccagaaagataaatttccaaagccttgcaattggaggaaaaacgaattcaaaaaatggaccaaattggcatcccaaggccgcggaattgtaaattttgaaagagacaaaattagtaaccattggatccaatactacagacgcatacctcacaggaaactcctcactgcactacaactcagggccaacgtttaccccacgagagaatttctagccaggggtagacaagaccaatacatcaaggcgtgtaggcactgcgatgcggacaacgaatcctgcgcccacatcatcggcaactgcccagtgacacaggacgcccgaatcaagaggcacaattacatctgcgaactgcttctcgaggaggcgaagaagaaggactgggtagtgttcaaggaaccgcacataagggattccaacaaggaactgtacaaacctgacctgatatttgtgaaggatgggcgtgcacttgtcgtggatgtgacagtacggtatgaagcagccaaatcatcgctggaggaagccgctgcagagaaagtgagaaagtacaaacacctggaaacggaagtaagacatctcacgaatgcaaaggacgttacttttgtgggctttcccctaggagcgcgggggaaatggcaccaagataactttaaacttttgactgagcttggcctctccaaatcgaggcaagtgaaaatggcagagactttttccacagtagcgctcttttcatctgtggacattgtacatatgtttgccagtagggccagaaaatctatggttatgtgataataggctgccttctgcggggcttgccttctggccatgcccttcttctctcccttgcacctgtacctcttggtctttgaataaagcctgagtaggaaggaccggtaaaaaaaaaaaaaaaaaaaaaaaaaaaaaaacgttgactaaaaaaaaaaaaaaaaaaaaaaaaaaaaaaaaaaaaaaaaaaaaaaaaaaaaaaaaaaaaaaaaaaaaaa

SEQ ID NO: 10901 - DNA, 5264 bp, synthetic construct
  source 1..5264: mol_type = other DNA
gaaataagagagaaaagaagagtaagaagaaatataagagaattcgccaccatggcccctaagaaaaagcggaaggtgaatatcagcggctctagctgcggcagccccaacagcgccgacaccagcagcgacttcaaggacctgtggaccaagctgaaggaatgccacgaccgggaagtgcagggactccaggtgaaggtcaccaaactcaagcaagaaagaatcctggacgcccagagactggaagaattcttcaccaagaaccagcagctgagagagcagcagaaagtgctgcacgagacaatcaaggttctggaagatagactgcgggccggcctgtgcgacagatgcgccgtgaccgaggaacacatgcgcaaaaagcagcaggagttcgagaacattagacagcaaaatctgaaattgatcacagagctgatgaacgagagaaacacactgcaggaggagaacaagaagctgagcgagcagctgcaacagaagatcgagaatgatcagcaacaccaggccgctgagctggaatgtgaagaggacgtgatccccgacagcccaatcacagctttcagcttttctggcgtgaacagactgaggcggaaggaaaacccccacgtgcggtacatcgagcagacccataccaagctggaacacagcgtgtgtgccaacgagatgagaaaggtgtccaagtcctccacccatccccagcacaaccctaacgaaaatgagatcctggtggctgatacctacgaccagtctcagagccctatggccaaggcccacggcaccagctcttatacccctgataagagctccttcaacctggccaccgtggtggccgagacactgggcctgggcgtgcaggaggaaagcgagacacagggcccaatgagccctctgggagatgagctgtaccactgcctggaaggcaaccacaagaaacagccttttgagtccggctccgagactcctggaacaagcgagagcgctacacctgagggcagccctaagagaaaggtgtccagcgccgagggcgctgccaaggaagagcctaaacggagaagcgccagactgagcgccaagccccccgccaaggtggaagccaagcctaagaaggccgccgctaaggacaagagcagcgataagaaagtccagaccaagggcaagcggggcgccaaaggcaaacaggccgaggtggccaaccaggagacaaaggaagatctgcctgctgagaacggcgaaaccaagaccgaggaatctccagcttctgacgaggccggagagaaggaggccaaaagcgacagcggctctgagacacctggaacaagcgagagcgccaccccggaatcctatgaacaacttgcaccacaaccgtgtgtgggagaaactttacattctagcctcccacgagacagtgaactgtttgtgcctgaagaggggagcagcgagaaggagagcgaggacgcgccaaaaacatctcctccgacgcctgggaaacatggtttggaacagactggggaggaaaaagtgatggtgactgttcctgacaaaaatccaccttgtccttgctgtggtacccgggtaaactctgtgttgaatctgattgaacatctgaaagtgtcacacgggaaaaggggggtttgttttcggtgtgcaaaatgtggaaaggaaaatagtaactatcacagtgttgtttgtcattttaagaaatgcaggggtccagagacggagaaagccccagctggggagtggatttgtgaggtatgcaacagagattttacaaccaaaattggcctgggacaacacaagagattggcacacccagcagtgagaaatcaggaaaggatcgttgcttcccaaccgaaagaaacatcaaatagaggtgctcacaaaaggtgctggacaaaggaggaggaagaattactaataagactggaggctcagttcgagggaaacaaaaatattaataagcttattgcagaacacataaccaccaaaacagctaagcagatcagtgacaaaaggcgattgctgtccagaaagccagcagaggagccacgtgaggagcctggaacgtgtcatcacaccaggagagcagctgcgagcctgagaacggagcctgagatgagtcatcacgcccaggcagaggacagagataatggacctgggagacgccctctgccaggcagggcagctgccggagggagaacaatggacgagataagacgccaccctgataagggcaacggacagcagagacccaccaagcaaaaatcagaagaacagctgcaggcttactataaaaagacactagaggaacgactttcagctggggcacttaacaccttcccccgagcattcaagcaggtaatggaaggccgggatataaagctagtaatcaatcagacagcgcaggactgcttcggatgcctggaatccataagccaaataagaacggcaacccgagataaaaaggacacggtgacccgggagaaacacccaaagaaaccttttcagaagtggatgaagaagagagcaatcaaaaaaggtaattatcttcggttccagcgtttattttatcttgatagagggaaactggctaaaatcattttagatgatattgaatgcttgtcttgtgacataccactcagtgaaatttattcggtttttaaaacaagatgggaaacaactggtagctttaaaagccttggggactttaaaacttacgggaaggctgacaacactgccttcagagaattaattacggctaaagaaattgagaaaaatgtgcaggaaatgagcaaaggctcggctcccggtccagacgggattactcttggggacgtcgtaaagatggatcccgagttttcccggaccatggagattttcaatttatggttaacaactggtaaaatcccggacatggtgagggggtgcagaaccgttttgattccaaaatcatcaaagccggatcgtttgaaagacattaataactggagacctatcacgatcggttccatcttgctgagactgttctccaggattgtaacagctaggctgagcaaagcgtgccccctgaacccaaggcaaagaggctttatcagagcggcgggatgctctgaaaacatcaaactcctgcaaactataatttggtcggccaaaagagaacacagaccactgggtgttgtattcgtggacatcgccaaggcttttgacaccgtaagccaccagcacatcattcatgctttgcagcaaagagaggtggatccccacatcgtcggtctggtgagcaatatgtacgagaacatcagtacgtatatcaccacaaagaggaacacacacacagacaaaatccagatccgggttggagtaaagcagggtgacccgatgtcgccccttttatttaacctggcaatggaccctctattatgcaagctggaagagagtggcaaaggataccaccgaggacagagcagcatcacagcgatggcatttgcagacgatctggttttgctgagcgactcctgggaaaatatgaatacaaatattagcatactggagaccttctgcaatctgaccggactcaaaacacaggggcaaaagtgccacggcttttacatcaagccgacaaagaagtcttacaccatcaatgactgcgctgcctggactatcaacggcacacccctgaacatgatcgaccccggcgaatctgagaaatacctcggcctgcagtttgacccgtggattggaatagcaaggtccggtctctccacaaaactagatttttggcttcagcggatcgatcaagcaccacttaaacctctgcagaaaactgatattctcaaaacatacaccatccctcggctgatctacatagctgaccactcagaagtgaaaagcgcactactcgaaacccttgaccagaagatccggacagcggtcaaggaatggcttcacctacctccgtgcacctgcgatgccatcctgtactcgagcacgagagacggcggtttgggcatcaccaaattggcaggactgatccccagcgtgcaggcccgtagactgcatcggatcgcacagtcatctgacgatacgatgaaatgcttcatggaaaaagagaaaatggaacagctgcataagaaattgtggattcaagctggaggggacagagagaacataccctcgatttgggaagcaccaccgtcgagtgaaccaccaaacaacgtgagcacaaattcggaatgggaagcaccgacccagaaagataaatttccaaagccttgcaattggaggaaaaacgaattcaaaaaatggaccaaattggcatcccaaggccgcggaattgtaaattttgaaagagacaaaattagtaaccattggatccaatactacagacgcatacctcacaggaaactcctcactgcactacaactcagggccaacgtttaccccacgagagaatttctagccaggggtagacaagaccaatacatcaaggcgtgtaggcactgcgatgcggacaacgaatcctgcgcccacatcatcggcaactgcccagtgacacaggacgcccgaatcaagaggcacaattacatctgcgaactgcttctcgaggaggcgaagaagaaggactgggtagtgttcaaggaaccgcacataagggattccaacaaggaactgtacaaacctgacctgatatttgtgaaggatgggcgtgcacttgtcgtggatgtgacagtacggtatgaagcagccaaatcatcgctggaggaagccgctgcagagaaagtgagaaagtacaaacacctggaaacggaagtaagacatctcacgaatgcaaaggacgttacttttgtgggctttcccctaggagcgcgggggaaatggcaccaagataactttaaacttttgactgagcttggcctctccaaatcgaggcaagtgaaaatggcagagactttttccacagtagcgctcttttcatctgtggacattgtacatatgtttgccagtagggccagaaaatctatggttatgtgataataggctgccttctgcggggcttgccttctggccatgcccttcttctctcccttgcacctgtacctcttggtctttgaataaagcctgagtaggaaggaccggtaaaaaaaaaaaaaaaaaaaaaaaaaaaaaaacgttgactaaaaaaaaaaaaaaaaaaaaaaaaaaaaaaaaaaaaaaaaaaaaaaaaaaaaaaaaaaaaaaaaaaaaaa

SEQ ID NO: 10902 - DNA, 5264 bp, synthetic construct
  source 1..5264: mol_type = other DNA
gaaataagagagaaaagaagagtaagaagaaatataagagaattcgccaccatggcccctaagaaaaagcggaaggtgaatatcagcggctctagctgcggcagccccaacagcgccgacaccagcagcgacttcaaggacctgtggaccaagctgaaggaatgccacgaccgggaagtgcagggactccaggtgaaggtcaccaaactcaagcaagaaagaatcctggacgcccagagactggaagaattcttcaccaagaaccagcagctgagagagcagcagaaagtgctgcacgagacaatcaaggttctggaagatagactgcgggccggcctgtgcgacagatgcgccgtgaccgaggaacacatgcgcaaaaagcagcaggagttcgagaacattagacagcaaaatctgaaattgatcacagagctgatgaacgagagaaacacactgcaggaggagaacaagaagctgagcgagcagctgcaacagaagatcgagaatgatcagcaacaccaggccgctgagctggaatgtgaagaggacgtgatccccgacagcccaatcacagctttcagcttttctggcgtgaacagactgaggcggaaggaaaacccccacgtgcggtacatcgagcagacccataccaagctggaacacagcgtgtgtgccaacgagatgagaaaggtgtccaagtcctccacccatccccagcacaaccctaacgaaaatgagatcctggtggctgatacctacgaccagtctcagagccctatggccaaggcccacggcaccagctcttatacccctgataagagctccttcaacctggccaccgtggtggccgagacactgggcctgggcgtgcaggaggaaagcgagacacagggcccaatgagccctctgggagatgagctgtaccactgcctggaaggcaaccacaagaaacagccttttgagtccggctccgagactcctggaacaagcgagagcgctacacctgagggcagccctaagagaaaggtgtccagcgccgagggcgctgccaaggaagagcctaaacggagaagcgccagactgagcgccaagccccccgccaaggtggaagccaagcctaagaaggccgccgctaaggacaagagcagcgataagaaagtccagaccaagggcaagcggggcgccaaaggcaaacaggccgaggtggccaaccaggagacaaaggaagatctgcctgctgagaacggcgaaaccaagaccgaggaatctccagcttctgacgaggccggagagaaggaggccaaaagcgacagcggctctgagacacctggaacaagcgagagcgccaccccggaatcctatgaacaacttgcaccacaaccgtgtgtgggagaaactttacattctagcctcccacgagacagtgaactgtttgtgcctgaagaggggagcagcgagaaggagagcgaggacgcgccaaaaacatctcctccgacgcctgggaaacatggtttggaacagactggggaggaaaaagtgatggtgactgttcctgacaaaaatccaccttgtccttgctgtggtacccgggtaaactctgtgttgaatctgattgaacatctgaaagtgtcacacgggaaaaggggggtttgttttcggtgtgcaaaatgtggaaaggaaaatagtaactatcacagtgttgtttgtcattttaagaaatgcaggggtccagagacggagaaagccccagctggggagtggatttgtgaggtatgcaacagagattttacaaccaaaattggcctgggacaacacaagagattggcacacccagcagtgagaaatcaggaaaggatcgttgcttcccaaccgaaagaaacatcaaatagaggtgctcacaaaaggtgctggacaaaggaggaggaagaattactaataagactggaggctcagttcgagggaaacaaaaatattaataagcttattgcagaacacataaccaccaaaacagctaagcagatcagtgacaaaaggcgattgctgtccagaaagccagcagaggagccacgtgaggagcctggaacgtgtcatcacaccaggagagcagctgcgagcctgagaacggagcctgagatgagtcatcacgcccaggcagaggacagagataatggacctgggagacgccctctgccaggcagggcagctgccggagggagaacaatggacgagataagacgccaccctgataagggcaacggacagcagagacccaccaagcaaaaatcagaagaacagctgcaggcttactataaaaagacactagaggaacgactttcagctggggcacttaacaccttcccccgagcattcaagcaggtaatggaaggccgggatataaagctagtaatcaatcagacagcgcaggactgcttcggatgcctggaatccataagccaaataagaacggcaacccgagataaaaaggacacggtgacccgggagaaacacccaaagaaaccttttcagaagtggatgaagaagagagcaatcaaaaaaggtaattatcttcggttccagcgtttattttatcttgatagagggaaactggctaaaatcattttagatgatattgaatgcttgtcttgtgacataccactcagtgaaatttattcggtttttaaaacaagatgggaaacaactggtagctttaaaagccttggggactttaaaacttacgggaaggctgacaacactgccttcagagaattaattacggctaaagaaattgagaaaaatgtgcaggaaatgagcaaaggctcggctcccggtccagacgggattactcttggggacgtcgtaaagatggatcccgagttttcccggaccatggagattttcaatttatggttaacaactggtaaaatcccggacatggtgagggggtgcagaaccgttttgattccaaaatcatcaaagccggatcgtttgaaagacattaataactggagacctatcacgatcggttccatcttgctgagactgttctccaggattgtaacagctaggctgagcaaagcgtgccccctgaacccaaggcaaagaggctttatcagagcggcgggatgctctgaaaacttaaaactcctgcaaactataatttggtcgagcaaaagagaacacagaccactgggtgttgtattcgtggacatcgccaaggcttttgacaccgtaagccaccagcacatcattcatgctttgcagcaaagagaggtggatccccacatcgtcggtctggtgagcaatatgtacgagaacatcagtacgtatatcaccacaaagaggaacacacacacagacaaaatccagatccgggttggagtaaagcagggtgacccgatgtcgccccttttatttaacctggcaatggaccctctattatgcaagctggaagagagtggcaaaggataccaccgaggacagagcagcatcacagcgatggcatttgcagacgatctggttttgctgagcgactcctgggaaaatatgaatacaaatattagcatactggagaccttctgcaatctgaccggactcaaaacacaggggcaaaagtgccacggcttttacatcaagccgacaaagaagtcttacaccatcaatgactgcgctgcctggactatcaacggcacacccctgaacatgatcgaccccggcgaatctgagaaatacctcggcctgcagtttgacccgtggattggaatagcaaggtccggtctctccacaaaactagatttttggcttcagcggatcgatcaagcaccacttaaacctctgcagaaaactgatattctcaaaacatacaccatccctcggctgatctacatagctgaccactcagaagtgaaaagcgcactactcgaaacccttgaccagaagatccggacagcggtcaaggaatggcttcacctacctccgtgcacctgcgatgccatcctgtactcgagcacgagagacggcggtttgggcatcaccaaattggcaggactgatccccagcgtgcaggcccgtagactgcatcggatcgcacagtcatctgacgatacgatgaaatgcttcatggaaaaagagaaaatggaacagctgcataagaaattgtggattcaagctggaggggacagagagaacataccctcgatttgggaagcaccaccgtcgagtgaaccaccaaacaacgtgagcacaaattcggaatgggaagcaccgacccagaaagataaatttccaaagccttgcaattggaggaaaaacgaattcaaaaaatggaccaaattggcatcccaaggccgcggaattgtaaattttgaaagagacaaaattagtaaccattggatccaatactacagacgcatacctcacaggaaactcctcactgcactacaactcagggccaacgtttaccccacgagagaatttctagccaggggtagacaagaccaatacatcaaggcgtgtaggcactgcgatgcggacaacgaatcctgcgcccacatcatcggcaactgcccagtgacacaggacgcccgaatcaagaggcacaattacatctgcgaactgcttctcgaggaggcgaagaagaaggactgggtagtgttcaaggaaccgcacataagggattccaacaaggaactgtacaaacctgacctgatatttgtgaaggatgggcgtgcacttgtcgtggatgtgacagtacggtatgaagcagccaaatcatcgctggaggaagccgctgcagagaaagtgagaaagtacaaacacctggaaacggaagtaagacatctcacgaatgcaaaggacgttacttttgtgggctttcccctaggagcgcgggggaaatggcaccaagataactttaaacttttgactgagcttggcctctccaaatcgaggcaagtgaaaatggcagagactttttccacagtagcgctcttttcatctgtggacattgtacatatgtttgccagtagggccagaaaatctatggttatgtgataataggctgccttctgcggggcttgccttctggccatgcccttcttctctcccttgcacctgtacctcttggtctttgaataaagcctgagtaggaaggaccggtaaaaaaaaaaaaaaaaaaaaaaaaaaaaaaacgttgactaaaaaaaaaaaaaaaaaaaaaaaaaaaaaaaaaaaaaaaaaaaaaaaaaaaaaaaaaaaaaaaaaaaaaa

SEQ ID NO: 10903 - DNA, 5264 bp, synthetic construct
  source 1..5264: mol_type = other DNA
gaaataagagagaaaagaagagtaagaagaaatataagagaattcgccaccatggcccctaagaaaaagcggaaggtgaatatcagcggctctagctgcggcagccccaacagcgccgacaccagcagcgacttcaaggacctgtggaccaagctgaaggaatgccacgaccgggaagtgcagggactccaggtgaaggtcaccaaactcaagcaagaaagaatcctggacgcccagagactggaagaattcttcaccaagaaccagcagctgagagagcagcagaaagtgctgcacgagacaatcaaggttctggaagatagactgcgggccggcctgtgcgacagatgcgccgtgaccgaggaacacatgcgcaaaaagcagcaggagttcgagaacattagacagcaaaatctgaaattgatcacagagctgatgaacgagagaaacacactgcaggaggagaacaagaagctgagcgagcagctgcaacagaagatcgagaatgatcagcaacaccaggccgctgagctggaatgtgaagaggacgtgatccccgacagcccaatcacagctttcagcttttctggcgtgaacagactgaggcggaaggaaaacccccacgtgcggtacatcgagcagacccataccaagctggaacacagcgtgtgtgccaacgagatgagaaaggtgtccaagtcctccacccatccccagcacaaccctaacgaaaatgagatcctggtggctgatacctacgaccagtctcagagccctatggccaaggcccacggcaccagctcttatacccctgataagagctccttcaacctggccaccgtggtggccgagacactgggcctgggcgtgcaggaggaaagcgagacacagggcccaatgagccctctgggagatgagctgtaccactgcctggaaggcaaccacaagaaacagccttttgagtccggctccgagactcctggaacaagcgagagcgctacacctgagggcagccctaagagaaaggtgtccagcgccgagggcgctgccaaggaagagcctaaacggagaagcgccagactgagcgccaagccccccgccaaggtggaagccaagcctaagaaggccgccgctaaggacaagagcagcgataagaaagtccagaccaagggcaagcggggcgccaaaggcaaacaggccgaggtggccaaccaggagacaaaggaagatctgcctgctgagaacggcgaaaccaagaccgaggaatctccagcttctgacgaggccggagagaaggaggccaaaagcgacagcggctctgagacacctggaacaagcgagagcgccaccccggaatcctatgaacaacttgcaccacaaccgtgtgtgggagaaactttacattctagcctcccacgagacagtgaactgtttgtgcctgaagaggggagcagcgagaaggagagcgaggacgcgccaaaaacatctcctccgacgcctgggaaacatggtttggaacagactggggaggaaaaagtgatggtgactgttcctgacaaaaatccaccttgtccttgctgtggtacccgggtaaactctgtgttgaatctgattgaacatctgaaagtgtcacacgggaaaaggggggtttgttttcggtgtgcaaaatgtggaaaggaaaatagtaactatcacagtgttgtttgtcattttaagaaatgcaggggtccagagacggagaaagccccagctggggagtggatttgtgaggtatgcaacagagattttacaaccaaaattggcctgggacaacacaagagattggcacacccagcagtgagaaatcaggaaaggatcgttgcttcccaaccgaaagaaacatcaaatagaggtgctcacaaaaggtgctggacaaaggaggaggaagaattactaataagactggaggctcagttcgagggaaacaaaaatattaataagcttattgcagaacacataaccaccaaaacagctaagcagatcagtgacaaaaggcgattgctgtccagaaagccagcagaggagccacgtgaggagcctggaacgtgtcatcacaccaggagagcagctgcgagcctgagaacggagcctgagatgagtcatcacgcccaggcagaggacagagataatggacctgggagacgccctctgccaggcagggcagctgccggagggagaacaatggacgagataagacgccaccctgataagggcaacggacagcagagacccaccaagcaaaaatcagaagaacagctgcaggcttactataaaaagacactagaggaacgactttcagctggggcacttaacaccttcccccgagcattcaagcaggtaatggaaggccgggatataaagctagtaatcaatcagacagcgcaggactgcttcggatgcctggaatccataagccaaataagaacggcaacccgagataaaaaggacacggtgacccgggagaaacacccaaagaaaccttttcagaagtggatgaagaagagagcaatcaaaaaaggtaattatcttcggttccagcgtttattttatcttgatagagggaaactggctaaaatcattttagatgatattgaatgcttgtcttgtgacataccactcagtgaaatttattcggtttttaaaacaagatgggaaacaactggtagctttaaaagccttggggactttaaaacttacgggaaggctgacaacactgccttcagagaattaattacggctaaagaaattgagaaaaatgtgcaggaaatgagcaaaggctcggctcccggtccagacgggattactcttggggacgtcgtaaagatggatcccgagttttcccggaccatggagattttcaatttatggttaacaactggtaaaatcccggacatggtgagggggtgcagaaccgttttgattccaaaatcatcaaagccggatcgtttgaaagacattaataactggagacctatcacgatcggttccatcttgctgagactgttctccaggattgtaacagctaggctgagcaaagcgtgccccctgaacccaaggcaaagaggctttatcagagcggcgggatgctctgaaaacttaaaactcctgcaaactataatttggtcggccaaaagagaacacagaccaatcggtgttgtattcgtggacatcgccaaggcttttgacaccgtaagccaccagcacatcattcatgctttgcagcaaagagaggtggatccccacatcgtcggtctggtgagcaatatgtacgagaacatcagtacgtatatcaccacaaagaggaacacacacacagacaaaatccagatccgggttggagtaaagcagggtgacccgatgtcgccccttttatttaacctggcaatggaccctctattatgcaagctggaagagagtggcaaaggataccaccgaggacagagcagcatcacagcgatggcatttgcagacgatctggttttgctgagcgactcctgggaaaatatgaatacaaatattagcatactggagaccttctgcaatctgaccggactcaaaacacaggggcaaaagtgccacggcttttacatcaagccgacaaagaagtcttacaccatcaatgactgcgctgcctggactatcaacggcacacccctgaacatgatcgaccccggcgaatctgagaaatacctcggcctgcagtttgacccgtggattggaatagcaaggtccggtctctccacaaaactagatttttggcttcagcggatcgatcaagcaccacttaaacctctgcagaaaactgatattctcaaaacatacaccatccctcggctgatctacatagctgaccactcagaagtgaaaagcgcactactcgaaacccttgaccagaagatccggacagcggtcaaggaatggcttcacctacctccgtgcacctgcgatgccatcctgtactcgagcacgagagacggcggtttgggcatcaccaaattggcaggactgatccccagcgtgcaggcccgtagactgcatcggatcgcacagtcatctgacgatacgatgaaatgcttcatggaaaaagagaaaatggaacagctgcataagaaattgtggattcaagctggaggggacagagagaacataccctcgatttgggaagcaccaccgtcgagtgaaccaccaaacaacgtgagcacaaattcggaatgggaagcaccgacccagaaagataaatttccaaagccttgcaattggaggaaaaacgaattcaaaaaatggaccaaattggcatcccaaggccgcggaattgtaaattttgaaagagacaaaattagtaaccattggatccaatactacagacgcatacctcacaggaaactcctcactgcactacaactcagggccaacgtttaccccacgagagaatttctagccaggggtagacaagaccaatacatcaaggcgtgtaggcactgcgatgcggacaacgaatcctgcgcccacatcatcggcaactgcccagtgacacaggacgcccgaatcaagaggcacaattacatctgcgaactgcttctcgaggaggcgaagaagaaggactgggtagtgttcaaggaaccgcacataagggattccaacaaggaactgtacaaacctgacctgatatttgtgaaggatgggcgtgcacttgtcgtggatgtgacagtacggtatgaagcagccaaatcatcgctggaggaagccgctgcagagaaagtgagaaagtacaaacacctggaaacggaagtaagacatctcacgaatgcaaaggacgttacttttgtgggctttcccctaggagcgcgggggaaatggcaccaagataactttaaacttttgactgagcttggcctctccaaatcgaggcaagtgaaaatggcagagactttttccacagtagcgctcttttcatctgtggacattgtacatatgtttgccagtagggccagaaaatctatggttatgtgataataggctgccttctgcggggcttgccttctggccatgcccttcttctctcccttgcacctgtacctcttggtctttgaataaagcctgagtaggaaggaccggtaaaaaaaaaaaaaaaaaaaaaaaaaaaaaaacgttgactaaaaaaaaaaaaaaaaaaaaaaaaaaaaaaaaaaaaaaaaaaaaaaaaaaaaaaaaaaaaaaaaaaaaaa

SEQ ID NO: 10904 - DNA, 5264 bp, synthetic construct
  source 1..5264: mol_type = other DNA
gaaataagagagaaaagaagagtaagaagaaatataagagaattcgccaccatggcccctaagaaaaagcggaaggtgaatatcagcggctctagctgcggcagccccaacagcgccgacaccagcagcgacttcaaggacctgtggaccaagctgaaggaatgccacgaccgggaagtgcagggactccaggtgaaggtcaccaaactcaagcaagaaagaatcctggacgcccagagactggaagaattcttcaccaagaaccagcagctgagagagcagcagaaagtgctgcacgagacaatcaaggttctggaagatagactgcgggccggcctgtgcgacagatgcgccgtgaccgaggaacacatgcgcaaaaagcagcaggagttcgagaacattagacagcaaaatctgaaattgatcacagagctgatgaacgagagaaacacactgcaggaggagaacaagaagctgagcgagcagctgcaacagaagatcgagaatgatcagcaacaccaggccgctgagctggaatgtgaagaggacgtgatccccgacagcccaatcacagctttcagcttttctggcgtgaacagactgaggcggaaggaaaacccccacgtgcggtacatcgagcagacccataccaagctggaacacagcgtgtgtgccaacgagatgagaaaggtgtccaagtcctccacccatccccagcacaaccctaacgaaaatgagatcctggtggctgatacctacgaccagtctcagagccctatggccaaggcccacggcaccagctcttatacccctgataagagctccttcaacctggccaccgtggtggccgagacactgggcctgggcgtgcaggaggaaagcgagacacagggcccaatgagccctctgggagatgagctgtaccactgcctggaaggcaaccacaagaaacagccttttgagtccggctccgagactcctggaacaagcgagagcgctacacctgagggcagccctaagagaaaggtgtccagcgccgagggcgctgccaaggaagagcctaaacggagaagcgccagactgagcgccaagccccccgccaaggtggaagccaagcctaagaaggccgccgctaaggacaagagcagcgataagaaagtccagaccaagggcaagcggggcgccaaaggcaaacaggccgaggtggccaaccaggagacaaaggaagatctgcctgctgagaacggcgaaaccaagaccgaggaatctccagcttctgacgaggccggagagaaggaggccaaaagcgacagcggctctgagacacctggaacaagcgagagcgccaccccggaatcctatgaacaacttgcaccacaaccgtgtgtgggagaaactttacattctagcctcccacgagacagtgaactgtttgtgcctgaagaggggagcagcgagaaggagagcgaggacgcgccaaaaacatctcctccgacgcctgggaaacatggtttggaacagactggggaggaaaaagtgatggtgactgttcctgacaaaaatccaccttgtccttgctgtggtacccgggtaaactctgtgttgaatctgattgaacatctgaaagtgtcacacgggaaaaggggggtttgttttcggtgtgcaaaatgtggaaaggaaaatagtaactatcacagtgttgtttgtcattttaagaaatgcaggggtccagagacggagaaagccccagctggggagtggatttgtgaggtatgcaacagagattttacaaccaaaattggcctgggacaacacaagagattggcacacccagcagtgagaaatcaggaaaggatcgttgcttcccaaccgaaagaaacatcaaatagaggtgctcacaaaaggtgctggacaaaggaggaggaagaattactaataagactggaggctcagttcgagggaaacaaaaatattaataagcttattgcagaacacataaccaccaaaacagctaagcagatcagtgacaaaaggcgattgctgtccagaaagccagcagaggagccacgtgaggagcctggaacgtgtcatcacaccaggagagcagctgcgagcctgagaacggagcctgagatgagtcatcacgcccaggcagaggacagagataatggacctgggagacgccctctgccaggcagggcagctgccggagggagaacaatggacgagataagacgccaccctgataagggcaacggacagcagagacccaccaagcaaaaatcagaagaacagctgcaggcttactataaaaagacactagaggaacgactttcagctggggcacttaacaccttcccccgagcattcaagcaggtaatggaaggccgggatataaagctagtaatcaatcagacagcgcaggactgcttcggatgcctggaatccataagccaaataagaacggcaacccgagataaaaaggacacggtgacccgggagaaacacccaaagaaaccttttcagaagtggatgaagaagagagcaatcaaaaaaggtaattatcttcggttccagcgtttattttatcttgatagagggaaactggctaaaatcattttagatgatattgaatgcttgtcttgtgacataccactcagtgaaatttattcggtttttaaaacaagatgggaaacaactggtagctttaaaagccttggggactttaaaacttacgggaaggctgacaacactgccttcagagaattaattacggctaaagaaattgagaaaaatgtgcaggaaatgagcaaaggctcggctcccggtccagacgggattactcttggggacgtcgtaaagatggatcccgagttttcccggaccatggagattttcaatttatggttaacaactggtaaaatcccggacatggtgagggggtgcagaaccgttttgattccaaaatcatcaaagccggatcgtttgaaagacattaataactggagacctatcacgatcggttccatcttgctgagactgttctccaggattgtaacagctaggctgagcaaagcgtgccccctgaacccaaggcaaagaggctttatcagagcggcgggatgctctgaaaacttaaaactcctgcaaactataatttggtcggccaaaagagaacacagaccactgggtgttgtattcatcgacatcgccaaggcttttgacaccgtaagccaccagcacatcattcatgctttgcagcaaagagaggtggatccccacatcgtcggtctggtgagcaatatgtacgagaacatcagtacgtatatcaccacaaagaggaacacacacacagacaaaatccagatccgggttggagtaaagcagggtgacccgatgtcgccccttttatttaacctggcaatggaccctctattatgcaagctggaagagagtggcaaaggataccaccgaggacagagcagcatcacagcgatggcatttgcagacgatctggttttgctgagcgactcctgggaaaatatgaatacaaatattagcatactggagaccttctgcaatctgaccggactcaaaacacaggggcaaaagtgccacggcttttacatcaagccgacaaagaagtcttacaccatcaatgactgcgctgcctggactatcaacggcacacccctgaacatgatcgaccccggcgaatctgagaaatacctcggcctgcagtttgacccgtggattggaatagcaaggtccggtctctccacaaaactagatttttggcttcagcggatcgatcaagcaccacttaaacctctgcagaaaactgatattctcaaaacatacaccatccctcggctgatctacatagctgaccactcagaagtgaaaagcgcactactcgaaacccttgaccagaagatccggacagcggtcaaggaatggcttcacctacctccgtgcacctgcgatgccatcctgtactcgagcacgagagacggcggtttgggcatcaccaaattggcaggactgatccccagcgtgcaggcccgtagactgcatcggatcgcacagtcatctgacgatacgatgaaatgcttcatggaaaaagagaaaatggaacagctgcataagaaattgtggattcaagctggaggggacagagagaacataccctcgatttgggaagcaccaccgtcgagtgaaccaccaaacaacgtgagcacaaattcggaatgggaagcaccgacccagaaagataaatttccaaagccttgcaattggaggaaaaacgaattcaaaaaatggaccaaattggcatcccaaggccgcggaattgtaaattttgaaagagacaaaattagtaaccattggatccaatactacagacgcatacctcacaggaaactcctcactgcactacaactcagggccaacgtttaccccacgagagaatttctagccaggggtagacaagaccaatacatcaaggcgtgtaggcactgcgatgcggacaacgaatcctgcgcccacatcatcggcaactgcccagtgacacaggacgcccgaatcaagaggcacaattacatctgcgaactgcttctcgaggaggcgaagaagaaggactgggtagtgttcaaggaaccgcacataagggattccaacaaggaactgtacaaacctgacctgatatttgtgaaggatgggcgtgcacttgtcgtggatgtgacagtacggtatgaagcagccaaatcatcgctggaggaagccgctgcagagaaagtgagaaagtacaaacacctggaaacggaagtaagacatctcacgaatgcaaaggacgttacttttgtgggctttcccctaggagcgcgggggaaatggcaccaagataactttaaacttttgactgagcttggcctctccaaatcgaggcaagtgaaaatggcagagactttttccacagtagcgctcttttcatctgtggacattgtacatatgtttgccagtagggccagaaaatctatggttatgtgataataggctgccttctgcggggcttgccttctggccatgcccttcttctctcccttgcacctgtacctcttggtctttgaataaagcctgagtaggaaggaccggtaaaaaaaaaaaaaaaaaaaaaaaaaaaaaaacgttgactaaaaaaaaaaaaaaaaaaaaaaaaaaaaaaaaaaaaaaaaaaaaaaaaaaaaaaaaaaaaaaaaaaaaaa

SEQ ID NO: 10905 - DNA, 5264 bp, synthetic construct
  source 1..5264: mol_type = other DNA
gaaataagagagaaaagaagagtaagaagaaatataagagaattcgccaccatggcccctaagaaaaagcggaaggtgaatatcagcggctctagctgcggcagccccaacagcgccgacaccagcagcgacttcaaggacctgtggaccaagctgaaggaatgccacgaccgggaagtgcagggactccaggtgaaggtcaccaaactcaagcaagaaagaatcctggacgcccagagactggaagaattcttcaccaagaaccagcagctgagagagcagcagaaagtgctgcacgagacaatcaaggttctggaagatagactgcgggccggcctgtgcgacagatgcgccgtgaccgaggaacacatgcgcaaaaagcagcaggagttcgagaacattagacagcaaaatctgaaattgatcacagagctgatgaacgagagaaacacactgcaggaggagaacaagaagctgagcgagcagctgcaacagaagatcgagaatgatcagcaacaccaggccgctgagctggaatgtgaagaggacgtgatccccgacagcccaatcacagctttcagcttttctggcgtgaacagactgaggcggaaggaaaacccccacgtgcggtacatcgagcagacccataccaagctggaacacagcgtgtgtgccaacgagatgagaaaggtgtccaagtcctccacccatccccagcacaaccctaacgaaaatgagatcctggtggctgatacctacgaccagtctcagagccctatggccaaggcccacggcaccagctcttatacccctgataagagctccttcaacctggccaccgtggtggccgagacactgggcctgggcgtgcaggaggaaagcgagacacagggcccaatgagccctctgggagatgagctgtaccactgcctggaaggcaaccacaagaaacagccttttgagtccggctccgagactcctggaacaagcgagagcgctacacctgagggcagccctaagagaaaggtgtccagcgccgagggcgctgccaaggaagagcctaaacggagaagcgccagactgagcgccaagccccccgccaaggtggaagccaagcctaagaaggccgccgctaaggacaagagcagcgataagaaagtccagaccaagggcaagcggggcgccaaaggcaaacaggccgaggtggccaaccaggagacaaaggaagatctgcctgctgagaacggcgaaaccaagaccgaggaatctccagcttctgacgaggccggagagaaggaggccaaaagcgacagcggctctgagacacctggaacaagcgagagcgccaccccggaatcctatgaacaacttgcaccacaaccgtgtgtgggagaaactttacattctagcctcccacgagacagtgaactgtttgtgcctgaagaggggagcagcgagaaggagagcgaggacgcgccaaaaacatctcctccgacgcctgggaaacatggtttggaacagactggggaggaaaaagtgatggtgactgttcctgacaaaaatccaccttgtccttgctgtggtacccgggtaaactctgtgttgaatctgattgaacatctgaaagtgtcacacgggaaaaggggggtttgttttcggtgtgcaaaatgtggaaaggaaaatagtaactatcacagtgttgtttgtcattttaagaaatgcaggggtccagagacggagaaagccccagctggggagtggatttgtgaggtatgcaacagagattttacaaccaaaattggcctgggacaacacaagagattggcacacccagcagtgagaaatcaggaaaggatcgttgcttcccaaccgaaagaaacatcaaatagaggtgctcacaaaaggtgctggacaaaggaggaggaagaattactaataagactggaggctcagttcgagggaaacaaaaatattaataagcttattgcagaacacataaccaccaaaacagctaagcagatcagtgacaaaaggcgattgctgtccagaaagccagcagaggagccacgtgaggagcctggaacgtgtcatcacaccaggagagcagctgcgagcctgagaacggagcctgagatgagtcatcacgcccaggcagaggacagagataatggacctgggagacgccctctgccaggcagggcagctgccggagggagaacaatggacgagataagacgccaccctgataagggcaacggacagcagagacccaccaagcaaaaatcagaagaacagctgcaggcttactataaaaagacactagaggaacgactttcagctggggcacttaacaccttcccccgagcattcaagcaggtaatggaaggccgggatataaagctagtaatcaatcagacagcgcaggactgcttcggatgcctggaatccataagccaaataagaacggcaacccgagataaaaaggacacggtgacccgggagaaacacccaaagaaaccttttcagaagtggatgaagaagagagcaatcaaaaaaggtaattatcttcggttccagcgtttattttatcttgatagagggaaactggctaaaatcattttagatgatattgaatgcttgtcttgtgacataccactcagtgaaatttattcggtttttaaaacaagatgggaaacaactggtagctttaaaagccttggggactttaaaacttacgggaaggctgacaacactgccttcagagaattaattacggctaaagaaattgagaaaaatgtgcaggaaatgagcaaaggctcggctcccggtccagacgggattactcttggggacgtcgtaaagatggatcccgagttttcccggaccatggagattttcaatttatggttaacaactggtaaaatcccggacatggtgagggggtgcagaaccgttttgattccaaaatcatcaaagccggatcgtttgaaagacattaataactggagacctatcacgatcggttccatcttgctgagactgttctccaggattgtaacagctaggctgagcaaagcgtgccccctgaacccaaggcaaagaggctttatcagagcggcgggatgctctgaaaacttaaaactcctgcaaactataatttggtcggccaaaagagaacacagaccactgggtgttgtattcgtggacttcgccaaggcttttgacaccgtaagccaccagcacatcattcatgctttgcagcaaagagaggtggatccccacatcgtcggtctggtgagcaatatgtacgagaacatcagtacgtatatcaccacaaagaggaacacacacacagacaaaatccagatccgggttggagtaaagcagggtgacccgatgtcgccccttttatttaacctggcaatggaccctctattatgcaagctggaagagagtggcaaaggataccaccgaggacagagcagcatcacagcgatggcatttgcagacgatctggttttgctgagcgactcctgggaaaatatgaatacaaatattagcatactggagaccttctgcaatctgaccggactcaaaacacaggggcaaaagtgccacggcttttacatcaagccgacaaagaagtcttacaccatcaatgactgcgctgcctggactatcaacggcacacccctgaacatgatcgaccccggcgaatctgagaaatacctcggcctgcagtttgacccgtggattggaatagcaaggtccggtctctccacaaaactagatttttggcttcagcggatcgatcaagcaccacttaaacctctgcagaaaactgatattctcaaaacatacaccatccctcggctgatctacatagctgaccactcagaagtgaaaagcgcactactcgaaacccttgaccagaagatccggacagcggtcaaggaatggcttcacctacctccgtgcacctgcgatgccatcctgtactcgagcacgagagacggcggtttgggcatcaccaaattggcaggactgatccccagcgtgcaggcccgtagactgcatcggatcgcacagtcatctgacgatacgatgaaatgcttcatggaaaaagagaaaatggaacagctgcataagaaattgtggattcaagctggaggggacagagagaacataccctcgatttgggaagcaccaccgtcgagtgaaccaccaaacaacgtgagcacaaattcggaatgggaagcaccgacccagaaagataaatttccaaagccttgcaattggaggaaaaacgaattcaaaaaatggaccaaattggcatcccaaggccgcggaattgtaaattttgaaagagacaaaattagtaaccattggatccaatactacagacgcatacctcacaggaaactcctcactgcactacaactcagggccaacgtttaccccacgagagaatttctagccaggggtagacaagaccaatacatcaaggcgtgtaggcactgcgatgcggacaacgaatcctgcgcccacatcatcggcaactgcccagtgacacaggacgcccgaatcaagaggcacaattacatctgcgaactgcttctcgaggaggcgaagaagaaggactgggtagtgttcaaggaaccgcacataagggattccaacaaggaactgtacaaacctgacctgatatttgtgaaggatgggcgtgcacttgtcgtggatgtgacagtacggtatgaagcagccaaatcatcgctggaggaagccgctgcagagaaagtgagaaagtacaaacacctggaaacggaagtaagacatctcacgaatgcaaaggacgttacttttgtgggctttcccctaggagcgcgggggaaatggcaccaagataactttaaacttttgactgagcttggcctctccaaatcgaggcaagtgaaaatggcagagactttttccacagtagcgctcttttcatctgtggacattgtacatatgtttgccagtagggccagaaaatctatggttatgtgataataggctgccttctgcggggcttgccttctggccatgcccttcttctctcccttgcacctgtacctcttggtctttgaataaagcctgagtaggaaggaccggtaaaaaaaaaaaaaaaaaaaaaaaaaaaaaaacgttgactaaaaaaaaaaaaaaaaaaaaaaaaaaaaaaaaaaaaaaaaaaaaaaaaaaaaaaaaaaaaaaaaaaaaaa

SEQ ID NO: 10906 - DNA, 5264 bp, synthetic construct
  source 1..5264: mol_type = other DNA
gaaataagagagaaaagaagagtaagaagaaatataagagaattcgccaccatggcccctaagaaaaagcggaaggtgaatatcagcggctctagctgcggcagccccaacagcgccgacaccagcagcgacttcaaggacctgtggaccaagctgaaggaatgccacgaccgggaagtgcagggactccaggtgaaggtcaccaaactcaagcaagaaagaatcctggacgcccagagactggaagaattcttcaccaagaaccagcagctgagagagcagcagaaagtgctgcacgagacaatcaaggttctggaagatagactgcgggccggcctgtgcgacagatgcgccgtgaccgaggaacacatgcgcaaaaagcagcaggagttcgagaacattagacagcaaaatctgaaattgatcacagagctgatgaacgagagaaacacactgcaggaggagaacaagaagctgagcgagcagctgcaacagaagatcgagaatgatcagcaacaccaggccgctgagctggaatgtgaagaggacgtgatccccgacagcccaatcacagctttcagcttttctggcgtgaacagactgaggcggaaggaaaacccccacgtgcggtacatcgagcagacccataccaagctggaacacagcgtgtgtgccaacgagatgagaaaggtgtccaagtcctccacccatccccagcacaaccctaacgaaaatgagatcctggtggctgatacctacgaccagtctcagagccctatggccaaggcccacggcaccagctcttatacccctgataagagctccttcaacctggccaccgtggtggccgagacactgggcctgggcgtgcaggaggaaagcgagacacagggcccaatgagccctctgggagatgagctgtaccactgcctggaaggcaaccacaagaaacagccttttgagtccggctccgagactcctggaacaagcgagagcgctacacctgagggcagccctaagagaaaggtgtccagcgccgagggcgctgccaaggaagagcctaaacggagaagcgccagactgagcgccaagccccccgccaaggtggaagccaagcctaagaaggccgccgctaaggacaagagcagcgataagaaagtccagaccaagggcaagcggggcgccaaaggcaaacaggccgaggtggccaaccaggagacaaaggaagatctgcctgctgagaacggcgaaaccaagaccgaggaatctccagcttctgacgaggccggagagaaggaggccaaaagcgacagcggctctgagacacctggaacaagcgagagcgccaccccggaatcctatgaacaacttgcaccacaaccgtgtgtgggagaaactttacattctagcctcccacgagacagtgaactgtttgtgcctgaagaggggagcagcgagaaggagagcgaggacgcgccaaaaacatctcctccgacgcctgggaaacatggtttggaacagactggggaggaaaaagtgatggtgactgttcctgacaaaaatccaccttgtccttgctgtggtacccgggtaaactctgtgttgaatctgattgaacatctgaaagtgtcacacgggaaaaggggggtttgttttcggtgtgcaaaatgtggaaaggaaaatagtaactatcacagtgttgtttgtcattttaagaaatgcaggggtccagagacggagaaagccccagctggggagtggatttgtgaggtatgcaacagagattttacaaccaaaattggcctgggacaacacaagagattggcacacccagcagtgagaaatcaggaaaggatcgttgcttcccaaccgaaagaaacatcaaatagaggtgctcacaaaaggtgctggacaaaggaggaggaagaattactaataagactggaggctcagttcgagggaaacaaaaatattaataagcttattgcagaacacataaccaccaaaacagctaagcagatcagtgacaaaaggcgattgctgtccagaaagccagcagaggagccacgtgaggagcctggaacgtgtcatcacaccaggagagcagctgcgagcctgagaacggagcctgagatgagtcatcacgcccaggcagaggacagagataatggacctgggagacgccctctgccaggcagggcagctgccggagggagaacaatggacgagataagacgccaccctgataagggcaacggacagcagagacccaccaagcaaaaatcagaagaacagctgcaggcttactataaaaagacactagaggaacgactttcagctggggcacttaacaccttcccccgagcattcaagcaggtaatggaaggccgggatataaagctagtaatcaatcagacagcgcaggactgcttcggatgcctggaatccataagccaaataagaacggcaacccgagataaaaaggacacggtgacccgggagaaacacccaaagaaaccttttcagaagtggatgaagaagagagcaatcaaaaaaggtaattatcttcggttccagcgtttattttatcttgatagagggaaactggctaaaatcattttagatgatattgaatgcttgtcttgtgacataccactcagtgaaatttattcggtttttaaaacaagatgggaaacaactggtagctttaaaagccttggggactttaaaacttacgggaaggctgacaacactgccttcagagaattaattacggctaaagaaattgagaaaaatgtgcaggaaatgagcaaaggctcggctcccggtccagacgggattactcttggggacgtcgtaaagatggatcccgagttttcccggaccatggagattttcaatttatggttaacaactggtaaaatcccggacatggtgagggggtgcagaaccgttttgattccaaaatcatcaaagccggatcgtttgaaagacattaataactggagacctatcacgatcggttccatcttgctgagactgttctccaggattgtaacagctaggctgagcaaagcgtgccccctgaacccaaggcaaagaggctttatcagagcggcgggatgctctgaaaacttaaaactcctgcaaactataatttggtcggccaaaagagaacacagaccactgggtgttgtattcgtggacatcgccaaggcttacgacaccgtaagccaccagcacatcattcatgctttgcagcaaagagaggtggatccccacatcgtcggtctggtgagcaatatgtacgagaacatcagtacgtatatcaccacaaagaggaacacacacacagacaaaatccagatccgggttggagtaaagcagggtgacccgatgtcgccccttttatttaacctggcaatggaccctctattatgcaagctggaagagagtggcaaaggataccaccgaggacagagcagcatcacagcgatggcatttgcagacgatctggttttgctgagcgactcctgggaaaatatgaatacaaatattagcatactggagaccttctgcaatctgaccggactcaaaacacaggggcaaaagtgccacggcttttacatcaagccgacaaagaagtcttacaccatcaatgactgcgctgcctggactatcaacggcacacccctgaacatgatcgaccccggcgaatctgagaaatacctcggcctgcagtttgacccgtggattggaatagcaaggtccggtctctccacaaaactagatttttggcttcagcggatcgatcaagcaccacttaaacctctgcagaaaactgatattctcaaaacatacaccatccctcggctgatctacatagctgaccactcagaagtgaaaagcgcactactcgaaacccttgaccagaagatccggacagcggtcaaggaatggcttcacctacctccgtgcacctgcgatgccatcctgtactcgagcacgagagacggcggtttgggcatcaccaaattggcaggactgatccccagcgtgcaggcccgtagactgcatcggatcgcacagtcatctgacgatacgatgaaatgcttcatggaaaaagagaaaatggaacagctgcataagaaattgtggattcaagctggaggggacagagagaacataccctcgatttgggaagcaccaccgtcgagtgaaccaccaaacaacgtgagcacaaattcggaatgggaagcaccgacccagaaagataaatttccaaagccttgcaattggaggaaaaacgaattcaaaaaatggaccaaattggcatcccaaggccgcggaattgtaaattttgaaagagacaaaattagtaaccattggatccaatactacagacgcatacctcacaggaaactcctcactgcactacaactcagggccaacgtttaccccacgagagaatttctagccaggggtagacaagaccaatacatcaaggcgtgtaggcactgcgatgcggacaacgaatcctgcgcccacatcatcggcaactgcccagtgacacaggacgcccgaatcaagaggcacaattacatctgcgaactgcttctcgaggaggcgaagaagaaggactgggtagtgttcaaggaaccgcacataagggattccaacaaggaactgtacaaacctgacctgatatttgtgaaggatgggcgtgcacttgtcgtggatgtgacagtacggtatgaagcagccaaatcatcgctggaggaagccgctgcagagaaagtgagaaagtacaaacacctggaaacggaagtaagacatctcacgaatgcaaaggacgttacttttgtgggctttcccctaggagcgcgggggaaatggcaccaagataactttaaacttttgactgagcttggcctctccaaatcgaggcaagtgaaaatggcagagactttttccacagtagcgctcttttcatctgtggacattgtacatatgtttgccagtagggccagaaaatctatggttatgtgataataggctgccttctgcggggcttgccttctggccatgcccttcttctctcccttgcacctgtacctcttggtctttgaataaagcctgagtaggaaggaccggtaaaaaaaaaaaaaaaaaaaaaaaaaaaaaaacgttgactaaaaaaaaaaaaaaaaaaaaaaaaaaaaaaaaaaaaaaaaaaaaaaaaaaaaaaaaaaaaaaaaaaaaaa

SEQ ID NO: 10907 - DNA, 5264 bp, synthetic construct
  source 1..5264: mol_type = other DNA
gaaataagagagaaaagaagagtaagaagaaatataagagaattcgccaccatggcccctaagaaaaagcggaaggtgaatatcagcggctctagctgcggcagccccaacagcgccgacaccagcagcgacttcaaggacctgtggaccaagctgaaggaatgccacgaccgggaagtgcagggactccaggtgaaggtcaccaaactcaagcaagaaagaatcctggacgcccagagactggaagaattcttcaccaagaaccagcagctgagagagcagcagaaagtgctgcacgagacaatcaaggttctggaagatagactgcgggccggcctgtgcgacagatgcgccgtgaccgaggaacacatgcgcaaaaagcagcaggagttcgagaacattagacagcaaaatctgaaattgatcacagagctgatgaacgagagaaacacactgcaggaggagaacaagaagctgagcgagcagctgcaacagaagatcgagaatgatcagcaacaccaggccgctgagctggaatgtgaagaggacgtgatccccgacagcccaatcacagctttcagcttttctggcgtgaacagactgaggcggaaggaaaacccccacgtgcggtacatcgagcagacccataccaagctggaacacagcgtgtgtgccaacgagatgagaaaggtgtccaagtcctccacccatccccagcacaaccctaacgaaaatgagatcctggtggctgatacctacgaccagtctcagagccctatggccaaggcccacggcaccagctcttatacccctgataagagctccttcaacctggccaccgtggtggccgagacactgggcctgggcgtgcaggaggaaagcgagacacagggcccaatgagccctctgggagatgagctgtaccactgcctggaaggcaaccacaagaaacagccttttgagtccggctccgagactcctggaacaagcgagagcgctacacctgagggcagccctaagagaaaggtgtccagcgccgagggcgctgccaaggaagagcctaaacggagaagcgccagactgagcgccaagccccccgccaaggtggaagccaagcctaagaaggccgccgctaaggacaagagcagcgataagaaagtccagaccaagggcaagcggggcgccaaaggcaaacaggccgaggtggccaaccaggagacaaaggaagatctgcctgctgagaacggcgaaaccaagaccgaggaatctccagcttctgacgaggccggagagaaggaggccaaaagcgacagcggctctgagacacctggaacaagcgagagcgccaccccggaatcctatgaacaacttgcaccacaaccgtgtgtgggagaaactttacattctagcctcccacgagacagtgaactgtttgtgcctgaagaggggagcagcgagaaggagagcgaggacgcgccaaaaacatctcctccgacgcctgggaaacatggtttggaacagactggggaggaaaaagtgatggtgactgttcctgacaaaaatccaccttgtccttgctgtggtacccgggtaaactctgtgttgaatctgattgaacatctgaaagtgtcacacgggaaaaggggggtttgttttcggtgtgcaaaatgtggaaaggaaaatagtaactatcacagtgttgtttgtcattttaagaaatgcaggggtccagagacggagaaagccccagctggggagtggatttgtgaggtatgcaacagagattttacaaccaaaattggcctgggacaacacaagagattggcacacccagcagtgagaaatcaggaaaggatcgttgcttcccaaccgaaagaaacatcaaatagaggtgctcacaaaaggtgctggacaaaggaggaggaagaattactaataagactggaggctcagttcgagggaaacaaaaatattaataagcttattgcagaacacataaccaccaaaacagctaagcagatcagtgacaaaaggcgattgctgtccagaaagccagcagaggagccacgtgaggagcctggaacgtgtcatcacaccaggagagcagctgcgagcctgagaacggagcctgagatgagtcatcacgcccaggcagaggacagagataatggacctgggagacgccctctgccaggcagggcagctgccggagggagaacaatggacgagataagacgccaccctgataagggcaacggacagcagagacccaccaagcaaaaatcagaagaacagctgcaggcttactataaaaagacactagaggaacgactttcagctggggcacttaacaccttcccccgagcattcaagcaggtaatggaaggccgggatataaagctagtaatcaatcagacagcgcaggactgcttcggatgcctggaatccataagccaaataagaacggcaacccgagataaaaaggacacggtgacccgggagaaacacccaaagaaaccttttcagaagtggatgaagaagagagcaatcaaaaaaggtaattatcttcggttccagcgtttattttatcttgatagagggaaactggctaaaatcattttagatgatattgaatgcttgtcttgtgacataccactcagtgaaatttattcggtttttaaaacaagatgggaaacaactggtagctttaaaagccttggggactttaaaacttacgggaaggctgacaacactgccttcagagaattaattacggctaaagaaattgagaaaaatgtgcaggaaatgagcaaaggctcggctcccggtccagacgggattactcttggggacgtcgtaaagatggatcccgagttttcccggaccatggagattttcaatttatggttaacaactggtaaaatcccggacatggtgagggggtgcagaaccgttttgattccaaaatcatcaaagccggatcgtttgaaagacattaataactggagacctatcacgatcggttccatcttgctgagactgttctccaggattgtaacagctaggctgagcaaagcgtgccccctgaacccaaggcaaagaggctttatcagagcggcgggatgctctgaaaacttaaaactcctgcaaactataatttggtcggccaaaagagaacacagaccactgggtgttgtattcgtggacatcgccaaggcttttgacaccgtaagccaccagcacatcattcatgctatgcagcaaagagaggtggatccccacatcgtcggtctggtgagcaatatgtacgagaacatcagtacgtatatcaccacaaagaggaacacacacacagacaaaatccagatccgggttggagtaaagcagggtgacccgatgtcgccccttttatttaacctggcaatggaccctctattatgcaagctggaagagagtggcaaaggataccaccgaggacagagcagcatcacagcgatggcatttgcagacgatctggttttgctgagcgactcctgggaaaatatgaatacaaatattagcatactggagaccttctgcaatctgaccggactcaaaacacaggggcaaaagtgccacggcttttacatcaagccgacaaagaagtcttacaccatcaatgactgcgctgcctggactatcaacggcacacccctgaacatgatcgaccccggcgaatctgagaaatacctcggcctgcagtttgacccgtggattggaatagcaaggtccggtctctccacaaaactagatttttggcttcagcggatcgatcaagcaccacttaaacctctgcagaaaactgatattctcaaaacatacaccatccctcggctgatctacatagctgaccactcagaagtgaaaagcgcactactcgaaacccttgaccagaagatccggacagcggtcaaggaatggcttcacctacctccgtgcacctgcgatgccatcctgtactcgagcacgagagacggcggtttgggcatcaccaaattggcaggactgatccccagcgtgcaggcccgtagactgcatcggatcgcacagtcatctgacgatacgatgaaatgcttcatggaaaaagagaaaatggaacagctgcataagaaattgtggattcaagctggaggggacagagagaacataccctcgatttgggaagcaccaccgtcgagtgaaccaccaaacaacgtgagcacaaattcggaatgggaagcaccgacccagaaagataaatttccaaagccttgcaattggaggaaaaacgaattcaaaaaatggaccaaattggcatcccaaggccgcggaattgtaaattttgaaagagacaaaattagtaaccattggatccaatactacagacgcatacctcacaggaaactcctcactgcactacaactcagggccaacgtttaccccacgagagaatttctagccaggggtagacaagaccaatacatcaaggcgtgtaggcactgcgatgcggacaacgaatcctgcgcccacatcatcggcaactgcccagtgacacaggacgcccgaatcaagaggcacaattacatctgcgaactgcttctcgaggaggcgaagaagaaggactgggtagtgttcaaggaaccgcacataagggattccaacaaggaactgtacaaacctgacctgatatttgtgaaggatgggcgtgcacttgtcgtggatgtgacagtacggtatgaagcagccaaatcatcgctggaggaagccgctgcagagaaagtgagaaagtacaaacacctggaaacggaagtaagacatctcacgaatgcaaaggacgttacttttgtgggctttcccctaggagcgcgggggaaatggcaccaagataactttaaacttttgactgagcttggcctctccaaatcgaggcaagtgaaaatggcagagactttttccacagtagcgctcttttcatctgtggacattgtacatatgtttgccagtagggccagaaaatctatggttatgtgataataggctgccttctgcggggcttgccttctggccatgcccttcttctctcccttgcacctgtacctcttggtctttgaataaagcctgagtaggaaggaccggtaaaaaaaaaaaaaaaaaaaaaaaaaaaaaaacgttgactaaaaaaaaaaaaaaaaaaaaaaaaaaaaaaaaaaaaaaaaaaaaaaaaaaaaaaaaaaaaaaaaaaaaaa

SEQ ID NO: 10908 - DNA, 5264 bp, synthetic construct
  source 1..5264: mol_type = other DNA
gaaataagagagaaaagaagagtaagaagaaatataagagaattcgccaccatggcccctaagaaaaagcggaaggtgaatatcagcggctctagctgcggcagccccaacagcgccgacaccagcagcgacttcaaggacctgtggaccaagctgaaggaatgccacgaccgggaagtgcagggactccaggtgaaggtcaccaaactcaagcaagaaagaatcctggacgcccagagactggaagaattcttcaccaagaaccagcagctgagagagcagcagaaagtgctgcacgagacaatcaaggttctggaagatagactgcgggccggcctgtgcgacagatgcgccgtgaccgaggaacacatgcgcaaaaagcagcaggagttcgagaacattagacagcaaaatctgaaattgatcacagagctgatgaacgagagaaacacactgcaggaggagaacaagaagctgagcgagcagctgcaacagaagatcgagaatgatcagcaacaccaggccgctgagctggaatgtgaagaggacgtgatccccgacagcccaatcacagctttcagcttttctggcgtgaacagactgaggcggaaggaaaacccccacgtgcggtacatcgagcagacccataccaagctggaacacagcgtgtgtgccaacgagatgagaaaggtgtccaagtcctccacccatccccagcacaaccctaacgaaaatgagatcctggtggctgatacctacgaccagtctcagagccctatggccaaggcccacggcaccagctcttatacccctgataagagctccttcaacctggccaccgtggtggccgagacactgggcctgggcgtgcaggaggaaagcgagacacagggcccaatgagccctctgggagatgagctgtaccactgcctggaaggcaaccacaagaaacagccttttgagtccggctccgagactcctggaacaagcgagagcgctacacctgagggcagccctaagagaaaggtgtccagcgccgagggcgctgccaaggaagagcctaaacggagaagcgccagactgagcgccaagccccccgccaaggtggaagccaagcctaagaaggccgccgctaaggacaagagcagcgataagaaagtccagaccaagggcaagcggggcgccaaaggcaaacaggccgaggtggccaaccaggagacaaaggaagatctgcctgctgagaacggcgaaaccaagaccgaggaatctccagcttctgacgaggccggagagaaggaggccaaaagcgacagcggctctgagacacctggaacaagcgagagcgccaccccggaatcctatgaacaacttgcaccacaaccgtgtgtgggagaaactttacattctagcctcccacgagacagtgaactgtttgtgcctgaagaggggagcagcgagaaggagagcgaggacgcgccaaaaacatctcctccgacgcctgggaaacatggtttggaacagactggggaggaaaaagtgatggtgactgttcctgacaaaaatccaccttgtccttgctgtggtacccgggtaaactctgtgttgaatctgattgaacatctgaaagtgtcacacgggaaaaggggggtttgttttcggtgtgcaaaatgtggaaaggaaaatagtaactatcacagtgttgtttgtcattttaagaaatgcaggggtccagagacggagaaagccccagctggggagtggatttgtgaggtatgcaacagagattttacaaccaaaattggcctgggacaacacaagagattggcacacccagcagtgagaaatcaggaaaggatcgttgcttcccaaccgaaagaaacatcaaatagaggtgctcacaaaaggtgctggacaaaggaggaggaagaattactaataagactggaggctcagttcgagggaaacaaaaatattaataagcttattgcagaacacataaccaccaaaacagctaagcagatcagtgacaaaaggcgattgctgtccagaaagccagcagaggagccacgtgaggagcctggaacgtgtcatcacaccaggagagcagctgcgagcctgagaacggagcctgagatgagtcatcacgcccaggcagaggacagagataatggacctgggagacgccctctgccaggcagggcagctgccggagggagaacaatggacgagataagacgccaccctgataagggcaacggacagcagagacccaccaagcaaaaatcagaagaacagctgcaggcttactataaaaagacactagaggaacgactttcagctggggcacttaacaccttcccccgagcattcaagcaggtaatggaaggccgggatataaagctagtaatcaatcagacagcgcaggactgcttcggatgcctggaatccataagccaaataagaacggcaacccgagataaaaaggacacggtgacccgggagaaacacccaaagaaaccttttcagaagtggatgaagaagagagcaatcaaaaaaggtaattatcttcggttccagcgtttattttatcttgatagagggaaactggctaaaatcattttagatgatattgaatgcttgtcttgtgacataccactcagtgaaatttattcggtttttaaaacaagatgggaaacaactggtagctttaaaagccttggggactttaaaacttacgggaaggctgacaacactgccttcagagaattaattacggctaaagaaattgagaaaaatgtgcaggaaatgagcaaaggctcggctcccggtccagacgggattactcttggggacgtcgtaaagatggatcccgagttttcccggaccatggagattttcaatttatggttaacaactggtaaaatcccggacatggtgagggggtgcagaaccgttttgattccaaaatcatcaaagccggatcgtttgaaagacattaataactggagacctatcacgatcggttccatcttgctgagactgttctccaggattgtaacagctaggctgagcaaagcgtgccccctgaacccaaggcaaagaggctttatcagagcggcgggatgctctgaaaacttaaaactcctgcaaactataatttggtcggccaaaagagaacacagaccactgggtgttgtattcgtggacatcgccaaggcttttgacaccgtaagccaccagcacatcattcatgctttgcagcaaagaggcgtggatccccacatcgtcggtctggtgagcaatatgtacgagaacatcagtacgtatatcaccacaaagaggaacacacacacagacaaaatccagatccgggttggagtaaagcagggtgacccgatgtcgccccttttatttaacctggcaatggaccctctattatgcaagctggaagagagtggcaaaggataccaccgaggacagagcagcatcacagcgatggcatttgcagacgatctggttttgctgagcgactcctgggaaaatatgaatacaaatattagcatactggagaccttctgcaatctgaccggactcaaaacacaggggcaaaagtgccacggcttttacatcaagccgacaaagaagtcttacaccatcaatgactgcgctgcctggactatcaacggcacacccctgaacatgatcgaccccggcgaatctgagaaatacctcggcctgcagtttgacccgtggattggaatagcaaggtccggtctctccacaaaactagatttttggcttcagcggatcgatcaagcaccacttaaacctctgcagaaaactgatattctcaaaacatacaccatccctcggctgatctacatagctgaccactcagaagtgaaaagcgcactactcgaaacccttgaccagaagatccggacagcggtcaaggaatggcttcacctacctccgtgcacctgcgatgccatcctgtactcgagcacgagagacggcggtttgggcatcaccaaattggcaggactgatccccagcgtgcaggcccgtagactgcatcggatcgcacagtcatctgacgatacgatgaaatgcttcatggaaaaagagaaaatggaacagctgcataagaaattgtggattcaagctggaggggacagagagaacataccctcgatttgggaagcaccaccgtcgagtgaaccaccaaacaacgtgagcacaaattcggaatgggaagcaccgacccagaaagataaatttccaaagccttgcaattggaggaaaaacgaattcaaaaaatggaccaaattggcatcccaaggccgcggaattgtaaattttgaaagagacaaaattagtaaccattggatccaatactacagacgcatacctcacaggaaactcctcactgcactacaactcagggccaacgtttaccccacgagagaatttctagccaggggtagacaagaccaatacatcaaggcgtgtaggcactgcgatgcggacaacgaatcctgcgcccacatcatcggcaactgcccagtgacacaggacgcccgaatcaagaggcacaattacatctgcgaactgcttctcgaggaggcgaagaagaaggactgggtagtgttcaaggaaccgcacataagggattccaacaaggaactgtacaaacctgacctgatatttgtgaaggatgggcgtgcacttgtcgtggatgtgacagtacggtatgaagcagccaaatcatcgctggaggaagccgctgcagagaaagtgagaaagtacaaacacctggaaacggaagtaagacatctcacgaatgcaaaggacgttacttttgtgggctttcccctaggagcgcgggggaaatggcaccaagataactttaaacttttgactgagcttggcctctccaaatcgaggcaagtgaaaatggcagagactttttccacagtagcgctcttttcatctgtggacattgtacatatgtttgccagtagggccagaaaatctatggttatgtgataataggctgccttctgcggggcttgccttctggccatgcccttcttctctcccttgcacctgtacctcttggtctttgaataaagcctgagtaggaaggaccggtaaaaaaaaaaaaaaaaaaaaaaaaaaaaaaacgttgactaaaaaaaaaaaaaaaaaaaaaaaaaaaaaaaaaaaaaaaaaaaaaaaaaaaaaaaaaaaaaaaaaaaaaa

SEQ ID NO: 10909 - DNA, 5264 bp, synthetic construct
  source 1..5264: mol_type = other DNA
gaaataagagagaaaagaagagtaagaagaaatataagagaattcgccaccatggcccctaagaaaaagcggaaggtgaatatcagcggctctagctgcggcagccccaacagcgccgacaccagcagcgacttcaaggacctgtggaccaagctgaaggaatgccacgaccgggaagtgcagggactccaggtgaaggtcaccaaactcaagcaagaaagaatcctggacgcccagagactggaagaattcttcaccaagaaccagcagctgagagagcagcagaaagtgctgcacgagacaatcaaggttctggaagatagactgcgggccggcctgtgcgacagatgcgccgtgaccgaggaacacatgcgcaaaaagcagcaggagttcgagaacattagacagcaaaatctgaaattgatcacagagctgatgaacgagagaaacacactgcaggaggagaacaagaagctgagcgagcagctgcaacagaagatcgagaatgatcagcaacaccaggccgctgagctggaatgtgaagaggacgtgatccccgacagcccaatcacagctttcagcttttctggcgtgaacagactgaggcggaaggaaaacccccacgtgcggtacatcgagcagacccataccaagctggaacacagcgtgtgtgccaacgagatgagaaaggtgtccaagtcctccacccatccccagcacaaccctaacgaaaatgagatcctggtggctgatacctacgaccagtctcagagccctatggccaaggcccacggcaccagctcttatacccctgataagagctccttcaacctggccaccgtggtggccgagacactgggcctgggcgtgcaggaggaaagcgagacacagggcccaatgagccctctgggagatgagctgtaccactgcctggaaggcaaccacaagaaacagccttttgagtccggctccgagactcctggaacaagcgagagcgctacacctgagggcagccctaagagaaaggtgtccagcgccgagggcgctgccaaggaagagcctaaacggagaagcgccagactgagcgccaagccccccgccaaggtggaagccaagcctaagaaggccgccgctaaggacaagagcagcgataagaaagtccagaccaagggcaagcggggcgccaaaggcaaacaggccgaggtggccaaccaggagacaaaggaagatctgcctgctgagaacggcgaaaccaagaccgaggaatctccagcttctgacgaggccggagagaaggaggccaaaagcgacagcggctctgagacacctggaacaagcgagagcgccaccccggaatcctatgaacaacttgcaccacaaccgtgtgtgggagaaactttacattctagcctcccacgagacagtgaactgtttgtgcctgaagaggggagcagcgagaaggagagcgaggacgcgccaaaaacatctcctccgacgcctgggaaacatggtttggaacagactggggaggaaaaagtgatggtgactgttcctgacaaaaatccaccttgtccttgctgtggtacccgggtaaactctgtgttgaatctgattgaacatctgaaagtgtcacacgggaaaaggggggtttgttttcggtgtgcaaaatgtggaaaggaaaatagtaactatcacagtgttgtttgtcattttaagaaatgcaggggtccagagacggagaaagccccagctggggagtggatttgtgaggtatgcaacagagattttacaaccaaaattggcctgggacaacacaagagattggcacacccagcagtgagaaatcaggaaaggatcgttgcttcccaaccgaaagaaacatcaaatagaggtgctcacaaaaggtgctggacaaaggaggaggaagaattactaataagactggaggctcagttcgagggaaacaaaaatattaataagcttattgcagaacacataaccaccaaaacagctaagcagatcagtgacaaaaggcgattgctgtccagaaagccagcagaggagccacgtgaggagcctggaacgtgtcatcacaccaggagagcagctgcgagcctgagaacggagcctgagatgagtcatcacgcccaggcagaggacagagataatggacctgggagacgccctctgccaggcagggcagctgccggagggagaacaatggacgagataagacgccaccctgataagggcaacggacagcagagacccaccaagcaaaaatcagaagaacagctgcaggcttactataaaaagacactagaggaacgactttcagctggggcacttaacaccttcccccgagcattcaagcaggtaatggaaggccgggatataaagctagtaatcaatcagacagcgcaggactgcttcggatgcctggaatccataagccaaataagaacggcaacccgagataaaaaggacacggtgacccgggagaaacacccaaagaaaccttttcagaagtggatgaagaagagagcaatcaaaaaaggtaattatcttcggttccagcgtttattttatcttgatagagggaaactggctaaaatcattttagatgatattgaatgcttgtcttgtgacataccactcagtgaaatttattcggtttttaaaacaagatgggaaacaactggtagctttaaaagccttggggactttaaaacttacgggaaggctgacaacactgccttcagagaattaattacggctaaagaaattgagaaaaatgtgcaggaaatgagcaaaggctcggctcccggtccagacgggattactcttggggacgtcgtaaagatggatcccgagttttcccggaccatggagattttcaatttatggttaacaactggtaaaatcccggacatggtgagggggtgcagaaccgttttgattccaaaatcatcaaagccggatcgtttgaaagacattaataactggagacctatcacgatcggttccatcttgctgagactgttctccaggattgtaacagctaggctgagcaaagcgtgccccctgaacccaaggcaaagaggctttatcagagcggcgggatgctctgaaaacttaaaactcctgcaaactataatttggtcggccaaaagagaacacagaccactgggtgttgtattcgtggacatcgccaaggcttttgacaccgtaagccaccagcacatcattcatgctttgcagcaaagagaggtggatccccacatcgtcggtctggtgagcaatatgctggagaacatcagtacgtatatcaccacaaagaggaacacacacacagacaaaatccagatccgggttggagtaaagcagggtgacccgatgtcgccccttttatttaacctggcaatggaccctctattatgcaagctggaagagagtggcaaaggataccaccgaggacagagcagcatcacagcgatggcatttgcagacgatctggttttgctgagcgactcctgggaaaatatgaatacaaatattagcatactggagaccttctgcaatctgaccggactcaaaacacaggggcaaaagtgccacggcttttacatcaagccgacaaagaagtcttacaccatcaatgactgcgctgcctggactatcaacggcacacccctgaacatgatcgaccccggcgaatctgagaaatacctcggcctgcagtttgacccgtggattggaatagcaaggtccggtctctccacaaaactagatttttggcttcagcggatcgatcaagcaccacttaaacctctgcagaaaactgatattctcaaaacatacaccatccctcggctgatctacatagctgaccactcagaagtgaaaagcgcactactcgaaacccttgaccagaagatccggacagcggtcaaggaatggcttcacctacctccgtgcacctgcgatgccatcctgtactcgagcacgagagacggcggtttgggcatcaccaaattggcaggactgatccccagcgtgcaggcccgtagactgcatcggatcgcacagtcatctgacgatacgatgaaatgcttcatggaaaaagagaaaatggaacagctgcataagaaattgtggattcaagctggaggggacagagagaacataccctcgatttgggaagcaccaccgtcgagtgaaccaccaaacaacgtgagcacaaattcggaatgggaagcaccgacccagaaagataaatttccaaagccttgcaattggaggaaaaacgaattcaaaaaatggaccaaattggcatcccaaggccgcggaattgtaaattttgaaagagacaaaattagtaaccattggatccaatactacagacgcatacctcacaggaaactcctcactgcactacaactcagggccaacgtttaccccacgagagaatttctagccaggggtagacaagaccaatacatcaaggcgtgtaggcactgcgatgcggacaacgaatcctgcgcccacatcatcggcaactgcccagtgacacaggacgcccgaatcaagaggcacaattacatctgcgaactgcttctcgaggaggcgaagaagaaggactgggtagtgttcaaggaaccgcacataagggattccaacaaggaactgtacaaacctgacctgatatttgtgaaggatgggcgtgcacttgtcgtggatgtgacagtacggtatgaagcagccaaatcatcgctggaggaagccgctgcagagaaagtgagaaagtacaaacacctggaaacggaagtaagacatctcacgaatgcaaaggacgttacttttgtgggctttcccctaggagcgcgggggaaatggcaccaagataactttaaacttttgactgagcttggcctctccaaatcgaggcaagtgaaaatggcagagactttttccacagtagcgctcttttcatctgtggacattgtacatatgtttgccagtagggccagaaaatctatggttatgtgataataggctgccttctgcggggcttgccttctggccatgcccttcttctctcccttgcacctgtacctcttggtctttgaataaagcctgagtaggaaggaccggtaaaaaaaaaaaaaaaaaaaaaaaaaaaaaaacgttgactaaaaaaaaaaaaaaaaaaaaaaaaaaaaaaaaaaaaaaaaaaaaaaaaaaaaaaaaaaaaaaaaaaaaaa

SEQ ID NO: 10910 - DNA, 5264 bp, synthetic construct
  source 1..5264: mol_type = other DNA
gaaataagagagaaaagaagagtaagaagaaatataagagaattcgccaccatggcccctaagaaaaagcggaaggtgaatatcagcggctctagctgcggcagccccaacagcgccgacaccagcagcgacttcaaggacctgtggaccaagctgaaggaatgccacgaccgggaagtgcagggactccaggtgaaggtcaccaaactcaagcaagaaagaatcctggacgcccagagactggaagaattcttcaccaagaaccagcagctgagagagcagcagaaagtgctgcacgagacaatcaaggttctggaagatagactgcgggccggcctgtgcgacagatgcgccgtgaccgaggaacacatgcgcaaaaagcagcaggagttcgagaacattagacagcaaaatctgaaattgatcacagagctgatgaacgagagaaacacactgcaggaggagaacaagaagctgagcgagcagctgcaacagaagatcgagaatgatcagcaacaccaggccgctgagctggaatgtgaagaggacgtgatccccgacagcccaatcacagctttcagcttttctggcgtgaacagactgaggcggaaggaaaacccccacgtgcggtacatcgagcagacccataccaagctggaacacagcgtgtgtgccaacgagatgagaaaggtgtccaagtcctccacccatccccagcacaaccctaacgaaaatgagatcctggtggctgatacctacgaccagtctcagagccctatggccaaggcccacggcaccagctcttatacccctgataagagctccttcaacctggccaccgtggtggccgagacactgggcctgggcgtgcaggaggaaagcgagacacagggcccaatgagccctctgggagatgagctgtaccactgcctggaaggcaaccacaagaaacagccttttgagtccggctccgagactcctggaacaagcgagagcgctacacctgagggcagccctaagagaaaggtgtccagcgccgagggcgctgccaaggaagagcctaaacggagaagcgccagactgagcgccaagccccccgccaaggtggaagccaagcctaagaaggccgccgctaaggacaagagcagcgataagaaagtccagaccaagggcaagcggggcgccaaaggcaaacaggccgaggtggccaaccaggagacaaaggaagatctgcctgctgagaacggcgaaaccaagaccgaggaatctccagcttctgacgaggccggagagaaggaggccaaaagcgacagcggctctgagacacctggaacaagcgagagcgccaccccggaatcctatgaacaacttgcaccacaaccgtgtgtgggagaaactttacattctagcctcccacgagacagtgaactgtttgtgcctgaagaggggagcagcgagaaggagagcgaggacgcgccaaaaacatctcctccgacgcctgggaaacatggtttggaacagactggggaggaaaaagtgatggtgactgttcctgacaaaaatccaccttgtccttgctgtggtacccgggtaaactctgtgttgaatctgattgaacatctgaaagtgtcacacgggaaaaggggggtttgttttcggtgtgcaaaatgtggaaaggaaaatagtaactatcacagtgttgtttgtcattttaagaaatgcaggggtccagagacggagaaagccccagctggggagtggatttgtgaggtatgcaacagagattttacaaccaaaattggcctgggacaacacaagagattggcacacccagcagtgagaaatcaggaaaggatcgttgcttcccaaccgaaagaaacatcaaatagaggtgctcacaaaaggtgctggacaaaggaggaggaagaattactaataagactggaggctcagttcgagggaaacaaaaatattaataagcttattgcagaacacataaccaccaaaacagctaagcagatcagtgacaaaaggcgattgctgtccagaaagccagcagaggagccacgtgaggagcctggaacgtgtcatcacaccaggagagcagctgcgagcctgagaacggagcctgagatgagtcatcacgcccaggcagaggacagagataatggacctgggagacgccctctgccaggcagggcagctgccggagggagaacaatggacgagataagacgccaccctgataagggcaacggacagcagagacccaccaagcaaaaatcagaagaacagctgcaggcttactataaaaagacactagaggaacgactttcagctggggcacttaacaccttcccccgagcattcaagcaggtaatggaaggccgggatataaagctagtaatcaatcagacagcgcaggactgcttcggatgcctggaatccataagccaaataagaacggcaacccgagataaaaaggacacggtgacccgggagaaacacccaaagaaaccttttcagaagtggatgaagaagagagcaatcaaaaaaggtaattatcttcggttccagcgtttattttatcttgatagagggaaactggctaaaatcattttagatgatattgaatgcttgtcttgtgacataccactcagtgaaatttattcggtttttaaaacaagatgggaaacaactggtagctttaaaagccttggggactttaaaacttacgggaaggctgacaacactgccttcagagaattaattacggctaaagaaattgagaaaaatgtgcaggaaatgagcaaaggctcggctcccggtccagacgggattactcttggggacgtcgtaaagatggatcccgagttttcccggaccatggagattttcaatttatggttaacaactggtaaaatcccggacatggtgagggggtgcagaaccgttttgattccaaaatcatcaaagccggatcgtttgaaagacattaataactggagacctatcacgatcggttccatcttgctgagactgttctccaggattgtaacagctaggctgagcaaagcgtgccccctgaacccaaggcaaagaggctttatcagagcggcgggatgctctgaaaacttaaaactcctgcaaactataatttggtcggccaaaagagaacacagaccactgggtgttgtattcgtggacatcgccaaggcttttgacaccgtaagccaccagcacatcattcatgctttgcagcaaagagaggtggatccccacatcgtcggtctggtgagcaatatgtacgagaacatcagtacgtatatcaccacaggcaggaacacacacacagacaaaatccagatccgggttggagtaaagcagggtgacccgatgtcgccccttttatttaacctggcaatggaccctctattatgcaagctggaagagagtggcaaaggataccaccgaggacagagcagcatcacagcgatggcatttgcagacgatctggttttgctgagcgactcctgggaaaatatgaatacaaatattagcatactggagaccttctgcaatctgaccggactcaaaacacaggggcaaaagtgccacggcttttacatcaagccgacaaagaagtcttacaccatcaatgactgcgctgcctggactatcaacggcacacccctgaacatgatcgaccccggcgaatctgagaaatacctcggcctgcagtttgacccgtggattggaatagcaaggtccggtctctccacaaaactagatttttggcttcagcggatcgatcaagcaccacttaaacctctgcagaaaactgatattctcaaaacatacaccatccctcggctgatctacatagctgaccactcagaagtgaaaagcgcactactcgaaacccttgaccagaagatccggacagcggtcaaggaatggcttcacctacctccgtgcacctgcgatgccatcctgtactcgagcacgagagacggcggtttgggcatcaccaaattggcaggactgatccccagcgtgcaggcccgtagactgcatcggatcgcacagtcatctgacgatacgatgaaatgcttcatggaaaaagagaaaatggaacagctgcataagaaattgtggattcaagctggaggggacagagagaacataccctcgatttgggaagcaccaccgtcgagtgaaccaccaaacaacgtgagcacaaattcggaatgggaagcaccgacccagaaagataaatttccaaagccttgcaattggaggaaaaacgaattcaaaaaatggaccaaattggcatcccaaggccgcggaattgtaaattttgaaagagacaaaattagtaaccattggatccaatactacagacgcatacctcacaggaaactcctcactgcactacaactcagggccaacgtttaccccacgagagaatttctagccaggggtagacaagaccaatacatcaaggcgtgtaggcactgcgatgcggacaacgaatcctgcgcccacatcatcggcaactgcccagtgacacaggacgcccgaatcaagaggcacaattacatctgcgaactgcttctcgaggaggcgaagaagaaggactgggtagtgttcaaggaaccgcacataagggattccaacaaggaactgtacaaacctgacctgatatttgtgaaggatgggcgtgcacttgtcgtggatgtgacagtacggtatgaagcagccaaatcatcgctggaggaagccgctgcagagaaagtgagaaagtacaaacacctggaaacggaagtaagacatctcacgaatgcaaaggacgttacttttgtgggctttcccctaggagcgcgggggaaatggcaccaagataactttaaacttttgactgagcttggcctctccaaatcgaggcaagtgaaaatggcagagactttttccacagtagcgctcttttcatctgtggacattgtacatatgtttgccagtagggccagaaaatctatggttatgtgataataggctgccttctgcggggcttgccttctggccatgcccttcttctctcccttgcacctgtacctcttggtctttgaataaagcctgagtaggaaggaccggtaaaaaaaaaaaaaaaaaaaaaaaaaaaaaaacgttgactaaaaaaaaaaaaaaaaaaaaaaaaaaaaaaaaaaaaaaaaaaaaaaaaaaaaaaaaaaaaaaaaaaaaaa

SEQ ID NO: 10911 - DNA, 5264 bp, synthetic construct
  source 1..5264: mol_type = other DNA
gaaataagagagaaaagaagagtaagaagaaatataagagaattcgccaccatggcccctaagaaaaagcggaaggtgaatatcagcggctctagctgcggcagccccaacagcgccgacaccagcagcgacttcaaggacctgtggaccaagctgaaggaatgccacgaccgggaagtgcagggactccaggtgaaggtcaccaaactcaagcaagaaagaatcctggacgcccagagactggaagaattcttcaccaagaaccagcagctgagagagcagcagaaagtgctgcacgagacaatcaaggttctggaagatagactgcgggccggcctgtgcgacagatgcgccgtgaccgaggaacacatgcgcaaaaagcagcaggagttcgagaacattagacagcaaaatctgaaattgatcacagagctgatgaacgagagaaacacactgcaggaggagaacaagaagctgagcgagcagctgcaacagaagatcgagaatgatcagcaacaccaggccgctgagctggaatgtgaagaggacgtgatccccgacagcccaatcacagctttcagcttttctggcgtgaacagactgaggcggaaggaaaacccccacgtgcggtacatcgagcagacccataccaagctggaacacagcgtgtgtgccaacgagatgagaaaggtgtccaagtcctccacccatccccagcacaaccctaacgaaaatgagatcctggtggctgatacctacgaccagtctcagagccctatggccaaggcccacggcaccagctcttatacccctgataagagctccttcaacctggccaccgtggtggccgagacactgggcctgggcgtgcaggaggaaagcgagacacagggcccaatgagccctctgggagatgagctgtaccactgcctggaaggcaaccacaagaaacagccttttgagtccggctccgagactcctggaacaagcgagagcgctacacctgagggcagccctaagagaaaggtgtccagcgccgagggcgctgccaaggaagagcctaaacggagaagcgccagactgagcgccaagccccccgccaaggtggaagccaagcctaagaaggccgccgctaaggacaagagcagcgataagaaagtccagaccaagggcaagcggggcgccaaaggcaaacaggccgaggtggccaaccaggagacaaaggaagatctgcctgctgagaacggcgaaaccaagaccgaggaatctccagcttctgacgaggccggagagaaggaggccaaaagcgacagcggctctgagacacctggaacaagcgagagcgccaccccggaatcctatgaacaacttgcaccacaaccgtgtgtgggagaaactttacattctagcctcccacgagacagtgaactgtttgtgcctgaagaggggagcagcgagaaggagagcgaggacgcgccaaaaacatctcctccgacgcctgggaaacatggtttggaacagactggggaggaaaaagtgatggtgactgttcctgacaaaaatccaccttgtccttgctgtggtacccgggtaaactctgtgttgaatctgattgaacatctgaaagtgtcacacgggaaaaggggggtttgttttcggtgtgcaaaatgtggaaaggaaaatagtaactatcacagtgttgtttgtcattttaagaaatgcaggggtccagagacggagaaagccccagctggggagtggatttgtgaggtatgcaacagagattttacaaccaaaattggcctgggacaacacaagagattggcacacccagcagtgagaaatcaggaaaggatcgttgcttcccaaccgaaagaaacatcaaatagaggtgctcacaaaaggtgctggacaaaggaggaggaagaattactaataagactggaggctcagttcgagggaaacaaaaatattaataagcttattgcagaacacataaccaccaaaacagctaagcagatcagtgacaaaaggcgattgctgtccagaaagccagcagaggagccacgtgaggagcctggaacgtgtcatcacaccaggagagcagctgcgagcctgagaacggagcctgagatgagtcatcacgcccaggcagaggacagagataatggacctgggagacgccctctgccaggcagggcagctgccggagggagaacaatggacgagataagacgccaccctgataagggcaacggacagcagagacccaccaagcaaaaatcagaagaacagctgcaggcttactataaaaagacactagaggaacgactttcagctggggcacttaacaccttcccccgagcattcaagcaggtaatggaaggccgggatataaagctagtaatcaatcagacagcgcaggactgcttcggatgcctggaatccataagccaaataagaacggcaacccgagataaaaaggacacggtgacccgggagaaacacccaaagaaaccttttcagaagtggatgaagaagagagcaatcaaaaaaggtaattatcttcggttccagcgtttattttatcttgatagagggaaactggctaaaatcattttagatgatattgaatgcttgtcttgtgacataccactcagtgaaatttattcggtttttaaaacaagatgggaaacaactggtagctttaaaagccttggggactttaaaacttacgggaaggctgacaacactgccttcagagaattaattacggctaaagaaattgagaaaaatgtgcaggaaatgagcaaaggctcggctcccggtccagacgggattactcttggggacgtcgtaaagatggatcccgagttttcccggaccatggagattttcaatttatggttaacaactggtaaaatcccggacatggtgagggggtgcagaaccgttttgattccaaaatcatcaaagccggatcgtttgaaagacattaataactggagacctatcacgatcggttccatcttgctgagactgttctccaggattgtaacagctaggctgagcaaagcgtgccccctgaacccaaggcaaagaggctttatcagagcggcgggatgctctgaaaacttaaaactcctgcaaactataatttggtcggccaaaagagaacacagaccactgggtgttgtattcgtggacatcgccaaggcttttgacaccgtaagccaccagcacatcattcatgctttgcagcaaagagaggtggatccccacatcgtcggtctggtgagcaatatgtacgagaacatcagtacgtatatcaccacaagaaggaacacacacacagacaaaatccagatccgggttggagtaaagcagggtgacccgatgtcgccccttttatttaacctggcaatggaccctctattatgcaagctggaagagagtggcaaaggataccaccgaggacagagcagcatcacagcgatggcatttgcagacgatctggttttgctgagcgactcctgggaaaatatgaatacaaatattagcatactggagaccttctgcaatctgaccggactcaaaacacaggggcaaaagtgccacggcttttacatcaagccgacaaagaagtcttacaccatcaatgactgcgctgcctggactatcaacggcacacccctgaacatgatcgaccccggcgaatctgagaaatacctcggcctgcagtttgacccgtggattggaatagcaaggtccggtctctccacaaaactagatttttggcttcagcggatcgatcaagcaccacttaaacctctgcagaaaactgatattctcaaaacatacaccatccctcggctgatctacatagctgaccactcagaagtgaaaagcgcactactcgaaacccttgaccagaagatccggacagcggtcaaggaatggcttcacctacctccgtgcacctgcgatgccatcctgtactcgagcacgagagacggcggtttgggcatcaccaaattggcaggactgatccccagcgtgcaggcccgtagactgcatcggatcgcacagtcatctgacgatacgatgaaatgcttcatggaaaaagagaaaatggaacagctgcataagaaattgtggattcaagctggaggggacagagagaacataccctcgatttgggaagcaccaccgtcgagtgaaccaccaaacaacgtgagcacaaattcggaatgggaagcaccgacccagaaagataaatttccaaagccttgcaattggaggaaaaacgaattcaaaaaatggaccaaattggcatcccaaggccgcggaattgtaaattttgaaagagacaaaattagtaaccattggatccaatactacagacgcatacctcacaggaaactcctcactgcactacaactcagggccaacgtttaccccacgagagaatttctagccaggggtagacaagaccaatacatcaaggcgtgtaggcactgcgatgcggacaacgaatcctgcgcccacatcatcggcaactgcccagtgacacaggacgcccgaatcaagaggcacaattacatctgcgaactgcttctcgaggaggcgaagaagaaggactgggtagtgttcaaggaaccgcacataagggattccaacaaggaactgtacaaacctgacctgatatttgtgaaggatgggcgtgcacttgtcgtggatgtgacagtacggtatgaagcagccaaatcatcgctggaggaagccgctgcagagaaagtgagaaagtacaaacacctggaaacggaagtaagacatctcacgaatgcaaaggacgttacttttgtgggctttcccctaggagcgcgggggaaatggcaccaagataactttaaacttttgactgagcttggcctctccaaatcgaggcaagtgaaaatggcagagactttttccacagtagcgctcttttcatctgtggacattgtacatatgtttgccagtagggccagaaaatctatggttatgtgataataggctgccttctgcggggcttgccttctggccatgcccttcttctctcccttgcacctgtacctcttggtctttgaataaagcctgagtaggaaggaccggtaaaaaaaaaaaaaaaaaaaaaaaaaaaaaaacgttgactaaaaaaaaaaaaaaaaaaaaaaaaaaaaaaaaaaaaaaaaaaaaaaaaaaaaaaaaaaaaaaaaaaaaaa

SEQ ID NO: 10912 - DNA, 5264 bp, synthetic construct
  source 1..5264: mol_type = other DNA
gaaataagagagaaaagaagagtaagaagaaatataagagaattcgccaccatggcccctaagaaaaagcggaaggtgaatatcagcggctctagctgcggcagccccaacagcgccgacaccagcagcgacttcaaggacctgtggaccaagctgaaggaatgccacgaccgggaagtgcagggactccaggtgaaggtcaccaaactcaagcaagaaagaatcctggacgcccagagactggaagaattcttcaccaagaaccagcagctgagagagcagcagaaagtgctgcacgagacaatcaaggttctggaagatagactgcgggccggcctgtgcgacagatgcgccgtgaccgaggaacacatgcgcaaaaagcagcaggagttcgagaacattagacagcaaaatctgaaattgatcacagagctgatgaacgagagaaacacactgcaggaggagaacaagaagctgagcgagcagctgcaacagaagatcgagaatgatcagcaacaccaggccgctgagctggaatgtgaagaggacgtgatccccgacagcccaatcacagctttcagcttttctggcgtgaacagactgaggcggaaggaaaacccccacgtgcggtacatcgagcagacccataccaagctggaacacagcgtgtgtgccaacgagatgagaaaggtgtccaagtcctccacccatccccagcacaaccctaacgaaaatgagatcctggtggctgatacctacgaccagtctcagagccctatggccaaggcccacggcaccagctcttatacccctgataagagctccttcaacctggccaccgtggtggccgagacactgggcctgggcgtgcaggaggaaagcgagacacagggcccaatgagccctctgggagatgagctgtaccactgcctggaaggcaaccacaagaaacagccttttgagtccggctccgagactcctggaacaagcgagagcgctacacctgagggcagccctaagagaaaggtgtccagcgccgagggcgctgccaaggaagagcctaaacggagaagcgccagactgagcgccaagccccccgccaaggtggaagccaagcctaagaaggccgccgctaaggacaagagcagcgataagaaagtccagaccaagggcaagcggggcgccaaaggcaaacaggccgaggtggccaaccaggagacaaaggaagatctgcctgctgagaacggcgaaaccaagaccgaggaatctccagcttctgacgaggccggagagaaggaggccaaaagcgacagcggctctgagacacctggaacaagcgagagcgccaccccggaatcctatgaacaacttgcaccacaaccgtgtgtgggagaaactttacattctagcctcccacgagacagtgaactgtttgtgcctgaagaggggagcagcgagaaggagagcgaggacgcgccaaaaacatctcctccgacgcctgggaaacatggtttggaacagactggggaggaaaaagtgatggtgactgttcctgacaaaaatccaccttgtccttgctgtggtacccgggtaaactctgtgttgaatctgattgaacatctgaaagtgtcacacgggaaaaggggggtttgttttcggtgtgcaaaatgtggaaaggaaaatagtaactatcacagtgttgtttgtcattttaagaaatgcaggggtccagagacggagaaagccccagctggggagtggatttgtgaggtatgcaacagagattttacaaccaaaattggcctgggacaacacaagagattggcacacccagcagtgagaaatcaggaaaggatcgttgcttcccaaccgaaagaaacatcaaatagaggtgctcacaaaaggtgctggacaaaggaggaggaagaattactaataagactggaggctcagttcgagggaaacaaaaatattaataagcttattgcagaacacataaccaccaaaacagctaagcagatcagtgacaaaaggcgattgctgtccagaaagccagcagaggagccacgtgaggagcctggaacgtgtcatcacaccaggagagcagctgcgagcctgagaacggagcctgagatgagtcatcacgcccaggcagaggacagagataatggacctgggagacgccctctgccaggcagggcagctgccggagggagaacaatggacgagataagacgccaccctgataagggcaacggacagcagagacccaccaagcaaaaatcagaagaacagctgcaggcttactataaaaagacactagaggaacgactttcagctggggcacttaacaccttcccccgagcattcaagcaggtaatggaaggccgggatataaagctagtaatcaatcagacagcgcaggactgcttcggatgcctggaatccataagccaaataagaacggcaacccgagataaaaaggacacggtgacccgggagaaacacccaaagaaaccttttcagaagtggatgaagaagagagcaatcaaaaaaggtaattatcttcggttccagcgtttattttatcttgatagagggaaactggctaaaatcattttagatgatattgaatgcttgtcttgtgacataccactcagtgaaatttattcggtttttaaaacaagatgggaaacaactggtagctttaaaagccttggggactttaaaacttacgggaaggctgacaacactgccttcagagaattaattacggctaaagaaattgagaaaaatgtgcaggaaatgagcaaaggctcggctcccggtccagacgggattactcttggggacgtcgtaaagatggatcccgagttttcccggaccatggagattttcaatttatggttaacaactggtaaaatcccggacatggtgagggggtgcagaaccgttttgattccaaaatcatcaaagccggatcgtttgaaagacattaataactggagacctatcacgatcggttccatcttgctgagactgttctccaggattgtaacagctaggctgagcaaagcgtgccccctgaacccaaggcaaagaggctttatcagagcggcgggatgctctgaaaacttaaaactcctgcaaactataatttggtcggccaaaagagaacacagaccactgggtgttgtattcgtggacatcgccaaggcttttgacaccgtaagccaccagcacatcattcatgctttgcagcaaagagaggtggatccccacatcgtcggtctggtgagcaatatgtacgagaacatcagtacgtatatcaccacaaagaggaacacacacacagacaaaatccagatccgggttggaatcaagcagggtgacccgatgtcgccccttttatttaacctggcaatggaccctctattatgcaagctggaagagagtggcaaaggataccaccgaggacagagcagcatcacagcgatggcatttgcagacgatctggttttgctgagcgactcctgggaaaatatgaatacaaatattagcatactggagaccttctgcaatctgaccggactcaaaacacaggggcaaaagtgccacggcttttacatcaagccgacaaagaagtcttacaccatcaatgactgcgctgcctggactatcaacggcacacccctgaacatgatcgaccccggcgaatctgagaaatacctcggcctgcagtttgacccgtggattggaatagcaaggtccggtctctccacaaaactagatttttggcttcagcggatcgatcaagcaccacttaaacctctgcagaaaactgatattctcaaaacatacaccatccctcggctgatctacatagctgaccactcagaagtgaaaagcgcactactcgaaacccttgaccagaagatccggacagcggtcaaggaatggcttcacctacctccgtgcacctgcgatgccatcctgtactcgagcacgagagacggcggtttgggcatcaccaaattggcaggactgatccccagcgtgcaggcccgtagactgcatcggatcgcacagtcatctgacgatacgatgaaatgcttcatggaaaaagagaaaatggaacagctgcataagaaattgtggattcaagctggaggggacagagagaacataccctcgatttgggaagcaccaccgtcgagtgaaccaccaaacaacgtgagcacaaattcggaatgggaagcaccgacccagaaagataaatttccaaagccttgcaattggaggaaaaacgaattcaaaaaatggaccaaattggcatcccaaggccgcggaattgtaaattttgaaagagacaaaattagtaaccattggatccaatactacagacgcatacctcacaggaaactcctcactgcactacaactcagggccaacgtttaccccacgagagaatttctagccaggggtagacaagaccaatacatcaaggcgtgtaggcactgcgatgcggacaacgaatcctgcgcccacatcatcggcaactgcccagtgacacaggacgcccgaatcaagaggcacaattacatctgcgaactgcttctcgaggaggcgaagaagaaggactgggtagtgttcaaggaaccgcacataagggattccaacaaggaactgtacaaacctgacctgatatttgtgaaggatgggcgtgcacttgtcgtggatgtgacagtacggtatgaagcagccaaatcatcgctggaggaagccgctgcagagaaagtgagaaagtacaaacacctggaaacggaagtaagacatctcacgaatgcaaaggacgttacttttgtgggctttcccctaggagcgcgggggaaatggcaccaagataactttaaacttttgactgagcttggcctctccaaatcgaggcaagtgaaaatggcagagactttttccacagtagcgctcttttcatctgtggacattgtacatatgtttgccagtagggccagaaaatctatggttatgtgataataggctgccttctgcggggcttgccttctggccatgcccttcttctctcccttgcacctgtacctcttggtctttgaataaagcctgagtaggaaggaccggtaaaaaaaaaaaaaaaaaaaaaaaaaaaaaaacgttgactaaaaaaaaaaaaaaaaaaaaaaaaaaaaaaaaaaaaaaaaaaaaaaaaaaaaaaaaaaaaaaaaaaaaaa

SEQ ID NO: 10913 - DNA, 5264 bp, synthetic construct
  source 1..5264: mol_type = other DNA
gaaataagagagaaaagaagagtaagaagaaatataagagaattcgccaccatggcccctaagaaaaagcggaaggtgaatatcagcggctctagctgcggcagccccaacagcgccgacaccagcagcgacttcaaggacctgtggaccaagctgaaggaatgccacgaccgggaagtgcagggactccaggtgaaggtcaccaaactcaagcaagaaagaatcctggacgcccagagactggaagaattcttcaccaagaaccagcagctgagagagcagcagaaagtgctgcacgagacaatcaaggttctggaagatagactgcgggccggcctgtgcgacagatgcgccgtgaccgaggaacacatgcgcaaaaagcagcaggagttcgagaacattagacagcaaaatctgaaattgatcacagagctgatgaacgagagaaacacactgcaggaggagaacaagaagctgagcgagcagctgcaacagaagatcgagaatgatcagcaacaccaggccgctgagctggaatgtgaagaggacgtgatccccgacagcccaatcacagctttcagcttttctggcgtgaacagactgaggcggaaggaaaacccccacgtgcggtacatcgagcagacccataccaagctggaacacagcgtgtgtgccaacgagatgagaaaggtgtccaagtcctccacccatccccagcacaaccctaacgaaaatgagatcctggtggctgatacctacgaccagtctcagagccctatggccaaggcccacggcaccagctcttatacccctgataagagctccttcaacctggccaccgtggtggccgagacactgggcctgggcgtgcaggaggaaagcgagacacagggcccaatgagccctctgggagatgagctgtaccactgcctggaaggcaaccacaagaaacagccttttgagtccggctccgagactcctggaacaagcgagagcgctacacctgagggcagccctaagagaaaggtgtccagcgccgagggcgctgccaaggaagagcctaaacggagaagcgccagactgagcgccaagccccccgccaaggtggaagccaagcctaagaaggccgccgctaaggacaagagcagcgataagaaagtccagaccaagggcaagcggggcgccaaaggcaaacaggccgaggtggccaaccaggagacaaaggaagatctgcctgctgagaacggcgaaaccaagaccgaggaatctccagcttctgacgaggccggagagaaggaggccaaaagcgacagcggctctgagacacctggaacaagcgagagcgccaccccggaatcctatgaacaacttgcaccacaaccgtgtgtgggagaaactttacattctagcctcccacgagacagtgaactgtttgtgcctgaagaggggagcagcgagaaggagagcgaggacgcgccaaaaacatctcctccgacgcctgggaaacatggtttggaacagactggggaggaaaaagtgatggtgactgttcctgacaaaaatccaccttgtccttgctgtggtacccgggtaaactctgtgttgaatctgattgaacatctgaaagtgtcacacgggaaaaggggggtttgttttcggtgtgcaaaatgtggaaaggaaaatagtaactatcacagtgttgtttgtcattttaagaaatgcaggggtccagagacggagaaagccccagctggggagtggatttgtgaggtatgcaacagagattttacaaccaaaattggcctgggacaacacaagagattggcacacccagcagtgagaaatcaggaaaggatcgttgcttcccaaccgaaagaaacatcaaatagaggtgctcacaaaaggtgctggacaaaggaggaggaagaattactaataagactggaggctcagttcgagggaaacaaaaatattaataagcttattgcagaacacataaccaccaaaacagctaagcagatcagtgacaaaaggcgattgctgtccagaaagccagcagaggagccacgtgaggagcctggaacgtgtcatcacaccaggagagcagctgcgagcctgagaacggagcctgagatgagtcatcacgcccaggcagaggacagagataatggacctgggagacgccctctgccaggcagggcagctgccggagggagaacaatggacgagataagacgccaccctgataagggcaacggacagcagagacccaccaagcaaaaatcagaagaacagctgcaggcttactataaaaagacactagaggaacgactttcagctggggcacttaacaccttcccccgagcattcaagcaggtaatggaaggccgggatataaagctagtaatcaatcagacagcgcaggactgcttcggatgcctggaatccataagccaaataagaacggcaacccgagataaaaaggacacggtgacccgggagaaacacccaaagaaaccttttcagaagtggatgaagaagagagcaatcaaaaaaggtaattatcttcggttccagcgtttattttatcttgatagagggaaactggctaaaatcattttagatgatattgaatgcttgtcttgtgacataccactcagtgaaatttattcggtttttaaaacaagatgggaaacaactggtagctttaaaagccttggggactttaaaacttacgggaaggctgacaacactgccttcagagaattaattacggctaaagaaattgagaaaaatgtgcaggaaatgagcaaaggctcggctcccggtccagacgggattactcttggggacgtcgtaaagatggatcccgagttttcccggaccatggagattttcaatttatggttaacaactggtaaaatcccggacatggtgagggggtgcagaaccgttttgattccaaaatcatcaaagccggatcgtttgaaagacattaataactggagacctatcacgatcggttccatcttgctgagactgttctccaggattgtaacagctaggctgagcaaagcgtgccccctgaacccaaggcaaagaggctttatcagagcggcgggatgctctgaaaacttaaaactcctgcaaactataatttggtcggccaaaagagaacacagaccactgggtgttgtattcgtggacatcgccaaggcttttgacaccgtaagccaccagcacatcattcatgctttgcagcaaagagaggtggatccccacatcgtcggtctggtgagcaatatgtacgagaacatcagtacgtatatcaccacaaagaggaacacacacacagacaaaatccagatccgggttggagtaaagcagggtgacccgatgtcgcccatcttatttaacctggcaatggaccctctattatgcaagctggaagagagtggcaaaggataccaccgaggacagagcagcatcacagcgatggcatttgcagacgatctggttttgctgagcgactcctgggaaaatatgaatacaaatattagcatactggagaccttctgcaatctgaccggactcaaaacacaggggcaaaagtgccacggcttttacatcaagccgacaaagaagtcttacaccatcaatgactgcgctgcctggactatcaacggcacacccctgaacatgatcgaccccggcgaatctgagaaatacctcggcctgcagtttgacccgtggattggaatagcaaggtccggtctctccacaaaactagatttttggcttcagcggatcgatcaagcaccacttaaacctctgcagaaaactgatattctcaaaacatacaccatccctcggctgatctacatagctgaccactcagaagtgaaaagcgcactactcgaaacccttgaccagaagatccggacagcggtcaaggaatggcttcacctacctccgtgcacctgcgatgccatcctgtactcgagcacgagagacggcggtttgggcatcaccaaattggcaggactgatccccagcgtgcaggcccgtagactgcatcggatcgcacagtcatctgacgatacgatgaaatgcttcatggaaaaagagaaaatggaacagctgcataagaaattgtggattcaagctggaggggacagagagaacataccctcgatttgggaagcaccaccgtcgagtgaaccaccaaacaacgtgagcacaaattcggaatgggaagcaccgacccagaaagataaatttccaaagccttgcaattggaggaaaaacgaattcaaaaaatggaccaaattggcatcccaaggccgcggaattgtaaattttgaaagagacaaaattagtaaccattggatccaatactacagacgcatacctcacaggaaactcctcactgcactacaactcagggccaacgtttaccccacgagagaatttctagccaggggtagacaagaccaatacatcaaggcgtgtaggcactgcgatgcggacaacgaatcctgcgcccacatcatcggcaactgcccagtgacacaggacgcccgaatcaagaggcacaattacatctgcgaactgcttctcgaggaggcgaagaagaaggactgggtagtgttcaaggaaccgcacataagggattccaacaaggaactgtacaaacctgacctgatatttgtgaaggatgggcgtgcacttgtcgtggatgtgacagtacggtatgaagcagccaaatcatcgctggaggaagccgctgcagagaaagtgagaaagtacaaacacctggaaacggaagtaagacatctcacgaatgcaaaggacgttacttttgtgggctttcccctaggagcgcgggggaaatggcaccaagataactttaaacttttgactgagcttggcctctccaaatcgaggcaagtgaaaatggcagagactttttccacagtagcgctcttttcatctgtggacattgtacatatgtttgccagtagggccagaaaatctatggttatgtgataataggctgccttctgcggggcttgccttctggccatgcccttcttctctcccttgcacctgtacctcttggtctttgaataaagcctgagtaggaaggaccggtaaaaaaaaaaaaaaaaaaaaaaaaaaaaaaacgttgactaaaaaaaaaaaaaaaaaaaaaaaaaaaaaaaaaaaaaaaaaaaaaaaaaaaaaaaaaaaaaaaaaaaaaa

SEQ ID NO: 10914 - DNA, 5264 bp, synthetic construct
  source 1..5264: mol_type = other DNA
gaaataagagagaaaagaagagtaagaagaaatataagagaattcgccaccatggcccctaagaaaaagcggaaggtgaatatcagcggctctagctgcggcagccccaacagcgccgacaccagcagcgacttcaaggacctgtggaccaagctgaaggaatgccacgaccgggaagtgcagggactccaggtgaaggtcaccaaactcaagcaagaaagaatcctggacgcccagagactggaagaattcttcaccaagaaccagcagctgagagagcagcagaaagtgctgcacgagacaatcaaggttctggaagatagactgcgggccggcctgtgcgacagatgcgccgtgaccgaggaacacatgcgcaaaaagcagcaggagttcgagaacattagacagcaaaatctgaaattgatcacagagctgatgaacgagagaaacacactgcaggaggagaacaagaagctgagcgagcagctgcaacagaagatcgagaatgatcagcaacaccaggccgctgagctggaatgtgaagaggacgtgatccccgacagcccaatcacagctttcagcttttctggcgtgaacagactgaggcggaaggaaaacccccacgtgcggtacatcgagcagacccataccaagctggaacacagcgtgtgtgccaacgagatgagaaaggtgtccaagtcctccacccatccccagcacaaccctaacgaaaatgagatcctggtggctgatacctacgaccagtctcagagccctatggccaaggcccacggcaccagctcttatacccctgataagagctccttcaacctggccaccgtggtggccgagacactgggcctgggcgtgcaggaggaaagcgagacacagggcccaatgagccctctgggagatgagctgtaccactgcctggaaggcaaccacaagaaacagccttttgagtccggctccgagactcctggaacaagcgagagcgctacacctgagggcagccctaagagaaaggtgtccagcgccgagggcgctgccaaggaagagcctaaacggagaagcgccagactgagcgccaagccccccgccaaggtggaagccaagcctaagaaggccgccgctaaggacaagagcagcgataagaaagtccagaccaagggcaagcggggcgccaaaggcaaacaggccgaggtggccaaccaggagacaaaggaagatctgcctgctgagaacggcgaaaccaagaccgaggaatctccagcttctgacgaggccggagagaaggaggccaaaagcgacagcggctctgagacacctggaacaagcgagagcgccaccccggaatcctatgaacaacttgcaccacaaccgtgtgtgggagaaactttacattctagcctcccacgagacagtgaactgtttgtgcctgaagaggggagcagcgagaaggagagcgaggacgcgccaaaaacatctcctccgacgcctgggaaacatggtttggaacagactggggaggaaaaagtgatggtgactgttcctgacaaaaatccaccttgtccttgctgtggtacccgggtaaactctgtgttgaatctgattgaacatctgaaagtgtcacacgggaaaaggggggtttgttttcggtgtgcaaaatgtggaaaggaaaatagtaactatcacagtgttgtttgtcattttaagaaatgcaggggtccagagacggagaaagccccagctggggagtggatttgtgaggtatgcaacagagattttacaaccaaaattggcctgggacaacacaagagattggcacacccagcagtgagaaatcaggaaaggatcgttgcttcccaaccgaaagaaacatcaaatagaggtgctcacaaaaggtgctggacaaaggaggaggaagaattactaataagactggaggctcagttcgagggaaacaaaaatattaataagcttattgcagaacacataaccaccaaaacagctaagcagatcagtgacaaaaggcgattgctgtccagaaagccagcagaggagccacgtgaggagcctggaacgtgtcatcacaccaggagagcagctgcgagcctgagaacggagcctgagatgagtcatcacgcccaggcagaggacagagataatggacctgggagacgccctctgccaggcagggcagctgccggagggagaacaatggacgagataagacgccaccctgataagggcaacggacagcagagacccaccaagcaaaaatcagaagaacagctgcaggcttactataaaaagacactagaggaacgactttcagctggggcacttaacaccttcccccgagcattcaagcaggtaatggaaggccgggatataaagctagtaatcaatcagacagcgcaggactgcttcggatgcctggaatccataagccaaataagaacggcaacccgagataaaaaggacacggtgacccgggagaaacacccaaagaaaccttttcagaagtggatgaagaagagagcaatcaaaaaaggtaattatcttcggttccagcgtttattttatcttgatagagggaaactggctaaaatcattttagatgatattgaatgcttgtcttgtgacataccactcagtgaaatttattcggtttttaaaacaagatgggaaacaactggtagctttaaaagccttggggactttaaaacttacgggaaggctgacaacactgccttcagagaattaattacggctaaagaaattgagaaaaatgtgcaggaaatgagcaaaggctcggctcccggtccagacgggattactcttggggacgtcgtaaagatggatcccgagttttcccggaccatggagattttcaatttatggttaacaactggtaaaatcccggacatggtgagggggtgcagaaccgttttgattccaaaatcatcaaagccggatcgtttgaaagacattaataactggagacctatcacgatcggttccatcttgctgagactgttctccaggattgtaacagctaggctgagcaaagcgtgccccctgaacccaaggcaaagaggctttatcagagcggcgggatgctctgaaaacttaaaactcctgcaaactataatttggtcggccaaaagagaacacagaccactgggtgttgtattcgtggacatcgccaaggcttttgacaccgtaagccaccagcacatcattcatgctttgcagcaaagagaggtggatccccacatcgtcggtctggtgagcaatatgtacgagaacatcagtacgtatatcaccacaaagaggaacacacacacagacaaaatccagatccgggttggagtaaagcagggtgacccgatgtcgccccttttatttaacctggcaatggaccctctattaagaaagctggaagagagtggcaaaggataccaccgaggacagagcagcatcacagcgatggcatttgcagacgatctggttttgctgagcgactcctgggaaaatatgaatacaaatattagcatactggagaccttctgcaatctgaccggactcaaaacacaggggcaaaagtgccacggcttttacatcaagccgacaaagaagtcttacaccatcaatgactgcgctgcctggactatcaacggcacacccctgaacatgatcgaccccggcgaatctgagaaatacctcggcctgcagtttgacccgtggattggaatagcaaggtccggtctctccacaaaactagatttttggcttcagcggatcgatcaagcaccacttaaacctctgcagaaaactgatattctcaaaacatacaccatccctcggctgatctacatagctgaccactcagaagtgaaaagcgcactactcgaaacccttgaccagaagatccggacagcggtcaaggaatggcttcacctacctccgtgcacctgcgatgccatcctgtactcgagcacgagagacggcggtttgggcatcaccaaattggcaggactgatccccagcgtgcaggcccgtagactgcatcggatcgcacagtcatctgacgatacgatgaaatgcttcatggaaaaagagaaaatggaacagctgcataagaaattgtggattcaagctggaggggacagagagaacataccctcgatttgggaagcaccaccgtcgagtgaaccaccaaacaacgtgagcacaaattcggaatgggaagcaccgacccagaaagataaatttccaaagccttgcaattggaggaaaaacgaattcaaaaaatggaccaaattggcatcccaaggccgcggaattgtaaattttgaaagagacaaaattagtaaccattggatccaatactacagacgcatacctcacaggaaactcctcactgcactacaactcagggccaacgtttaccccacgagagaatttctagccaggggtagacaagaccaatacatcaaggcgtgtaggcactgcgatgcggacaacgaatcctgcgcccacatcatcggcaactgcccagtgacacaggacgcccgaatcaagaggcacaattacatctgcgaactgcttctcgaggaggcgaagaagaaggactgggtagtgttcaaggaaccgcacataagggattccaacaaggaactgtacaaacctgacctgatatttgtgaaggatgggcgtgcacttgtcgtggatgtgacagtacggtatgaagcagccaaatcatcgctggaggaagccgctgcagagaaagtgagaaagtacaaacacctggaaacggaagtaagacatctcacgaatgcaaaggacgttacttttgtgggctttcccctaggagcgcgggggaaatggcaccaagataactttaaacttttgactgagcttggcctctccaaatcgaggcaagtgaaaatggcagagactttttccacagtagcgctcttttcatctgtggacattgtacatatgtttgccagtagggccagaaaatctatggttatgtgataataggctgccttctgcggggcttgccttctggccatgcccttcttctctcccttgcacctgtacctcttggtctttgaataaagcctgagtaggaaggaccggtaaaaaaaaaaaaaaaaaaaaaaaaaaaaaaacgttgactaaaaaaaaaaaaaaaaaaaaaaaaaaaaaaaaaaaaaaaaaaaaaaaaaaaaaaaaaaaaaaaaaaaaaa

SEQ ID NO: 10915 - DNA, 5264 bp, synthetic construct
  source 1..5264: mol_type = other DNA
gaaataagagagaaaagaagagtaagaagaaatataagagaattcgccaccatggcccctaagaaaaagcggaaggtgaatatcagcggctctagctgcggcagccccaacagcgccgacaccagcagcgacttcaaggacctgtggaccaagctgaaggaatgccacgaccgggaagtgcagggactccaggtgaaggtcaccaaactcaagcaagaaagaatcctggacgcccagagactggaagaattcttcaccaagaaccagcagctgagagagcagcagaaagtgctgcacgagacaatcaaggttctggaagatagactgcgggccggcctgtgcgacagatgcgccgtgaccgaggaacacatgcgcaaaaagcagcaggagttcgagaacattagacagcaaaatctgaaattgatcacagagctgatgaacgagagaaacacactgcaggaggagaacaagaagctgagcgagcagctgcaacagaagatcgagaatgatcagcaacaccaggccgctgagctggaatgtgaagaggacgtgatccccgacagcccaatcacagctttcagcttttctggcgtgaacagactgaggcggaaggaaaacccccacgtgcggtacatcgagcagacccataccaagctggaacacagcgtgtgtgccaacgagatgagaaaggtgtccaagtcctccacccatccccagcacaaccctaacgaaaatgagatcctggtggctgatacctacgaccagtctcagagccctatggccaaggcccacggcaccagctcttatacccctgataagagctccttcaacctggccaccgtggtggccgagacactgggcctgggcgtgcaggaggaaagcgagacacagggcccaatgagccctctgggagatgagctgtaccactgcctggaaggcaaccacaagaaacagccttttgagtccggctccgagactcctggaacaagcgagagcgctacacctgagggcagccctaagagaaaggtgtccagcgccgagggcgctgccaaggaagagcctaaacggagaagcgccagactgagcgccaagccccccgccaaggtggaagccaagcctaagaaggccgccgctaaggacaagagcagcgataagaaagtccagaccaagggcaagcggggcgccaaaggcaaacaggccgaggtggccaaccaggagacaaaggaagatctgcctgctgagaacggcgaaaccaagaccgaggaatctccagcttctgacgaggccggagagaaggaggccaaaagcgacagcggctctgagacacctggaacaagcgagagcgccaccccggaatcctatgaacaacttgcaccacaaccgtgtgtgggagaaactttacattctagcctcccacgagacagtgaactgtttgtgcctgaagaggggagcagcgagaaggagagcgaggacgcgccaaaaacatctcctccgacgcctgggaaacatggtttggaacagactggggaggaaaaagtgatggtgactgttcctgacaaaaatccaccttgtccttgctgtggtacccgggtaaactctgtgttgaatctgattgaacatctgaaagtgtcacacgggaaaaggggggtttgttttcggtgtgcaaaatgtggaaaggaaaatagtaactatcacagtgttgtttgtcattttaagaaatgcaggggtccagagacggagaaagccccagctggggagtggatttgtgaggtatgcaacagagattttacaaccaaaattggcctgggacaacacaagagattggcacacccagcagtgagaaatcaggaaaggatcgttgcttcccaaccgaaagaaacatcaaatagaggtgctcacaaaaggtgctggacaaaggaggaggaagaattactaataagactggaggctcagttcgagggaaacaaaaatattaataagcttattgcagaacacataaccaccaaaacagctaagcagatcagtgacaaaaggcgattgctgtccagaaagccagcagaggagccacgtgaggagcctggaacgtgtcatcacaccaggagagcagctgcgagcctgagaacggagcctgagatgagtcatcacgcccaggcagaggacagagataatggacctgggagacgccctctgccaggcagggcagctgccggagggagaacaatggacgagataagacgccaccctgataagggcaacggacagcagagacccaccaagcaaaaatcagaagaacagctgcaggcttactataaaaagacactagaggaacgactttcagctggggcacttaacaccttcccccgagcattcaagcaggtaatggaaggccgggatataaagctagtaatcaatcagacagcgcaggactgcttcggatgcctggaatccataagccaaataagaacggcaacccgagataaaaaggacacggtgacccgggagaaacacccaaagaaaccttttcagaagtggatgaagaagagagcaatcaaaaaaggtaattatcttcggttccagcgtttattttatcttgatagagggaaactggctaaaatcattttagatgatattgaatgcttgtcttgtgacataccactcagtgaaatttattcggtttttaaaacaagatgggaaacaactggtagctttaaaagccttggggactttaaaacttacgggaaggctgacaacactgccttcagagaattaattacggctaaagaaattgagaaaaatgtgcaggaaatgagcaaaggctcggctcccggtccagacgggattactcttggggacgtcgtaaagatggatcccgagttttcccggaccatggagattttcaatttatggttaacaactggtaaaatcccggacatggtgagggggtgcagaaccgttttgattccaaaatcatcaaagccggatcgtttgaaagacattaataactggagacctatcacgatcggttccatcttgctgagactgttctccaggattgtaacagctaggctgagcaaagcgtgccccctgaacccaaggcaaagaggctttatcagagcggcgggatgctctgaaaacttaaaactcctgcaaactataatttggtcggccaaaagagaacacagaccactgggtgttgtattcgtggacatcgccaaggcttttgacaccgtaagccaccagcacatcattcatgctttgcagcaaagagaggtggatccccacatcgtcggtctggtgagcaatatgtacgagaacatcagtacgtatatcaccacaaagaggaacacacacacagacaaaatccagatccgggttggagtaaagcagggtgacccgatgtcgccccttttatttaacctggcaatggaccctctattatgcaagctggaagagagtggcaaaggatacaagcgaggacagagcagcatcacagcgatggcatttgcagacgatctggttttgctgagcgactcctgggaaaatatgaatacaaatattagcatactggagaccttctgcaatctgaccggactcaaaacacaggggcaaaagtgccacggcttttacatcaagccgacaaagaagtcttacaccatcaatgactgcgctgcctggactatcaacggcacacccctgaacatgatcgaccccggcgaatctgagaaatacctcggcctgcagtttgacccgtggattggaatagcaaggtccggtctctccacaaaactagatttttggcttcagcggatcgatcaagcaccacttaaacctctgcagaaaactgatattctcaaaacatacaccatccctcggctgatctacatagctgaccactcagaagtgaaaagcgcactactcgaaacccttgaccagaagatccggacagcggtcaaggaatggcttcacctacctccgtgcacctgcgatgccatcctgtactcgagcacgagagacggcggtttgggcatcaccaaattggcaggactgatccccagcgtgcaggcccgtagactgcatcggatcgcacagtcatctgacgatacgatgaaatgcttcatggaaaaagagaaaatggaacagctgcataagaaattgtggattcaagctggaggggacagagagaacataccctcgatttgggaagcaccaccgtcgagtgaaccaccaaacaacgtgagcacaaattcggaatgggaagcaccgacccagaaagataaatttccaaagccttgcaattggaggaaaaacgaattcaaaaaatggaccaaattggcatcccaaggccgcggaattgtaaattttgaaagagacaaaattagtaaccattggatccaatactacagacgcatacctcacaggaaactcctcactgcactacaactcagggccaacgtttaccccacgagagaatttctagccaggggtagacaagaccaatacatcaaggcgtgtaggcactgcgatgcggacaacgaatcctgcgcccacatcatcggcaactgcccagtgacacaggacgcccgaatcaagaggcacaattacatctgcgaactgcttctcgaggaggcgaagaagaaggactgggtagtgttcaaggaaccgcacataagggattccaacaaggaactgtacaaacctgacctgatatttgtgaaggatgggcgtgcacttgtcgtggatgtgacagtacggtatgaagcagccaaatcatcgctggaggaagccgctgcagagaaagtgagaaagtacaaacacctggaaacggaagtaagacatctcacgaatgcaaaggacgttacttttgtgggctttcccctaggagcgcgggggaaatggcaccaagataactttaaacttttgactgagcttggcctctccaaatcgaggcaagtgaaaatggcagagactttttccacagtagcgctcttttcatctgtggacattgtacatatgtttgccagtagggccagaaaatctatggttatgtgataataggctgccttctgcggggcttgccttctggccatgcccttcttctctcccttgcacctgtacctcttggtctttgaataaagcctgagtaggaaggaccggtaaaaaaaaaaaaaaaaaaaaaaaaaaaaaaacgttgactaaaaaaaaaaaaaaaaaaaaaaaaaaaaaaaaaaaaaaaaaaaaaaaaaaaaaaaaaaaaaaaaaaaaaa

SEQ ID NO: 10916 - DNA, 5264 bp, synthetic construct
  source 1..5264: mol_type = other DNA
gaaataagagagaaaagaagagtaagaagaaatataagagaattcgccaccatggcccctaagaaaaagcggaaggtgaatatcagcggctctagctgcggcagccccaacagcgccgacaccagcagcgacttcaaggacctgtggaccaagctgaaggaatgccacgaccgggaagtgcagggactccaggtgaaggtcaccaaactcaagcaagaaagaatcctggacgcccagagactggaagaattcttcaccaagaaccagcagctgagagagcagcagaaagtgctgcacgagacaatcaaggttctggaagatagactgcgggccggcctgtgcgacagatgcgccgtgaccgaggaacacatgcgcaaaaagcagcaggagttcgagaacattagacagcaaaatctgaaattgatcacagagctgatgaacgagagaaacacactgcaggaggagaacaagaagctgagcgagcagctgcaacagaagatcgagaatgatcagcaacaccaggccgctgagctggaatgtgaagaggacgtgatccccgacagcccaatcacagctttcagcttttctggcgtgaacagactgaggcggaaggaaaacccccacgtgcggtacatcgagcagacccataccaagctggaacacagcgtgtgtgccaacgagatgagaaaggtgtccaagtcctccacccatccccagcacaaccctaacgaaaatgagatcctggtggctgatacctacgaccagtctcagagccctatggccaaggcccacggcaccagctcttatacccctgataagagctccttcaacctggccaccgtggtggccgagacactgggcctgggcgtgcaggaggaaagcgagacacagggcccaatgagccctctgggagatgagctgtaccactgcctggaaggcaaccacaagaaacagccttttgagtccggctccgagactcctggaacaagcgagagcgctacacctgagggcagccctaagagaaaggtgtccagcgccgagggcgctgccaaggaagagcctaaacggagaagcgccagactgagcgccaagccccccgccaaggtggaagccaagcctaagaaggccgccgctaaggacaagagcagcgataagaaagtccagaccaagggcaagcggggcgccaaaggcaaacaggccgaggtggccaaccaggagacaaaggaagatctgcctgctgagaacggcgaaaccaagaccgaggaatctccagcttctgacgaggccggagagaaggaggccaaaagcgacagcggctctgagacacctggaacaagcgagagcgccaccccggaatcctatgaacaacttgcaccacaaccgtgtgtgggagaaactttacattctagcctcccacgagacagtgaactgtttgtgcctgaagaggggagcagcgagaaggagagcgaggacgcgccaaaaacatctcctccgacgcctgggaaacatggtttggaacagactggggaggaaaaagtgatggtgactgttcctgacaaaaatccaccttgtccttgctgtggtacccgggtaaactctgtgttgaatctgattgaacatctgaaagtgtcacacgggaaaaggggggtttgttttcggtgtgcaaaatgtggaaaggaaaatagtaactatcacagtgttgtttgtcattttaagaaatgcaggggtccagagacggagaaagccccagctggggagtggatttgtgaggtatgcaacagagattttacaaccaaaattggcctgggacaacacaagagattggcacacccagcagtgagaaatcaggaaaggatcgttgcttcccaaccgaaagaaacatcaaatagaggtgctcacaaaaggtgctggacaaaggaggaggaagaattactaataagactggaggctcagttcgagggaaacaaaaatattaataagcttattgcagaacacataaccaccaaaacagctaagcagatcagtgacaaaaggcgattgctgtccagaaagccagcagaggagccacgtgaggagcctggaacgtgtcatcacaccaggagagcagctgcgagcctgagaacggagcctgagatgagtcatcacgcccaggcagaggacagagataatggacctgggagacgccctctgccaggcagggcagctgccggagggagaacaatggacgagataagacgccaccctgataagggcaacggacagcagagacccaccaagcaaaaatcagaagaacagctgcaggcttactataaaaagacactagaggaacgactttcagctggggcacttaacaccttcccccgagcattcaagcaggtaatggaaggccgggatataaagctagtaatcaatcagacagcgcaggactgcttcggatgcctggaatccataagccaaataagaacggcaacccgagataaaaaggacacggtgacccgggagaaacacccaaagaaaccttttcagaagtggatgaagaagagagcaatcaaaaaaggtaattatcttcggttccagcgtttattttatcttgatagagggaaactggctaaaatcattttagatgatattgaatgcttgtcttgtgacataccactcagtgaaatttattcggtttttaaaacaagatgggaaacaactggtagctttaaaagccttggggactttaaaacttacgggaaggctgacaacactgccttcagagaattaattacggctaaagaaattgagaaaaatgtgcaggaaatgagcaaaggctcggctcccggtccagacgggattactcttggggacgtcgtaaagatggatcccgagttttcccggaccatggagattttcaatttatggttaacaactggtaaaatcccggacatggtgagggggtgcagaaccgttttgattccaaaatcatcaaagccggatcgtttgaaagacattaataactggagacctatcacgatcggttccatcttgctgagactgttctccaggattgtaacagctaggctgagcaaagcgtgccccctgaacccaaggcaaagaggctttatcagagcggcgggatgctctgaaaacttaaaactcctgcaaactataatttggtcggccaaaagagaacacagaccactgggtgttgtattcgtggacatcgccaaggcttttgacaccgtaagccaccagcacatcattcatgctttgcagcaaagagaggtggatccccacatcgtcggtctggtgagcaatatgtacgagaacatcagtacgtatatcaccacaaagaggaacacacacacagacaaaatccagatccgggttggagtaaagcagggtgacccgatgtcgccccttttatttaacctggcaatggaccctctattatgcaagctggaagagagtggcaaaggataccaccgaggacagagcagcatcacagcgatggcatttgcagacgatctggttttgctgagcgactcctgggaaaatatgaatacaaatattagcatactggagaccttctgcaatctgaccggactcaaaacacaggggcaaaagtgccacggcttttacatcaagccgacaaagaagtcttacaccatcaataactgcgctgcctggactatcaacggcacacccctgaacatgatcgaccccggcgaatctgagaaatacctcggcctgcagtttgacccgtggattggaatagcaaggtccggtctctccacaaaactagatttttggcttcagcggatcgatcaagcaccacttaaacctctgcagaaaactgatattctcaaaacatacaccatccctcggctgatctacatagctgaccactcagaagtgaaaagcgcactactcgaaacccttgaccagaagatccggacagcggtcaaggaatggcttcacctacctccgtgcacctgcgatgccatcctgtactcgagcacgagagacggcggtttgggcatcaccaaattggcaggactgatccccagcgtgcaggcccgtagactgcatcggatcgcacagtcatctgacgatacgatgaaatgcttcatggaaaaagagaaaatggaacagctgcataagaaattgtggattcaagctggaggggacagagagaacataccctcgatttgggaagcaccaccgtcgagtgaaccaccaaacaacgtgagcacaaattcggaatgggaagcaccgacccagaaagataaatttccaaagccttgcaattggaggaaaaacgaattcaaaaaatggaccaaattggcatcccaaggccgcggaattgtaaattttgaaagagacaaaattagtaaccattggatccaatactacagacgcatacctcacaggaaactcctcactgcactacaactcagggccaacgtttaccccacgagagaatttctagccaggggtagacaagaccaatacatcaaggcgtgtaggcactgcgatgcggacaacgaatcctgcgcccacatcatcggcaactgcccagtgacacaggacgcccgaatcaagaggcacaattacatctgcgaactgcttctcgaggaggcgaagaagaaggactgggtagtgttcaaggaaccgcacataagggattccaacaaggaactgtacaaacctgacctgatatttgtgaaggatgggcgtgcacttgtcgtggatgtgacagtacggtatgaagcagccaaatcatcgctggaggaagccgctgcagagaaagtgagaaagtacaaacacctggaaacggaagtaagacatctcacgaatgcaaaggacgttacttttgtgggctttcccctaggagcgcgggggaaatggcaccaagataactttaaacttttgactgagcttggcctctccaaatcgaggcaagtgaaaatggcagagactttttccacagtagcgctcttttcatctgtggacattgtacatatgtttgccagtagggccagaaaatctatggttatgtgataataggctgccttctgcggggcttgccttctggccatgcccttcttctctcccttgcacctgtacctcttggtctttgaataaagcctgagtaggaaggaccggtaaaaaaaaaaaaaaaaaaaaaaaaaaaaaaacgttgactaaaaaaaaaaaaaaaaaaaaaaaaaaaaaaaaaaaaaaaaaaaaaaaaaaaaaaaaaaaaaaaaaaaaaa

SEQ ID NO: 10917 - DNA, 5264 bp, synthetic construct
  source 1..5264: mol_type = other DNA
gaaataagagagaaaagaagagtaagaagaaatataagagaattcgccaccatggcccctaagaaaaagcggaaggtgaatatcagcggctctagctgcggcagccccaacagcgccgacaccagcagcgacttcaaggacctgtggaccaagctgaaggaatgccacgaccgggaagtgcagggactccaggtgaaggtcaccaaactcaagcaagaaagaatcctggacgcccagagactggaagaattcttcaccaagaaccagcagctgagagagcagcagaaagtgctgcacgagacaatcaaggttctggaagatagactgcgggccggcctgtgcgacagatgcgccgtgaccgaggaacacatgcgcaaaaagcagcaggagttcgagaacattagacagcaaaatctgaaattgatcacagagctgatgaacgagagaaacacactgcaggaggagaacaagaagctgagcgagcagctgcaacagaagatcgagaatgatcagcaacaccaggccgctgagctggaatgtgaagaggacgtgatccccgacagcccaatcacagctttcagcttttctggcgtgaacagactgaggcggaaggaaaacccccacgtgcggtacatcgagcagacccataccaagctggaacacagcgtgtgtgccaacgagatgagaaaggtgtccaagtcctccacccatccccagcacaaccctaacgaaaatgagatcctggtggctgatacctacgaccagtctcagagccctatggccaaggcccacggcaccagctcttatacccctgataagagctccttcaacctggccaccgtggtggccgagacactgggcctgggcgtgcaggaggaaagcgagacacagggcccaatgagccctctgggagatgagctgtaccactgcctggaaggcaaccacaagaaacagccttttgagtccggctccgagactcctggaacaagcgagagcgctacacctgagggcagccctaagagaaaggtgtccagcgccgagggcgctgccaaggaagagcctaaacggagaagcgccagactgagcgccaagccccccgccaaggtggaagccaagcctaagaaggccgccgctaaggacaagagcagcgataagaaagtccagaccaagggcaagcggggcgccaaaggcaaacaggccgaggtggccaaccaggagacaaaggaagatctgcctgctgagaacggcgaaaccaagaccgaggaatctccagcttctgacgaggccggagagaaggaggccaaaagcgacagcggctctgagacacctggaacaagcgagagcgccaccccggaatcctatgaacaacttgcaccacaaccgtgtgtgggagaaactttacattctagcctcccacgagacagtgaactgtttgtgcctgaagaggggagcagcgagaaggagagcgaggacgcgccaaaaacatctcctccgacgcctgggaaacatggtttggaacagactggggaggaaaaagtgatggtgactgttcctgacaaaaatccaccttgtccttgctgtggtacccgggtaaactctgtgttgaatctgattgaacatctgaaagtgtcacacgggaaaaggggggtttgttttcggtgtgcaaaatgtggaaaggaaaatagtaactatcacagtgttgtttgtcattttaagaaatgcaggggtccagagacggagaaagccccagctggggagtggatttgtgaggtatgcaacagagattttacaaccaaaattggcctgggacaacacaagagattggcacacccagcagtgagaaatcaggaaaggatcgttgcttcccaaccgaaagaaacatcaaatagaggtgctcacaaaaggtgctggacaaaggaggaggaagaattactaataagactggaggctcagttcgagggaaacaaaaatattaataagcttattgcagaacacataaccaccaaaacagctaagcagatcagtgacaaaaggcgattgctgtccagaaagccagcagaggagccacgtgaggagcctggaacgtgtcatcacaccaggagagcagctgcgagcctgagaacggagcctgagatgagtcatcacgcccaggcagaggacagagataatggacctgggagacgccctctgccaggcagggcagctgccggagggagaacaatggacgagataagacgccaccctgataagggcaacggacagcagagacccaccaagcaaaaatcagaagaacagctgcaggcttactataaaaagacactagaggaacgactttcagctggggcacttaacaccttcccccgagcattcaagcaggtaatggaaggccgggatataaagctagtaatcaatcagacagcgcaggactgcttcggatgcctggaatccataagccaaataagaacggcaacccgagataaaaaggacacggtgacccgggagaaacacccaaagaaaccttttcagaagtggatgaagaagagagcaatcaaaaaaggtaattatcttcggttccagcgtttattttatcttgatagagggaaactggctaaaatcattttagatgatattgaatgcttgtcttgtgacataccactcagtgaaatttattcggtttttaaaacaagatgggaaacaactggtagctttaaaagccttggggactttaaaacttacgggaaggctgacaacactgccttcagagaattaattacggctaaagaaattgagaaaaatgtgcaggaaatgagcaaaggctcggctcccggtccagacgggattactcttggggacgtcgtaaagatggatcccgagttttcccggaccatggagattttcaatttatggttaacaactggtaaaatcccggacatggtgagggggtgcagaaccgttttgattccaaaatcatcaaagccggatcgtttgaaagacattaataactggagacctatcacgatcggttccatcttgctgagactgttctccaggattgtaacagctaggctgagcaaagcgtgccccctgaacccaaggcaaagaggctttatcagagcggcgggatgctctgaaaacttaaaactcctgcaaactataatttggtcggccaaaagagaacacagaccactgggtgttgtattcgtggacatcgccaaggcttttgacaccgtaagccaccagcacatcattcatgctttgcagcaaagagaggtggatccccacatcgtcggtctggtgagcaatatgtacgagaacatcagtacgtatatcaccacaaagaggaacacacacacagacaaaatccagatccgggttggagtaaagcagggtgacccgatgtcgccccttttatttaacctggcaatggaccctctattatgcaagctggaagagagtggcaaaggataccaccgaggacagagcagcatcacagcgatggcatttgcagacgatctggttttgctgagcgactcctgggaaaatatgaatacaaatattagcatactggagaccttctgcaatctgaccggactcaaaacacaggggcaaaagtgccacggcttttacatcaagccgacaaagaagtcttacaccatcaatgactgcgctccctggactatcaacggcacacccctgaacatgatcgaccccggcgaatctgagaaatacctcggcctgcagtttgacccgtggattggaatagcaaggtccggtctctccacaaaactagatttttggcttcagcggatcgatcaagcaccacttaaacctctgcagaaaactgatattctcaaaacatacaccatccctcggctgatctacatagctgaccactcagaagtgaaaagcgcactactcgaaacccttgaccagaagatccggacagcggtcaaggaatggcttcacctacctccgtgcacctgcgatgccatcctgtactcgagcacgagagacggcggtttgggcatcaccaaattggcaggactgatccccagcgtgcaggcccgtagactgcatcggatcgcacagtcatctgacgatacgatgaaatgcttcatggaaaaagagaaaatggaacagctgcataagaaattgtggattcaagctggaggggacagagagaacataccctcgatttgggaagcaccaccgtcgagtgaaccaccaaacaacgtgagcacaaattcggaatgggaagcaccgacccagaaagataaatttccaaagccttgcaattggaggaaaaacgaattcaaaaaatggaccaaattggcatcccaaggccgcggaattgtaaattttgaaagagacaaaattagtaaccattggatccaatactacagacgcatacctcacaggaaactcctcactgcactacaactcagggccaacgtttaccccacgagagaatttctagccaggggtagacaagaccaatacatcaaggcgtgtaggcactgcgatgcggacaacgaatcctgcgcccacatcatcggcaactgcccagtgacacaggacgcccgaatcaagaggcacaattacatctgcgaactgcttctcgaggaggcgaagaagaaggactgggtagtgttcaaggaaccgcacataagggattccaacaaggaactgtacaaacctgacctgatatttgtgaaggatgggcgtgcacttgtcgtggatgtgacagtacggtatgaagcagccaaatcatcgctggaggaagccgctgcagagaaagtgagaaagtacaaacacctggaaacggaagtaagacatctcacgaatgcaaaggacgttacttttgtgggctttcccctaggagcgcgggggaaatggcaccaagataactttaaacttttgactgagcttggcctctccaaatcgaggcaagtgaaaatggcagagactttttccacagtagcgctcttttcatctgtggacattgtacatatgtttgccagtagggccagaaaatctatggttatgtgataataggctgccttctgcggggcttgccttctggccatgcccttcttctctcccttgcacctgtacctcttggtctttgaataaagcctgagtaggaaggaccggtaaaaaaaaaaaaaaaaaaaaaaaaaaaaaaacgttgactaaaaaaaaaaaaaaaaaaaaaaaaaaaaaaaaaaaaaaaaaaaaaaaaaaaaaaaaaaaaaaaaaaaaaa

SEQ ID NO: 10918 - DNA, 5264 bp, synthetic construct
  source 1..5264: mol_type = other DNA
gaaataagagagaaaagaagagtaagaagaaatataagagaattcgccaccatggcccctaagaaaaagcggaaggtgaatatcagcggctctagctgcggcagccccaacagcgccgacaccagcagcgacttcaaggacctgtggaccaagctgaaggaatgccacgaccgggaagtgcagggactccaggtgaaggtcaccaaactcaagcaagaaagaatcctggacgcccagagactggaagaattcttcaccaagaaccagcagctgagagagcagcagaaagtgctgcacgagacaatcaaggttctggaagatagactgcgggccggcctgtgcgacagatgcgccgtgaccgaggaacacatgcgcaaaaagcagcaggagttcgagaacattagacagcaaaatctgaaattgatcacagagctgatgaacgagagaaacacactgcaggaggagaacaagaagctgagcgagcagctgcaacagaagatcgagaatgatcagcaacaccaggccgctgagctggaatgtgaagaggacgtgatccccgacagcccaatcacagctttcagcttttctggcgtgaacagactgaggcggaaggaaaacccccacgtgcggtacatcgagcagacccataccaagctggaacacagcgtgtgtgccaacgagatgagaaaggtgtccaagtcctccacccatccccagcacaaccctaacgaaaatgagatcctggtggctgatacctacgaccagtctcagagccctatggccaaggcccacggcaccagctcttatacccctgataagagctccttcaacctggccaccgtggtggccgagacactgggcctgggcgtgcaggaggaaagcgagacacagggcccaatgagccctctgggagatgagctgtaccactgcctggaaggcaaccacaagaaacagccttttgagtccggctccgagactcctggaacaagcgagagcgctacacctgagggcagccctaagagaaaggtgtccagcgccgagggcgctgccaaggaagagcctaaacggagaagcgccagactgagcgccaagccccccgccaaggtggaagccaagcctaagaaggccgccgctaaggacaagagcagcgataagaaagtccagaccaagggcaagcggggcgccaaaggcaaacaggccgaggtggccaaccaggagacaaaggaagatctgcctgctgagaacggcgaaaccaagaccgaggaatctccagcttctgacgaggccggagagaaggaggccaaaagcgacagcggctctgagacacctggaacaagcgagagcgccaccccggaatcctatgaacaacttgcaccacaaccgtgtgtgggagaaactttacattctagcctcccacgagacagtgaactgtttgtgcctgaagaggggagcagcgagaaggagagcgaggacgcgccaaaaacatctcctccgacgcctgggaaacatggtttggaacagactggggaggaaaaagtgatggtgactgttcctgacaaaaatccaccttgtccttgctgtggtacccgggtaaactctgtgttgaatctgattgaacatctgaaagtgtcacacgggaaaaggggggtttgttttcggtgtgcaaaatgtggaaaggaaaatagtaactatcacagtgttgtttgtcattttaagaaatgcaggggtccagagacggagaaagccccagctggggagtggatttgtgaggtatgcaacagagattttacaaccaaaattggcctgggacaacacaagagattggcacacccagcagtgagaaatcaggaaaggatcgttgcttcccaaccgaaagaaacatcaaatagaggtgctcacaaaaggtgctggacaaaggaggaggaagaattactaataagactggaggctcagttcgagggaaacaaaaatattaataagcttattgcagaacacataaccaccaaaacagctaagcagatcagtgacaaaaggcgattgctgtccagaaagccagcagaggagccacgtgaggagcctggaacgtgtcatcacaccaggagagcagctgcgagcctgagaacggagcctgagatgagtcatcacgcccaggcagaggacagagataatggacctgggagacgccctctgccaggcagggcagctgccggagggagaacaatggacgagataagacgccaccctgataagggcaacggacagcagagacccaccaagcaaaaatcagaagaacagctgcaggcttactataaaaagacactagaggaacgactttcagctggggcacttaacaccttcccccgagcattcaagcaggtaatggaaggccgggatataaagctagtaatcaatcagacagcgcaggactgcttcggatgcctggaatccataagccaaataagaacggcaacccgagataaaaaggacacggtgacccgggagaaacacccaaagaaaccttttcagaagtggatgaagaagagagcaatcaaaaaaggtaattatcttcggttccagcgtttattttatcttgatagagggaaactggctaaaatcattttagatgatattgaatgcttgtcttgtgacataccactcagtgaaatttattcggtttttaaaacaagatgggaaacaactggtagctttaaaagccttggggactttaaaacttacgggaaggctgacaacactgccttcagagaattaattacggctaaagaaattgagaaaaatgtgcaggaaatgagcaaaggctcggctcccggtccagacgggattactcttggggacgtcgtaaagatggatcccgagttttcccggaccatggagattttcaatttatggttaacaactggtaaaatcccggacatggtgagggggtgcagaaccgttttgattccaaaatcatcaaagccggatcgtttgaaagacattaataactggagacctatcacgatcggttccatcttgctgagactgttctccaggattgtaacagctaggctgagcaaagcgtgccccctgaacccaaggcaaagaggctttatcagagcggcgggatgctctgaaaacttaaaactcctgcaaactataatttggtcggccaaaagagaacacagaccactgggtgttgtattcgtggacatcgccaaggcttttgacaccgtaagccaccagcacatcattcatgctttgcagcaaagagaggtggatccccacatcgtcggtctggtgagcaatatgtacgagaacatcagtacgtatatcaccacaaagaggaacacacacacagacaaaatccagatccgggttggagtaaagcagggtgacccgatgtcgccccttttatttaacctggcaatggaccctctattatgcaagctggaagagagtggcaaaggataccaccgaggacagagcagcatcacagcgatggcatttgcagacgatctggttttgctgagcgactcctgggaaaatatgaatacaaatattagcatactggagaccttctgcaatctgaccggactcaaaacacaggggcaaaagtgccacggcttttacatcaagccgacaaagaagtcttacaccatcaatgactgcgctgccttcactatcaacggcacacccctgaacatgatcgaccccggcgaatctgagaaatacctcggcctgcagtttgacccgtggattggaatagcaaggtccggtctctccacaaaactagatttttggcttcagcggatcgatcaagcaccacttaaacctctgcagaaaactgatattctcaaaacatacaccatccctcggctgatctacatagctgaccactcagaagtgaaaagcgcactactcgaaacccttgaccagaagatccggacagcggtcaaggaatggcttcacctacctccgtgcacctgcgatgccatcctgtactcgagcacgagagacggcggtttgggcatcaccaaattggcaggactgatccccagcgtgcaggcccgtagactgcatcggatcgcacagtcatctgacgatacgatgaaatgcttcatggaaaaagagaaaatggaacagctgcataagaaattgtggattcaagctggaggggacagagagaacataccctcgatttgggaagcaccaccgtcgagtgaaccaccaaacaacgtgagcacaaattcggaatgggaagcaccgacccagaaagataaatttccaaagccttgcaattggaggaaaaacgaattcaaaaaatggaccaaattggcatcccaaggccgcggaattgtaaattttgaaagagacaaaattagtaaccattggatccaatactacagacgcatacctcacaggaaactcctcactgcactacaactcagggccaacgtttaccccacgagagaatttctagccaggggtagacaagaccaatacatcaaggcgtgtaggcactgcgatgcggacaacgaatcctgcgcccacatcatcggcaactgcccagtgacacaggacgcccgaatcaagaggcacaattacatctgcgaactgcttctcgaggaggcgaagaagaaggactgggtagtgttcaaggaaccgcacataagggattccaacaaggaactgtacaaacctgacctgatatttgtgaaggatgggcgtgcacttgtcgtggatgtgacagtacggtatgaagcagccaaatcatcgctggaggaagccgctgcagagaaagtgagaaagtacaaacacctggaaacggaagtaagacatctcacgaatgcaaaggacgttacttttgtgggctttcccctaggagcgcgggggaaatggcaccaagataactttaaacttttgactgagcttggcctctccaaatcgaggcaagtgaaaatggcagagactttttccacagtagcgctcttttcatctgtggacattgtacatatgtttgccagtagggccagaaaatctatggttatgtgataataggctgccttctgcggggcttgccttctggccatgcccttcttctctcccttgcacctgtacctcttggtctttgaataaagcctgagtaggaaggaccggtaaaaaaaaaaaaaaaaaaaaaaaaaaaaaaacgttgactaaaaaaaaaaaaaaaaaaaaaaaaaaaaaaaaaaaaaaaaaaaaaaaaaaaaaaaaaaaaaaaaaaaaaa

SEQ ID NO: 10919 - DNA, 5264 bp, synthetic construct
  source 1..5264: mol_type = other DNA
gaaataagagagaaaagaagagtaagaagaaatataagagaattcgccaccatggcccctaagaaaaagcggaaggtgaatatcagcggctctagctgcggcagccccaacagcgccgacaccagcagcgacttcaaggacctgtggaccaagctgaaggaatgccacgaccgggaagtgcagggactccaggtgaaggtcaccaaactcaagcaagaaagaatcctggacgcccagagactggaagaattcttcaccaagaaccagcagctgagagagcagcagaaagtgctgcacgagacaatcaaggttctggaagatagactgcgggccggcctgtgcgacagatgcgccgtgaccgaggaacacatgcgcaaaaagcagcaggagttcgagaacattagacagcaaaatctgaaattgatcacagagctgatgaacgagagaaacacactgcaggaggagaacaagaagctgagcgagcagctgcaacagaagatcgagaatgatcagcaacaccaggccgctgagctggaatgtgaagaggacgtgatccccgacagcccaatcacagctttcagcttttctggcgtgaacagactgaggcggaaggaaaacccccacgtgcggtacatcgagcagacccataccaagctggaacacagcgtgtgtgccaacgagatgagaaaggtgtccaagtcctccacccatccccagcacaaccctaacgaaaatgagatcctggtggctgatacctacgaccagtctcagagccctatggccaaggcccacggcaccagctcttatacccctgataagagctccttcaacctggccaccgtggtggccgagacactgggcctgggcgtgcaggaggaaagcgagacacagggcccaatgagccctctgggagatgagctgtaccactgcctggaaggcaaccacaagaaacagccttttgagtccggctccgagactcctggaacaagcgagagcgctacacctgagggcagccctaagagaaaggtgtccagcgccgagggcgctgccaaggaagagcctaaacggagaagcgccagactgagcgccaagccccccgccaaggtggaagccaagcctaagaaggccgccgctaaggacaagagcagcgataagaaagtccagaccaagggcaagcggggcgccaaaggcaaacaggccgaggtggccaaccaggagacaaaggaagatctgcctgctgagaacggcgaaaccaagaccgaggaatctccagcttctgacgaggccggagagaaggaggccaaaagcgacagcggctctgagacacctggaacaagcgagagcgccaccccggaatcctatgaacaacttgcaccacaaccgtgtgtgggagaaactttacattctagcctcccacgagacagtgaactgtttgtgcctgaagaggggagcagcgagaaggagagcgaggacgcgccaaaaacatctcctccgacgcctgggaaacatggtttggaacagactggggaggaaaaagtgatggtgactgttcctgacaaaaatccaccttgtccttgctgtggtacccgggtaaactctgtgttgaatctgattgaacatctgaaagtgtcacacgggaaaaggggggtttgttttcggtgtgcaaaatgtggaaaggaaaatagtaactatcacagtgttgtttgtcattttaagaaatgcaggggtccagagacggagaaagccccagctggggagtggatttgtgaggtatgcaacagagattttacaaccaaaattggcctgggacaacacaagagattggcacacccagcagtgagaaatcaggaaaggatcgttgcttcccaaccgaaagaaacatcaaatagaggtgctcacaaaaggtgctggacaaaggaggaggaagaattactaataagactggaggctcagttcgagggaaacaaaaatattaataagcttattgcagaacacataaccaccaaaacagctaagcagatcagtgacaaaaggcgattgctgtccagaaagccagcagaggagccacgtgaggagcctggaacgtgtcatcacaccaggagagcagctgcgagcctgagaacggagcctgagatgagtcatcacgcccaggcagaggacagagataatggacctgggagacgccctctgccaggcagggcagctgccggagggagaacaatggacgagataagacgccaccctgataagggcaacggacagcagagacccaccaagcaaaaatcagaagaacagctgcaggcttactataaaaagacactagaggaacgactttcagctggggcacttaacaccttcccccgagcattcaagcaggtaatggaaggccgggatataaagctagtaatcaatcagacagcgcaggactgcttcggatgcctggaatccataagccaaataagaacggcaacccgagataaaaaggacacggtgacccgggagaaacacccaaagaaaccttttcagaagtggatgaagaagagagcaatcaaaaaaggtaattatcttcggttccagcgtttattttatcttgatagagggaaactggctaaaatcattttagatgatattgaatgcttgtcttgtgacataccactcagtgaaatttattcggtttttaaaacaagatgggaaacaactggtagctttaaaagccttggggactttaaaacttacgggaaggctgacaacactgccttcagagaattaattacggctaaagaaattgagaaaaatgtgcaggaaatgagcaaaggctcggctcccggtccagacgggattactcttggggacgtcgtaaagatggatcccgagttttcccggaccatggagattttcaatttatggttaacaactggtaaaatcccggacatggtgagggggtgcagaaccgttttgattccaaaatcatcaaagccggatcgtttgaaagacattaataactggagacctatcacgatcggttccatcttgctgagactgttctccaggattgtaacagctaggctgagcaaagcgtgccccctgaacccaaggcaaagaggctttatcagagcggcgggatgctctgaaaacttaaaactcctgcaaactataatttggtcggccaaaagagaacacagaccactgggtgttgtattcgtggacatcgccaaggcttttgacaccgtaagccaccagcacatcattcatgctttgcagcaaagagaggtggatccccacatcgtcggtctggtgagcaatatgtacgagaacatcagtacgtatatcaccacaaagaggaacacacacacagacaaaatccagatccgggttggagtaaagcagggtgacccgatgtcgccccttttatttaacctggcaatggaccctctattatgcaagctggaagagagtggcaaaggataccaccgaggacagagcagcatcacagcgatggcatttgcagacgatctggttttgctgagcgactcctgggaaaatatgaatacaaatattagcatactggagaccttctgcaatctgaccggactcaaaacacaggggcaaaagtgccacggcttttacatcaagccgacaaagaagtcttacaccatcaatgactgcgctgcctggactatcaacggcacacccctgaacctgatcgaccccggcgaatctgagaaatacctcggcctgcagtttgacccgtggattggaatagcaaggtccggtctctccacaaaactagatttttggcttcagcggatcgatcaagcaccacttaaacctctgcagaaaactgatattctcaaaacatacaccatccctcggctgatctacatagctgaccactcagaagtgaaaagcgcactactcgaaacccttgaccagaagatccggacagcggtcaaggaatggcttcacctacctccgtgcacctgcgatgccatcctgtactcgagcacgagagacggcggtttgggcatcaccaaattggcaggactgatccccagcgtgcaggcccgtagactgcatcggatcgcacagtcatctgacgatacgatgaaatgcttcatggaaaaagagaaaatggaacagctgcataagaaattgtggattcaagctggaggggacagagagaacataccctcgatttgggaagcaccaccgtcgagtgaaccaccaaacaacgtgagcacaaattcggaatgggaagcaccgacccagaaagataaatttccaaagccttgcaattggaggaaaaacgaattcaaaaaatggaccaaattggcatcccaaggccgcggaattgtaaattttgaaagagacaaaattagtaaccattggatccaatactacagacgcatacctcacaggaaactcctcactgcactacaactcagggccaacgtttaccccacgagagaatttctagccaggggtagacaagaccaatacatcaaggcgtgtaggcactgcgatgcggacaacgaatcctgcgcccacatcatcggcaactgcccagtgacacaggacgcccgaatcaagaggcacaattacatctgcgaactgcttctcgaggaggcgaagaagaaggactgggtagtgttcaaggaaccgcacataagggattccaacaaggaactgtacaaacctgacctgatatttgtgaaggatgggcgtgcacttgtcgtggatgtgacagtacggtatgaagcagccaaatcatcgctggaggaagccgctgcagagaaagtgagaaagtacaaacacctggaaacggaagtaagacatctcacgaatgcaaaggacgttacttttgtgggctttcccctaggagcgcgggggaaatggcaccaagataactttaaacttttgactgagcttggcctctccaaatcgaggcaagtgaaaatggcagagactttttccacagtagcgctcttttcatctgtggacattgtacatatgtttgccagtagggccagaaaatctatggttatgtgataataggctgccttctgcggggcttgccttctggccatgcccttcttctctcccttgcacctgtacctcttggtctttgaataaagcctgagtaggaaggaccggtaaaaaaaaaaaaaaaaaaaaaaaaaaaaaaacgttgactaaaaaaaaaaaaaaaaaaaaaaaaaaaaaaaaaaaaaaaaaaaaaaaaaaaaaaaaaaaaaaaaaaaaaa

SEQ ID NO: 10920 - DNA, 5264 bp, synthetic construct
  source 1..5264: mol_type = other DNA
gaaataagagagaaaagaagagtaagaagaaatataagagaattcgccaccatggcccctaagaaaaagcggaaggtgaatatcagcggctctagctgcggcagccccaacagcgccgacaccagcagcgacttcaaggacctgtggaccaagctgaaggaatgccacgaccgggaagtgcagggactccaggtgaaggtcaccaaactcaagcaagaaagaatcctggacgcccagagactggaagaattcttcaccaagaaccagcagctgagagagcagcagaaagtgctgcacgagacaatcaaggttctggaagatagactgcgggccggcctgtgcgacagatgcgccgtgaccgaggaacacatgcgcaaaaagcagcaggagttcgagaacattagacagcaaaatctgaaattgatcacagagctgatgaacgagagaaacacactgcaggaggagaacaagaagctgagcgagcagctgcaacagaagatcgagaatgatcagcaacaccaggccgctgagctggaatgtgaagaggacgtgatccccgacagcccaatcacagctttcagcttttctggcgtgaacagactgaggcggaaggaaaacccccacgtgcggtacatcgagcagacccataccaagctggaacacagcgtgtgtgccaacgagatgagaaaggtgtccaagtcctccacccatccccagcacaaccctaacgaaaatgagatcctggtggctgatacctacgaccagtctcagagccctatggccaaggcccacggcaccagctcttatacccctgataagagctccttcaacctggccaccgtggtggccgagacactgggcctgggcgtgcaggaggaaagcgagacacagggcccaatgagccctctgggagatgagctgtaccactgcctggaaggcaaccacaagaaacagccttttgagtccggctccgagactcctggaacaagcgagagcgctacacctgagggcagccctaagagaaaggtgtccagcgccgagggcgctgccaaggaagagcctaaacggagaagcgccagactgagcgccaagccccccgccaaggtggaagccaagcctaagaaggccgccgctaaggacaagagcagcgataagaaagtccagaccaagggcaagcggggcgccaaaggcaaacaggccgaggtggccaaccaggagacaaaggaagatctgcctgctgagaacggcgaaaccaagaccgaggaatctccagcttctgacgaggccggagagaaggaggccaaaagcgacagcggctctgagacacctggaacaagcgagagcgccaccccggaatcctatgaacaacttgcaccacaaccgtgtgtgggagaaactttacattctagcctcccacgagacagtgaactgtttgtgcctgaagaggggagcagcgagaaggagagcgaggacgcgccaaaaacatctcctccgacgcctgggaaacatggtttggaacagactggggaggaaaaagtgatggtgactgttcctgacaaaaatccaccttgtccttgctgtggtacccgggtaaactctgtgttgaatctgattgaacatctgaaagtgtcacacgggaaaaggggggtttgttttcggtgtgcaaaatgtggaaaggaaaatagtaactatcacagtgttgtttgtcattttaagaaatgcaggggtccagagacggagaaagccccagctggggagtggatttgtgaggtatgcaacagagattttacaaccaaaattggcctgggacaacacaagagattggcacacccagcagtgagaaatcaggaaaggatcgttgcttcccaaccgaaagaaacatcaaatagaggtgctcacaaaaggtgctggacaaaggaggaggaagaattactaataagactggaggctcagttcgagggaaacaaaaatattaataagcttattgcagaacacataaccaccaaaacagctaagcagatcagtgacaaaaggcgattgctgtccagaaagccagcagaggagccacgtgaggagcctggaacgtgtcatcacaccaggagagcagctgcgagcctgagaacggagcctgagatgagtcatcacgcccaggcagaggacagagataatggacctgggagacgccctctgccaggcagggcagctgccggagggagaacaatggacgagataagacgccaccctgataagggcaacggacagcagagacccaccaagcaaaaatcagaagaacagctgcaggcttactataaaaagacactagaggaacgactttcagctggggcacttaacaccttcccccgagcattcaagcaggtaatggaaggccgggatataaagctagtaatcaatcagacagcgcaggactgcttcggatgcctggaatccataagccaaataagaacggcaacccgagataaaaaggacacggtgacccgggagaaacacccaaagaaaccttttcagaagtggatgaagaagagagcaatcaaaaaaggtaattatcttcggttccagcgtttattttatcttgatagagggaaactggctaaaatcattttagatgatattgaatgcttgtcttgtgacataccactcagtgaaatttattcggtttttaaaacaagatgggaaacaactggtagctttaaaagccttggggactttaaaacttacgggaaggctgacaacactgccttcagagaattaattacggctaaagaaattgagaaaaatgtgcaggaaatgagcaaaggctcggctcccggtccagacgggattactcttggggacgtcgtaaagatggatcccgagttttcccggaccatggagattttcaatttatggttaacaactggtaaaatcccggacatggtgagggggtgcagaaccgttttgattccaaaatcatcaaagccggatcgtttgaaagacattaataactggagacctatcacgatcggttccatcttgctgagactgttctccaggattgtaacagctaggctgagcaaagcgtgccccctgaacccaaggcaaagaggctttatcagagcggcgggatgctctgaaaacttaaaactcctgcaaactataatttggtcggccaaaagagaacacagaccactgggtgttgtattcgtggacatcgccaaggcttttgacaccgtaagccaccagcacatcattcatgctttgcagcaaagagaggtggatccccacatcgtcggtctggtgagcaatatgtacgagaacatcagtacgtatatcaccacaaagaggaacacacacacagacaaaatccagatccgggttggagtaaagcagggtgacccgatgtcgccccttttatttaacctggcaatggaccctctattatgcaagctggaagagagtggcaaaggataccaccgaggacagagcagcatcacagcgatggcatttgcagacgatctggttttgctgagcgactcctgggaaaatatgaatacaaatattagcatactggagaccttctgcaatctgaccggactcaaaacacaggggcaaaagtgccacggcttttacatcaagccgacaaagaagtcttacaccatcaatgactgcgctgcctggactatcaacggcacacccctgaacatgatcgaccccggcgaatctgagagatacctcggcctgcagtttgacccgtggattggaatagcaaggtccggtctctccacaaaactagatttttggcttcagcggatcgatcaagcaccacttaaacctctgcagaaaactgatattctcaaaacatacaccatccctcggctgatctacatagctgaccactcagaagtgaaaagcgcactactcgaaacccttgaccagaagatccggacagcggtcaaggaatggcttcacctacctccgtgcacctgcgatgccatcctgtactcgagcacgagagacggcggtttgggcatcaccaaattggcaggactgatccccagcgtgcaggcccgtagactgcatcggatcgcacagtcatctgacgatacgatgaaatgcttcatggaaaaagagaaaatggaacagctgcataagaaattgtggattcaagctggaggggacagagagaacataccctcgatttgggaagcaccaccgtcgagtgaaccaccaaacaacgtgagcacaaattcggaatgggaagcaccgacccagaaagataaatttccaaagccttgcaattggaggaaaaacgaattcaaaaaatggaccaaattggcatcccaaggccgcggaattgtaaattttgaaagagacaaaattagtaaccattggatccaatactacagacgcatacctcacaggaaactcctcactgcactacaactcagggccaacgtttaccccacgagagaatttctagccaggggtagacaagaccaatacatcaaggcgtgtaggcactgcgatgcggacaacgaatcctgcgcccacatcatcggcaactgcccagtgacacaggacgcccgaatcaagaggcacaattacatctgcgaactgcttctcgaggaggcgaagaagaaggactgggtagtgttcaaggaaccgcacataagggattccaacaaggaactgtacaaacctgacctgatatttgtgaaggatgggcgtgcacttgtcgtggatgtgacagtacggtatgaagcagccaaatcatcgctggaggaagccgctgcagagaaagtgagaaagtacaaacacctggaaacggaagtaagacatctcacgaatgcaaaggacgttacttttgtgggctttcccctaggagcgcgggggaaatggcaccaagataactttaaacttttgactgagcttggcctctccaaatcgaggcaagtgaaaatggcagagactttttccacagtagcgctcttttcatctgtggacattgtacatatgtttgccagtagggccagaaaatctatggttatgtgataataggctgccttctgcggggcttgccttctggccatgcccttcttctctcccttgcacctgtacctcttggtctttgaataaagcctgagtaggaaggaccggtaaaaaaaaaaaaaaaaaaaaaaaaaaaaaaacgttgactaaaaaaaaaaaaaaaaaaaaaaaaaaaaaaaaaaaaaaaaaaaaaaaaaaaaaaaaaaaaaaaaaaaaaa

SEQ ID NO: 10921 - DNA, 5264 bp, synthetic construct
  source 1..5264: mol_type = other DNA
gaaataagagagaaaagaagagtaagaagaaatataagagaattcgccaccatggcccctaagaaaaagcggaaggtgaatatcagcggctctagctgcggcagccccaacagcgccgacaccagcagcgacttcaaggacctgtggaccaagctgaaggaatgccacgaccgggaagtgcagggactccaggtgaaggtcaccaaactcaagcaagaaagaatcctggacgcccagagactggaagaattcttcaccaagaaccagcagctgagagagcagcagaaagtgctgcacgagacaatcaaggttctggaagatagactgcgggccggcctgtgcgacagatgcgccgtgaccgaggaacacatgcgcaaaaagcagcaggagttcgagaacattagacagcaaaatctgaaattgatcacagagctgatgaacgagagaaacacactgcaggaggagaacaagaagctgagcgagcagctgcaacagaagatcgagaatgatcagcaacaccaggccgctgagctggaatgtgaagaggacgtgatccccgacagcccaatcacagctttcagcttttctggcgtgaacagactgaggcggaaggaaaacccccacgtgcggtacatcgagcagacccataccaagctggaacacagcgtgtgtgccaacgagatgagaaaggtgtccaagtcctccacccatccccagcacaaccctaacgaaaatgagatcctggtggctgatacctacgaccagtctcagagccctatggccaaggcccacggcaccagctcttatacccctgataagagctccttcaacctggccaccgtggtggccgagacactgggcctgggcgtgcaggaggaaagcgagacacagggcccaatgagccctctgggagatgagctgtaccactgcctggaaggcaaccacaagaaacagccttttgagtccggctccgagactcctggaacaagcgagagcgctacacctgagggcagccctaagagaaaggtgtccagcgccgagggcgctgccaaggaagagcctaaacggagaagcgccagactgagcgccaagccccccgccaaggtggaagccaagcctaagaaggccgccgctaaggacaagagcagcgataagaaagtccagaccaagggcaagcggggcgccaaaggcaaacaggccgaggtggccaaccaggagacaaaggaagatctgcctgctgagaacggcgaaaccaagaccgaggaatctccagcttctgacgaggccggagagaaggaggccaaaagcgacagcggctctgagacacctggaacaagcgagagcgccaccccggaatcctatgaacaacttgcaccacaaccgtgtgtgggagaaactttacattctagcctcccacgagacagtgaactgtttgtgcctgaagaggggagcagcgagaaggagagcgaggacgcgccaaaaacatctcctccgacgcctgggaaacatggtttggaacagactggggaggaaaaagtgatggtgactgttcctgacaaaaatccaccttgtccttgctgtggtacccgggtaaactctgtgttgaatctgattgaacatctgaaagtgtcacacgggaaaaggggggtttgttttcggtgtgcaaaatgtggaaaggaaaatagtaactatcacagtgttgtttgtcattttaagaaatgcaggggtccagagacggagaaagccccagctggggagtggatttgtgaggtatgcaacagagattttacaaccaaaattggcctgggacaacacaagagattggcacacccagcagtgagaaatcaggaaaggatcgttgcttcccaaccgaaagaaacatcaaatagaggtgctcacaaaaggtgctggacaaaggaggaggaagaattactaataagactggaggctcagttcgagggaaacaaaaatattaataagcttattgcagaacacataaccaccaaaacagctaagcagatcagtgacaaaaggcgattgctgtccagaaagccagcagaggagccacgtgaggagcctggaacgtgtcatcacaccaggagagcagctgcgagcctgagaacggagcctgagatgagtcatcacgcccaggcagaggacagagataatggacctgggagacgccctctgccaggcagggcagctgccggagggagaacaatggacgagataagacgccaccctgataagggcaacggacagcagagacccaccaagcaaaaatcagaagaacagctgcaggcttactataaaaagacactagaggaacgactttcagctggggcacttaacaccttcccccgagcattcaagcaggtaatggaaggccgggatataaagctagtaatcaatcagacagcgcaggactgcttcggatgcctggaatccataagccaaataagaacggcaacccgagataaaaaggacacggtgacccgggagaaacacccaaagaaaccttttcagaagtggatgaagaagagagcaatcaaaaaaggtaattatcttcggttccagcgtttattttatcttgatagagggaaactggctaaaatcattttagatgatattgaatgcttgtcttgtgacataccactcagtgaaatttattcggtttttaaaacaagatgggaaacaactggtagctttaaaagccttggggactttaaaacttacgggaaggctgacaacactgccttcagagaattaattacggctaaagaaattgagaaaaatgtgcaggaaatgagcaaaggctcggctcccggtccagacgggattactcttggggacgtcgtaaagatggatcccgagttttcccggaccatggagattttcaatttatggttaacaactggtaaaatcccggacatggtgagggggtgcagaaccgttttgattccaaaatcatcaaagccggatcgtttgaaagacattaataactggagacctatcacgatcggttccatcttgctgagactgttctccaggattgtaacagctaggctgagcaaagcgtgccccctgaacccaaggcaaagaggctttatcagagcggcgggatgctctgaaaacttaaaactcctgcaaactataatttggtcggccaaaagagaacacagaccactgggtgttgtattcgtggacatcgccaaggcttttgacaccgtaagccaccagcacatcattcatgctttgcagcaaagagaggtggatccccacatcgtcggtctggtgagcaatatgtacgagaacatcagtacgtatatcaccacaaagaggaacacacacacagacaaaatccagatccgggttggagtaaagcagggtgacccgatgtcgccccttttatttaacctggcaatggaccctctattatgcaagctggaagagagtggcaaaggataccaccgaggacagagcagcatcacagcgatggcatttgcagacgatctggttttgctgagcgactcctgggaaaatatgaatacaaatattagcatactggagaccttctgcaatctgaccggactcaaaacacaggggcaaaagtgccacggcttttacatcaagccgacaaagaagtcttacaccatcaatgactgcgctgcctggactatcaacggcacacccctgaacatgatcgaccccggcgaatctgagaaacacctcggcctgcagtttgacccgtggattggaatagcaaggtccggtctctccacaaaactagatttttggcttcagcggatcgatcaagcaccacttaaacctctgcagaaaactgatattctcaaaacatacaccatccctcggctgatctacatagctgaccactcagaagtgaaaagcgcactactcgaaacccttgaccagaagatccggacagcggtcaaggaatggcttcacctacctccgtgcacctgcgatgccatcctgtactcgagcacgagagacggcggtttgggcatcaccaaattggcaggactgatccccagcgtgcaggcccgtagactgcatcggatcgcacagtcatctgacgatacgatgaaatgcttcatggaaaaagagaaaatggaacagctgcataagaaattgtggattcaagctggaggggacagagagaacataccctcgatttgggaagcaccaccgtcgagtgaaccaccaaacaacgtgagcacaaattcggaatgggaagcaccgacccagaaagataaatttccaaagccttgcaattggaggaaaaacgaattcaaaaaatggaccaaattggcatcccaaggccgcggaattgtaaattttgaaagagacaaaattagtaaccattggatccaatactacagacgcatacctcacaggaaactcctcactgcactacaactcagggccaacgtttaccccacgagagaatttctagccaggggtagacaagaccaatacatcaaggcgtgtaggcactgcgatgcggacaacgaatcctgcgcccacatcatcggcaactgcccagtgacacaggacgcccgaatcaagaggcacaattacatctgcgaactgcttctcgaggaggcgaagaagaaggactgggtagtgttcaaggaaccgcacataagggattccaacaaggaactgtacaaacctgacctgatatttgtgaaggatgggcgtgcacttgtcgtggatgtgacagtacggtatgaagcagccaaatcatcgctggaggaagccgctgcagagaaagtgagaaagtacaaacacctggaaacggaagtaagacatctcacgaatgcaaaggacgttacttttgtgggctttcccctaggagcgcgggggaaatggcaccaagataactttaaacttttgactgagcttggcctctccaaatcgaggcaagtgaaaatggcagagactttttccacagtagcgctcttttcatctgtggacattgtacatatgtttgccagtagggccagaaaatctatggttatgtgataataggctgccttctgcggggcttgccttctggccatgcccttcttctctcccttgcacctgtacctcttggtctttgaataaagcctgagtaggaaggaccggtaaaaaaaaaaaaaaaaaaaaaaaaaaaaaaacgttgactaaaaaaaaaaaaaaaaaaaaaaaaaaaaaaaaaaaaaaaaaaaaaaaaaaaaaaaaaaaaaaaaaaaaaa

SEQ ID NO: 10922 - DNA, 5264 bp, synthetic construct
  source 1..5264: mol_type = other DNA
gaaataagagagaaaagaagagtaagaagaaatataagagaattcgccaccatggcccctaagaaaaagcggaaggtgaatatcagcggctctagctgcggcagccccaacagcgccgacaccagcagcgacttcaaggacctgtggaccaagctgaaggaatgccacgaccgggaagtgcagggactccaggtgaaggtcaccaaactcaagcaagaaagaatcctggacgcccagagactggaagaattcttcaccaagaaccagcagctgagagagcagcagaaagtgctgcacgagacaatcaaggttctggaagatagactgcgggccggcctgtgcgacagatgcgccgtgaccgaggaacacatgcgcaaaaagcagcaggagttcgagaacattagacagcaaaatctgaaattgatcacagagctgatgaacgagagaaacacactgcaggaggagaacaagaagctgagcgagcagctgcaacagaagatcgagaatgatcagcaacaccaggccgctgagctggaatgtgaagaggacgtgatccccgacagcccaatcacagctttcagcttttctggcgtgaacagactgaggcggaaggaaaacccccacgtgcggtacatcgagcagacccataccaagctggaacacagcgtgtgtgccaacgagatgagaaaggtgtccaagtcctccacccatccccagcacaaccctaacgaaaatgagatcctggtggctgatacctacgaccagtctcagagccctatggccaaggcccacggcaccagctcttatacccctgataagagctccttcaacctggccaccgtggtggccgagacactgggcctgggcgtgcaggaggaaagcgagacacagggcccaatgagccctctgggagatgagctgtaccactgcctggaaggcaaccacaagaaacagccttttgagtccggctccgagactcctggaacaagcgagagcgctacacctgagggcagccctaagagaaaggtgtccagcgccgagggcgctgccaaggaagagcctaaacggagaagcgccagactgagcgccaagccccccgccaaggtggaagccaagcctaagaaggccgccgctaaggacaagagcagcgataagaaagtccagaccaagggcaagcggggcgccaaaggcaaacaggccgaggtggccaaccaggagacaaaggaagatctgcctgctgagaacggcgaaaccaagaccgaggaatctccagcttctgacgaggccggagagaaggaggccaaaagcgacagcggctctgagacacctggaacaagcgagagcgccaccccggaatcctatgaacaacttgcaccacaaccgtgtgtgggagaaactttacattctagcctcccacgagacagtgaactgtttgtgcctgaagaggggagcagcgagaaggagagcgaggacgcgccaaaaacatctcctccgacgcctgggaaacatggtttggaacagactggggaggaaaaagtgatggtgactgttcctgacaaaaatccaccttgtccttgctgtggtacccgggtaaactctgtgttgaatctgattgaacatctgaaagtgtcacacgggaaaaggggggtttgttttcggtgtgcaaaatgtggaaaggaaaatagtaactatcacagtgttgtttgtcattttaagaaatgcaggggtccagagacggagaaagccccagctggggagtggatttgtgaggtatgcaacagagattttacaaccaaaattggcctgggacaacacaagagattggcacacccagcagtgagaaatcaggaaaggatcgttgcttcccaaccgaaagaaacatcaaatagaggtgctcacaaaaggtgctggacaaaggaggaggaagaattactaataagactggaggctcagttcgagggaaacaaaaatattaataagcttattgcagaacacataaccaccaaaacagctaagcagatcagtgacaaaaggcgattgctgtccagaaagccagcagaggagccacgtgaggagcctggaacgtgtcatcacaccaggagagcagctgcgagcctgagaacggagcctgagatgagtcatcacgcccaggcagaggacagagataatggacctgggagacgccctctgccaggcagggcagctgccggagggagaacaatggacgagataagacgccaccctgataagggcaacggacagcagagacccaccaagcaaaaatcagaagaacagctgcaggcttactataaaaagacactagaggaacgactttcagctggggcacttaacaccttcccccgagcattcaagcaggtaatggaaggccgggatataaagctagtaatcaatcagacagcgcaggactgcttcggatgcctggaatccataagccaaataagaacggcaacccgagataaaaaggacacggtgacccgggagaaacacccaaagaaaccttttcagaagtggatgaagaagagagcaatcaaaaaaggtaattatcttcggttccagcgtttattttatcttgatagagggaaactggctaaaatcattttagatgatattgaatgcttgtcttgtgacataccactcagtgaaatttattcggtttttaaaacaagatgggaaacaactggtagctttaaaagccttggggactttaaaacttacgggaaggctgacaacactgccttcagagaattaattacggctaaagaaattgagaaaaatgtgcaggaaatgagcaaaggctcggctcccggtccagacgggattactcttggggacgtcgtaaagatggatcccgagttttcccggaccatggagattttcaatttatggttaacaactggtaaaatcccggacatggtgagggggtgcagaaccgttttgattccaaaatcatcaaagccggatcgtttgaaagacattaataactggagacctatcacgatcggttccatcttgctgagactgttctccaggattgtaacagctaggctgagcaaagcgtgccccctgaacccaaggcaaagaggctttatcagagcggcgggatgctctgaaaacttaaaactcctgcaaactataatttggtcggccaaaagagaacacagaccactgggtgttgtattcgtggacatcgccaaggcttttgacaccgtaagccaccagcacatcattcatgctttgcagcaaagagaggtggatccccacatcgtcggtctggtgagcaatatgtacgagaacatcagtacgtatatcaccacaaagaggaacacacacacagacaaaatccagatccgggttggagtaaagcagggtgacccgatgtcgccccttttatttaacctggcaatggaccctctattatgcaagctggaagagagtggcaaaggataccaccgaggacagagcagcatcacagcgatggcatttgcagacgatctggttttgctgagcgactcctgggaaaatatgaatacaaatattagcatactggagaccttctgcaatctgaccggactcaaaacacaggggcaaaagtgccacggcttttacatcaagccgacaaagaagtcttacaccatcaatgactgcgctgcctggactatcaacggcacacccctgaacatgatcgaccccggcgaatctgagaaatacctcggcctgcagtttaacccgtggattggaatagcaaggtccggtctctccacaaaactagatttttggcttcagcggatcgatcaagcaccacttaaacctctgcagaaaactgatattctcaaaacatacaccatccctcggctgatctacatagctgaccactcagaagtgaaaagcgcactactcgaaacccttgaccagaagatccggacagcggtcaaggaatggcttcacctacctccgtgcacctgcgatgccatcctgtactcgagcacgagagacggcggtttgggcatcaccaaattggcaggactgatccccagcgtgcaggcccgtagactgcatcggatcgcacagtcatctgacgatacgatgaaatgcttcatggaaaaagagaaaatggaacagctgcataagaaattgtggattcaagctggaggggacagagagaacataccctcgatttgggaagcaccaccgtcgagtgaaccaccaaacaacgtgagcacaaattcggaatgggaagcaccgacccagaaagataaatttccaaagccttgcaattggaggaaaaacgaattcaaaaaatggaccaaattggcatcccaaggccgcggaattgtaaattttgaaagagacaaaattagtaaccattggatccaatactacagacgcatacctcacaggaaactcctcactgcactacaactcagggccaacgtttaccccacgagagaatttctagccaggggtagacaagaccaatacatcaaggcgtgtaggcactgcgatgcggacaacgaatcctgcgcccacatcatcggcaactgcccagtgacacaggacgcccgaatcaagaggcacaattacatctgcgaactgcttctcgaggaggcgaagaagaaggactgggtagtgttcaaggaaccgcacataagggattccaacaaggaactgtacaaacctgacctgatatttgtgaaggatgggcgtgcacttgtcgtggatgtgacagtacggtatgaagcagccaaatcatcgctggaggaagccgctgcagagaaagtgagaaagtacaaacacctggaaacggaagtaagacatctcacgaatgcaaaggacgttacttttgtgggctttcccctaggagcgcgggggaaatggcaccaagataactttaaacttttgactgagcttggcctctccaaatcgaggcaagtgaaaatggcagagactttttccacagtagcgctcttttcatctgtggacattgtacatatgtttgccagtagggccagaaaatctatggttatgtgataataggctgccttctgcggggcttgccttctggccatgcccttcttctctcccttgcacctgtacctcttggtctttgaataaagcctgagtaggaaggaccggtaaaaaaaaaaaaaaaaaaaaaaaaaaaaaaacgttgactaaaaaaaaaaaaaaaaaaaaaaaaaaaaaaaaaaaaaaaaaaaaaaaaaaaaaaaaaaaaaaaaaaaaaa

SEQ ID NO: 10923 - DNA, 5264 bp, synthetic construct
  source 1..5264: mol_type = other DNA
gaaataagagagaaaagaagagtaagaagaaatataagagaattcgccaccatggcccctaagaaaaagcggaaggtgaatatcagcggctctagctgcggcagccccaacagcgccgacaccagcagcgacttcaaggacctgtggaccaagctgaaggaatgccacgaccgggaagtgcagggactccaggtgaaggtcaccaaactcaagcaagaaagaatcctggacgcccagagactggaagaattcttcaccaagaaccagcagctgagagagcagcagaaagtgctgcacgagacaatcaaggttctggaagatagactgcgggccggcctgtgcgacagatgcgccgtgaccgaggaacacatgcgcaaaaagcagcaggagttcgagaacattagacagcaaaatctgaaattgatcacagagctgatgaacgagagaaacacactgcaggaggagaacaagaagctgagcgagcagctgcaacagaagatcgagaatgatcagcaacaccaggccgctgagctggaatgtgaagaggacgtgatccccgacagcccaatcacagctttcagcttttctggcgtgaacagactgaggcggaaggaaaacccccacgtgcggtacatcgagcagacccataccaagctggaacacagcgtgtgtgccaacgagatgagaaaggtgtccaagtcctccacccatccccagcacaaccctaacgaaaatgagatcctggtggctgatacctacgaccagtctcagagccctatggccaaggcccacggcaccagctcttatacccctgataagagctccttcaacctggccaccgtggtggccgagacactgggcctgggcgtgcaggaggaaagcgagacacagggcccaatgagccctctgggagatgagctgtaccactgcctggaaggcaaccacaagaaacagccttttgagtccggctccgagactcctggaacaagcgagagcgctacacctgagggcagccctaagagaaaggtgtccagcgccgagggcgctgccaaggaagagcctaaacggagaagcgccagactgagcgccaagccccccgccaaggtggaagccaagcctaagaaggccgccgctaaggacaagagcagcgataagaaagtccagaccaagggcaagcggggcgccaaaggcaaacaggccgaggtggccaaccaggagacaaaggaagatctgcctgctgagaacggcgaaaccaagaccgaggaatctccagcttctgacgaggccggagagaaggaggccaaaagcgacagcggctctgagacacctggaacaagcgagagcgccaccccggaatcctatgaacaacttgcaccacaaccgtgtgtgggagaaactttacattctagcctcccacgagacagtgaactgtttgtgcctgaagaggggagcagcgagaaggagagcgaggacgcgccaaaaacatctcctccgacgcctgggaaacatggtttggaacagactggggaggaaaaagtgatggtgactgttcctgacaaaaatccaccttgtccttgctgtggtacccgggtaaactctgtgttgaatctgattgaacatctgaaagtgtcacacgggaaaaggggggtttgttttcggtgtgcaaaatgtggaaaggaaaatagtaactatcacagtgttgtttgtcattttaagaaatgcaggggtccagagacggagaaagccccagctggggagtggatttgtgaggtatgcaacagagattttacaaccaaaattggcctgggacaacacaagagattggcacacccagcagtgagaaatcaggaaaggatcgttgcttcccaaccgaaagaaacatcaaatagaggtgctcacaaaaggtgctggacaaaggaggaggaagaattactaataagactggaggctcagttcgagggaaacaaaaatattaataagcttattgcagaacacataaccaccaaaacagctaagcagatcagtgacaaaaggcgattgctgtccagaaagccagcagaggagccacgtgaggagcctggaacgtgtcatcacaccaggagagcagctgcgagcctgagaacggagcctgagatgagtcatcacgcccaggcagaggacagagataatggacctgggagacgccctctgccaggcagggcagctgccggagggagaacaatggacgagataagacgccaccctgataagggcaacggacagcagagacccaccaagcaaaaatcagaagaacagctgcaggcttactataaaaagacactagaggaacgactttcagctggggcacttaacaccttcccccgagcattcaagcaggtaatggaaggccgggatataaagctagtaatcaatcagacagcgcaggactgcttcggatgcctggaatccataagccaaataagaacggcaacccgagataaaaaggacacggtgacccgggagaaacacccaaagaaaccttttcagaagtggatgaagaagagagcaatcaaaaaaggtaattatcttcggttccagcgtttattttatcttgatagagggaaactggctaaaatcattttagatgatattgaatgcttgtcttgtgacataccactcagtgaaatttattcggtttttaaaacaagatgggaaacaactggtagctttaaaagccttggggactttaaaacttacgggaaggctgacaacactgccttcagagaattaattacggctaaagaaattgagaaaaatgtgcaggaaatgagcaaaggctcggctcccggtccagacgggattactcttggggacgtcgtaaagatggatcccgagttttcccggaccatggagattttcaatttatggttaacaactggtaaaatcccggacatggtgagggggtgcagaaccgttttgattccaaaatcatcaaagccggatcgtttgaaagacattaataactggagacctatcacgatcggttccatcttgctgagactgttctccaggattgtaacagctaggctgagcaaagcgtgccccctgaacccaaggcaaagaggctttatcagagcggcgggatgctctgaaaacttaaaactcctgcaaactataatttggtcggccaaaagagaacacagaccactgggtgttgtattcgtggacatcgccaaggcttttgacaccgtaagccaccagcacatcattcatgctttgcagcaaagagaggtggatccccacatcgtcggtctggtgagcaatatgtacgagaacatcagtacgtatatcaccacaaagaggaacacacacacagacaaaatccagatccgggttggagtaaagcagggtgacccgatgtcgccccttttatttaacctggcaatggaccctctattatgcaagctggaagagagtggcaaaggataccaccgaggacagagcagcatcacagcgatggcatttgcagacgatctggttttgctgagcgactcctgggaaaatatgaatacaaatattagcatactggagaccttctgcaatctgaccggactcaaaacacaggggcaaaagtgccacggcttttacatcaagccgacaaagaagtcttacaccatcaatgactgcgctgcctggactatcaacggcacacccctgaacatgatcgaccccggcgaatctgagaaatacctcggcctgcagtttgacccgtggattggaatagcaaggcccggtctctccacaaaactagatttttggcttcagcggatcgatcaagcaccacttaaacctctgcagaaaactgatattctcaaaacatacaccatccctcggctgatctacatagctgaccactcagaagtgaaaagcgcactactcgaaacccttgaccagaagatccggacagcggtcaaggaatggcttcacctacctccgtgcacctgcgatgccatcctgtactcgagcacgagagacggcggtttgggcatcaccaaattggcaggactgatccccagcgtgcaggcccgtagactgcatcggatcgcacagtcatctgacgatacgatgaaatgcttcatggaaaaagagaaaatggaacagctgcataagaaattgtggattcaagctggaggggacagagagaacataccctcgatttgggaagcaccaccgtcgagtgaaccaccaaacaacgtgagcacaaattcggaatgggaagcaccgacccagaaagataaatttccaaagccttgcaattggaggaaaaacgaattcaaaaaatggaccaaattggcatcccaaggccgcggaattgtaaattttgaaagagacaaaattagtaaccattggatccaatactacagacgcatacctcacaggaaactcctcactgcactacaactcagggccaacgtttaccccacgagagaatttctagccaggggtagacaagaccaatacatcaaggcgtgtaggcactgcgatgcggacaacgaatcctgcgcccacatcatcggcaactgcccagtgacacaggacgcccgaatcaagaggcacaattacatctgcgaactgcttctcgaggaggcgaagaagaaggactgggtagtgttcaaggaaccgcacataagggattccaacaaggaactgtacaaacctgacctgatatttgtgaaggatgggcgtgcacttgtcgtggatgtgacagtacggtatgaagcagccaaatcatcgctggaggaagccgctgcagagaaagtgagaaagtacaaacacctggaaacggaagtaagacatctcacgaatgcaaaggacgttacttttgtgggctttcccctaggagcgcgggggaaatggcaccaagataactttaaacttttgactgagcttggcctctccaaatcgaggcaagtgaaaatggcagagactttttccacagtagcgctcttttcatctgtggacattgtacatatgtttgccagtagggccagaaaatctatggttatgtgataataggctgccttctgcggggcttgccttctggccatgcccttcttctctcccttgcacctgtacctcttggtctttgaataaagcctgagtaggaaggaccggtaaaaaaaaaaaaaaaaaaaaaaaaaaaaaaacgttgactaaaaaaaaaaaaaaaaaaaaaaaaaaaaaaaaaaaaaaaaaaaaaaaaaaaaaaaaaaaaaaaaaaaaaa

SEQ ID NO: 10924 - DNA, 5264 bp, synthetic construct; identical to SEQ ID NO: 10814
  source 1..5264: mol_type = other DNA

SEQ ID NO: 10925 - DNA, 5264 bp, synthetic construct
  source 1..5264: mol_type = other DNA
gaaataagagagaaaagaagagtaagaagaaatataagagaattcgccaccatggcccctaagaaaaagcggaaggtgaatatcagcggctctagctgcggcagccccaacagcgccgacaccagcagcgacttcaaggacctgtggaccaagctgaaggaatgccacgaccgggaagtgcagggactccaggtgaaggtcaccaaactcaagcaagaaagaatcctggacgcccagagactggaagaattcttcaccaagaaccagcagctgagagagcagcagaaagtgctgcacgagacaatcaaggttctggaagatagactgcgggccggcctgtgcgacagatgcgccgtgaccgaggaacacatgcgcaaaaagcagcaggagttcgagaacattagacagcaaaatctgaaattgatcacagagctgatgaacgagagaaacacactgcaggaggagaacaagaagctgagcgagcagctgcaacagaagatcgagaatgatcagcaacaccaggccgctgagctggaatgtgaagaggacgtgatccccgacagcccaatcacagctttcagcttttctggcgtgaacagactgaggcggaaggaaaacccccacgtgcggtacatcgagcagacccataccaagctggaacacagcgtgtgtgccaacgagatgagaaaggtgtccaagtcctccacccatccccagcacaaccctaacgaaaatgagatcctggtggctgatacctacgaccagtctcagagccctatggccaaggcccacggcaccagctcttatacccctgataagagctccttcaacctggccaccgtggtggccgagacactgggcctgggcgtgcaggaggaaagcgagacacagggcccaatgagccctctgggagatgagctgtaccactgcctggaaggcaaccacaagaaacagccttttgagtccggctccgagactcctggaacaagcgagagcgctacacctgagggcagccctaagagaaaggtgtccagcgccgagggcgctgccaaggaagagcctaaacggagaagcgccagactgagcgccaagccccccgccaaggtggaagccaagcctaagaaggccgccgctaaggacaagagcagcgataagaaagtccagaccaagggcaagcggggcgccaaaggcaaacaggccgaggtggccaaccaggagacaaaggaagatctgcctgctgagaacggcgaaaccaagaccgaggaatctccagcttctgacgaggccggagagaaggaggccaaaagcgacagcggctctgagacacctggaacaagcgagagcgccaccccggaatcctatgaacaacttgcaccacaaccgtgtgtgggagaaactttacattctagcctcccacgagacagtgaactgtttgtgcctgaagaggggagcagcgagaaggagagcgaggacgcgccaaaaacatctcctccgacgcctgggaaacatggtttggaacagactggggaggaaaaagtgatggtgactgttcctgacaaaaatccaccttgtccttgctgtggtacccgggtaaactctgtgttgaatctgattgaacatctgaaagtgtcacacgggaaaaggggggtttgttttcggtgtgcaaaatgtggaaaggaaaatagtaactatcacagtgttgtttgtcattttaagaaatgcaggggtccagagacggagaaagccccagctggggagtggatttgtgaggtatgcaacagagattttacaaccaaaattggcctgggacaacacaagagattggcacacccagcagtgagaaatcaggaaaggatcgttgcttcccaaccgaaagaaacatcaaatagaggtgctcacaaaaggtgctggacaaaggaggaggaagaattactaataagactggaggctcagttcgagggaaacaaaaatattaataagcttattgcagaacacataaccaccaaaacagctaagcagatcagtgacaaaaggcgattgctgtccagaaagccagcagaggagccacgtgaggagcctggaacgtgtcatcacaccaggagagcagctgcgagcctgagaacggagcctgagatgagtcatcacgcccaggcagaggacagagataatggacctgggagacgccctctgccaggcagggcagctgccggagggagaacaatggacgagataagacgccaccctgataagggcaacggacagcagagacccaccaagcaaaaatcagaagaacagctgcaggcttactataaaaagacactagaggaacgactttcagctggggcacttaacaccttcccccgagcattcaagcaggtaatggaaggccgggatataaagctagtaatcaatcagacagcgcaggactgcttcggatgcctggaatccataagccaaataagaacggcaacccgagataaaaaggacacggtgacccgggagaaacacccaaagaaaccttttcagaagtggatgaagaagagagcaatcaaaaaaggtaattatcttcggttccagcgtttattttatcttgatagagggaaactggctaaaatcattttagatgatattgaatgcttgtcttgtgacataccactcagtgaaatttattcggtttttaaaacaagatgggaaacaactggtagctttaaaagccttggggactttaaaacttacgggaaggctgacaacactgccttcagagaattaattacggctaaagaaattgagaaaaatgtgcaggaaatgagcaaaggctcggctcccggtccagacgggattactcttggggacgtcgtaaagatggatcccgagttttcccggaccatggagattttcaatttatggttaacaactggtaaaatcccggacatggtgagggggtgcagaaccgttttgattccaaaatcatcaaagccggatcgtttgaaagacattaataactggagacctatcacgatcggttccatcttgctgagactgttctccaggattgtaacagctaggctgagcaaagcgtgccccctgaacccaaggcaaagaggctttatcagagcggcgggatgctctgaaaacttaaaactcctgcaaactataatttggtcggccaaaagagaacacagaccactgggtgttgtattcgtggacatcgccaaggcttttgacaccgtaagccaccagcacatcattcatgctttgcagcaaagagaggtggatccccacatcgtcggtctggtgagcaatatgtacgagaacatcagtacgtatatcaccacaaagaggaacacacacacagacaaaatccagatccgggttggagtaaagcagggtgacccgatgtcgccccttttatttaacctggcaatggaccctctattatgcaagctggaagagagtggcaaaggataccaccgaggacagagcagcatcacagcgatggcatttgcagacgatctggttttgctgagcgactcctgggaaaatatgaatacaaatattagcatactggagaccttctgcaatctgaccggactcaaaacacaggggcaaaagtgccacggcttttacatcaagccgacaaagaagtcttacaccatcaatgactgcgctgcctggactatcaacggcacacccctgaacatgatcgaccccggcgaatctgagaaatacctcggcctgcagtttgacccgtggattggaatagcaaggtccggtctctccacaaaactagataagtggcttcagcggatcgatcaagcaccacttaaacctctgcagaaaactgatattctcaaaacatacaccatccctcggctgatctacatagctgaccactcagaagtgaaaagcgcactactcgaaacccttgaccagaagatccggacagcggtcaaggaatggcttcacctacctccgtgcacctgcgatgccatcctgtactcgagcacgagagacggcggtttgggcatcaccaaattggcaggactgatccccagcgtgcaggcccgtagactgcatcggatcgcacagtcatctgacgatacgatgaaatgcttcatggaaaaagagaaaatggaacagctgcataagaaattgtggattcaagctggaggggacagagagaacataccctcgatttgggaagcaccaccgtcgagtgaaccaccaaacaacgtgagcacaaattcggaatgggaagcaccgacccagaaagataaatttccaaagccttgcaattggaggaaaaacgaattcaaaaaatggaccaaattggcatcccaaggccgcggaattgtaaattttgaaagagacaaaattagtaaccattggatccaatactacagacgcatacctcacaggaaactcctcactgcactacaactcagggccaacgtttaccccacgagagaatttctagccaggggtagacaagaccaatacatcaaggcgtgtaggcactgcgatgcggacaacgaatcctgcgcccacatcatcggcaactgcccagtgacacaggacgcccgaatcaagaggcacaattacatctgcgaactgcttctcgaggaggcgaagaagaaggactgggtagtgttcaaggaaccgcacataagggattccaacaaggaactgtacaaacctgacctgatatttgtgaaggatgggcgtgcacttgtcgtggatgtgacagtacggtatgaagcagccaaatcatcgctggaggaagccgctgcagagaaagtgagaaagtacaaacacctggaaacggaagtaagacatctcacgaatgcaaaggacgttacttttgtgggctttcccctaggagcgcgggggaaatggcaccaagataactttaaacttttgactgagcttggcctctccaaatcgaggcaagtgaaaatggcagagactttttccacagtagcgctcttttcatctgtggacattgtacatatgtttgccagtagggccagaaaatctatggttatgtgataataggctgccttctgcggggcttgccttctggccatgcccttcttctctcccttgcacctgtacctcttggtctttgaataaagcctgagtaggaaggaccggtaaaaaaaaaaaaaaaaaaaaaaaaaaaaaaacgttgactaaaaaaaaaaaaaaaaaaaaaaaaaaaaaaaaaaaaaaaaaaaaaaaaaaaaaaaaaaaaaaaaaaaaaa

SEQ ID NO: 10926 - DNA, 5264 bp, synthetic construct
  source 1..5264: mol_type = other DNA
gaaataagagagaaaagaagagtaagaagaaatataagagaattcgccaccatggcccctaagaaaaagcggaaggtgaatatcagcggctctagctgcggcagccccaacagcgccgacaccagcagcgacttcaaggacctgtggaccaagctgaaggaatgccacgaccgggaagtgcagggactccaggtgaaggtcaccaaactcaagcaagaaagaatcctggacgcccagagactggaagaattcttcaccaagaaccagcagctgagagagcagcagaaagtgctgcacgagacaatcaaggttctggaagatagactgcgggccggcctgtgcgacagatgcgccgtgaccgaggaacacatgcgcaaaaagcagcaggagttcgagaacattagacagcaaaatctgaaattgatcacagagctgatgaacgagagaaacacactgcaggaggagaacaagaagctgagcgagcagctgcaacagaagatcgagaatgatcagcaacaccaggccgctgagctggaatgtgaagaggacgtgatccccgacagcccaatcacagctttcagcttttctggcgtgaacagactgaggcggaaggaaaacccccacgtgcggtacatcgagcagacccataccaagctggaacacagcgtgtgtgccaacgagatgagaaaggtgtccaagtcctccacccatccccagcacaaccctaacgaaaatgagatcctggtggctgatacctacgaccagtctcagagccctatggccaaggcccacggcaccagctcttatacccctgataagagctccttcaacctggccaccgtggtggccgagacactgggcctgggcgtgcaggaggaaagcgagacacagggcccaatgagccctctgggagatgagctgtaccactgcctggaaggcaaccacaagaaacagccttttgagtccggctccgagactcctggaacaagcgagagcgctacacctgagggcagccctaagagaaaggtgtccagcgccgagggcgctgccaaggaagagcctaaacggagaagcgccagactgagcgccaagccccccgccaaggtggaagccaagcctaagaaggccgccgctaaggacaagagcagcgataagaaagtccagaccaagggcaagcggggcgccaaaggcaaacaggccgaggtggccaaccaggagacaaaggaagatctgcctgctgagaacggcgaaaccaagaccgaggaatctccagcttctgacgaggccggagagaaggaggccaaaagcgacagcggctctgagacacctggaacaagcgagagcgccaccccggaatcctatgaacaacttgcaccacaaccgtgtgtgggagaaactttacattctagcctcccacgagacagtgaactgtttgtgcctgaagaggggagcagcgagaaggagagcgaggacgcgccaaaaacatctcctccgacgcctgggaaacatggtttggaacagactggggaggaaaaagtgatggtgactgttcctgacaaaaatccaccttgtccttgctgtggtacccgggtaaactctgtgttgaatctgattgaacatctgaaagtgtcacacgggaaaaggggggtttgttttcggtgtgcaaaatgtggaaaggaaaatagtaactatcacagtgttgtttgtcattttaagaaatgcaggggtccagagacggagaaagccccagctggggagtggatttgtgaggtatgcaacagagattttacaaccaaaattggcctgggacaacacaagagattggcacacccagcagtgagaaatcaggaaaggatcgttgcttcccaaccgaaagaaacatcaaatagaggtgctcacaaaaggtgctggacaaaggaggaggaagaattactaataagactggaggctcagttcgagggaaacaaaaatattaataagcttattgcagaacacataaccaccaaaacagctaagcagatcagtgacaaaaggcgattgctgtccagaaagccagcagaggagccacgtgaggagcctggaacgtgtcatcacaccaggagagcagctgcgagcctgagaacggagcctgagatgagtcatcacgcccaggcagaggacagagataatggacctgggagacgccctctgccaggcagggcagctgccggagggagaacaatggacgagataagacgccaccctgataagggcaacggacagcagagacccaccaagcaaaaatcagaagaacagctgcaggcttactataaaaagacactagaggaacgactttcagctggggcacttaacaccttcccccgagcattcaagcaggtaatggaaggccgggatataaagctagtaatcaatcagacagcgcaggactgcttcggatgcctggaatccataagccaaataagaacggcaacccgagataaaaaggacacggtgacccgggagaaacacccaaagaaaccttttcagaagtggatgaagaagagagcaatcaaaaaaggtaattatcttcggttccagcgtttattttatcttgatagagggaaactggctaaaatcattttagatgatattgaatgcttgtcttgtgacataccactcagtgaaatttattcggtttttaaaacaagatgggaaacaactggtagctttaaaagccttggggactttaaaacttacgggaaggctgacaacactgccttcagagaattaattacggctaaagaaattgagaaaaatgtgcaggaaatgagcaaaggctcggctcccggtccagacgggattactcttggggacgtcgtaaagatggatcccgagttttcccggaccatggagattttcaatttatggttaacaactggtaaaatcccggacatggtgagggggtgcagaaccgttttgattccaaaatcatcaaagccggatcgtttgaaagacattaataactggagacctatcacgatcggttccatcttgctgagactgttctccaggattgtaacagctaggctgagcaaagcgtgccccctgaacccaaggcaaagaggctttatcagagcggcgggatgctctgaaaacttaaaactcctgcaaactataatttggtcggccaaaagagaacacagaccactgggtgttgtattcgtggacatcgccaaggcttttgacaccgtaagccaccagcacatcattcatgctttgcagcaaagagaggtggatccccacatcgtcggtctggtgagcaatatgtacgagaacatcagtacgtatatcaccacaaagaggaacacacacacagacaaaatccagatccgggttggagtaaagcagggtgacccgatgtcgccccttttatttaacctggcaatggaccctctattatgcaagctggaagagagtggcaaaggataccaccgaggacagagcagcatcacagcgatggcatttgcagacgatctggttttgctgagcgactcctgggaaaatatgaatacaaatattagcatactggagaccttctgcaatctgaccggactcaaaacacaggggcaaaagtgccacggcttttacatcaagccgacaaagaagtcttacaccatcaatgactgcgctgcctggactatcaacggcacacccctgaacatgatcgaccccggcgaatctgagaaatacctcggcctgcagtttgacccgtggattggaatagcaaggtccggtctctccacaaaactagatttttggcttaagcggatcgatcaagcaccacttaaacctctgcagaaaactgatattctcaaaacatacaccatccctcggctgatctacatagctgaccactcagaagtgaaaagcgcactactcgaaacccttgaccagaagatccggacagcggtcaaggaatggcttcacctacctccgtgcacctgcgatgccatcctgtactcgagcacgagagacggcggtttgggcatcaccaaattggcaggactgatccccagcgtgcaggcccgtagactgcatcggatcgcacagtcatctgacgatacgatgaaatgcttcatggaaaaagagaaaatggaacagctgcataagaaattgtggattcaagctggaggggacagagagaacataccctcgatttgggaagcaccaccgtcgagtgaaccaccaaacaacgtgagcacaaattcggaatgggaagcaccgacccagaaagataaatttccaaagccttgcaattggaggaaaaacgaattcaaaaaatggaccaaattggcatcccaaggccgcggaattgtaaattttgaaagagacaaaattagtaaccattggatccaatactacagacgcatacctcacaggaaactcctcactgcactacaactcagggccaacgtttaccccacgagagaatttctagccaggggtagacaagaccaatacatcaaggcgtgtaggcactgcgatgcggacaacgaatcctgcgcccacatcatcggcaactgcccagtgacacaggacgcccgaatcaagaggcacaattacatctgcgaactgcttctcgaggaggcgaagaagaaggactgggtagtgttcaaggaaccgcacataagggattccaacaaggaactgtacaaacctgacctgatatttgtgaaggatgggcgtgcacttgtcgtggatgtgacagtacggtatgaagcagccaaatcatcgctggaggaagccgctgcagagaaagtgagaaagtacaaacacctggaaacggaagtaagacatctcacgaatgcaaaggacgttacttttgtgggctttcccctaggagcgcgggggaaatggcaccaagataactttaaacttttgactgagcttggcctctccaaatcgaggcaagtgaaaatggcagagactttttccacagtagcgctcttttcatctgtggacattgtacatatgtttgccagtagggccagaaaatctatggttatgtgataataggctgccttctgcggggcttgccttctggccatgcccttcttctctcccttgcacctgtacctcttggtctttgaataaagcctgagtaggaaggaccggtaaaaaaaaaaaaaaaaaaaaaaaaaaaaaaacgttgactaaaaaaaaaaaaaaaaaaaaaaaaaaaaaaaaaaaaaaaaaaaaaaaaaaaaaaaaaaaaaaaaaaaaaa

SEQ ID NO: 10927 - DNA, 5264 bp, synthetic construct
  source 1..5264: mol_type = other DNA
gaaataagagagaaaagaagagtaagaagaaatataagagaattcgccaccatggcccctaagaaaaagcggaaggtgaatatcagcggctctagctgcggcagccccaacagcgccgacaccagcagcgacttcaaggacctgtggaccaagctgaaggaatgccacgaccgggaagtgcagggactccaggtgaaggtcaccaaactcaagcaagaaagaatcctggacgcccagagactggaagaattcttcaccaagaaccagcagctgagagagcagcagaaagtgctgcacgagacaatcaaggttctggaagatagactgcgggccggcctgtgcgacagatgcgccgtgaccgaggaacacatgcgcaaaaagcagcaggagttcgagaacattagacagcaaaatctgaaattgatcacagagctgatgaacgagagaaacacactgcaggaggagaacaagaagctgagcgagcagctgcaacagaagatcgagaatgatcagcaacaccaggccgctgagctggaatgtgaagaggacgtgatccccgacagcccaatcacagctttcagcttttctggcgtgaacagactgaggcggaaggaaaacccccacgtgcggtacatcgagcagacccataccaagctggaacacagcgtgtgtgccaacgagatgagaaaggtgtccaagtcctccacccatccccagcacaaccctaacgaaaatgagatcctggtggctgatacctacgaccagtctcagagccctatggccaaggcccacggcaccagctcttatacccctgataagagctccttcaacctggccaccgtggtggccgagacactgggcctgggcgtgcaggaggaaagcgagacacagggcccaatgagccctctgggagatgagctgtaccactgcctggaaggcaaccacaagaaacagccttttgagtccggctccgagactcctggaacaagcgagagcgctacacctgagggcagccctaagagaaaggtgtccagcgccgagggcgctgccaaggaagagcctaaacggagaagcgccagactgagcgccaagccccccgccaaggtggaagccaagcctaagaaggccgccgctaaggacaagagcagcgataagaaagtccagaccaagggcaagcggggcgccaaaggcaaacaggccgaggtggccaaccaggagacaaaggaagatctgcctgctgagaacggcgaaaccaagaccgaggaatctccagcttctgacgaggccggagagaaggaggccaaaagcgacagcggctctgagacacctggaacaagcgagagcgccaccccggaatcctatgaacaacttgcaccacaaccgtgtgtgggagaaactttacattctagcctcccacgagacagtgaactgtttgtgcctgaagaggggagcagcgagaaggagagcgaggacgcgccaaaaacatctcctccgacgcctgggaaacatggtttggaacagactggggaggaaaaagtgatggtgactgttcctgacaaaaatccaccttgtccttgctgtggtacccgggtaaactctgtgttgaatctgattgaacatctgaaagtgtcacacgggaaaaggggggtttgttttcggtgtgcaaaatgtggaaaggaaaatagtaactatcacagtgttgtttgtcattttaagaaatgcaggggtccagagacggagaaagccccagctggggagtggatttgtgaggtatgcaacagagattttacaaccaaaattggcctgggacaacacaagagattggcacacccagcagtgagaaatcaggaaaggatcgttgcttcccaaccgaaagaaacatcaaatagaggtgctcacaaaaggtgctggacaaaggaggaggaagaattactaataagactggaggctcagttcgagggaaacaaaaatattaataagcttattgcagaacacataaccaccaaaacagctaagcagatcagtgacaaaaggcgattgctgtccagaaagccagcagaggagccacgtgaggagcctggaacgtgtcatcacaccaggagagcagctgcgagcctgagaacggagcctgagatgagtcatcacgcccaggcagaggacagagataatggacctgggagacgccctctgccaggcagggcagctgccggagggagaacaatggacgagataagacgccaccctgataagggcaacggacagcagagacccaccaagcaaaaatcagaagaacagctgcaggcttactataaaaagacactagaggaacgactttcagctggggcacttaacaccttcccccgagcattcaagcaggtaatggaaggccgggatataaagctagtaatcaatcagacagcgcaggactgcttcggatgcctggaatccataagccaaataagaacggcaacccgagataaaaaggacacggtgacccgggagaaacacccaaagaaaccttttcagaagtggatgaagaagagagcaatcaaaaaaggtaattatcttcggttccagcgtttattttatcttgatagagggaaactggctaaaatcattttagatgatattgaatgcttgtcttgtgacataccactcagtgaaatttattcggtttttaaaacaagatgggaaacaactggtagctttaaaagccttggggactttaaaacttacgggaaggctgacaacactgccttcagagaattaattacggctaaagaaattgagaaaaatgtgcaggaaatgagcaaaggctcggctcccggtccagacgggattactcttggggacgtcgtaaagatggatcccgagttttcccggaccatggagattttcaatttatggttaacaactggtaaaatcccggacatggtgagggggtgcagaaccgttttgattccaaaatcatcaaagccggatcgtttgaaagacattaataactggagacctatcacgatcggttccatcttgctgagactgttctccaggattgtaacagctaggctgagcaaagcgtgccccctgaacccaaggcaaagaggctttatcagagcggcgggatgctctgaaaacttaaaactcctgcaaactataatttggtcggccaaaagagaacacagaccactgggtgttgtattcgtggacatcgccaaggcttttgacaccgtaagccaccagcacatcattcatgctttgcagcaaagagaggtggatccccacatcgtcggtctggtgagcaatatgtacgagaacatcagtacgtatatcaccacaaagaggaacacacacacagacaaaatccagatccgggttggagtaaagcagggtgacccgatgtcgccccttttatttaacctggcaatggaccctctattatgcaagctggaagagagtggcaaaggataccaccgaggacagagcagcatcacagcgatggcatttgcagacgatctggttttgctgagcgactcctgggaaaatatgaatacaaatattagcatactggagaccttctgcaatctgaccggactcaaaacacaggggcaaaagtgccacggcttttacatcaagccgacaaagaagtcttacaccatcaatgactgcgctgcctggactatcaacggcacacccctgaacatgatcgaccccggcgaatctgagaaatacctcggcctgcagtttgacccgtggattggaatagcaaggtccggtctctccacaaaactagatttttggcttcagcggatcgataaggcaccacttaaacctctgcagaaaactgatattctcaaaacatacaccatccctcggctgatctacatagctgaccactcagaagtgaaaagcgcactactcgaaacccttgaccagaagatccggacagcggtcaaggaatggcttcacctacctccgtgcacctgcgatgccatcctgtactcgagcacgagagacggcggtttgggcatcaccaaattggcaggactgatccccagcgtgcaggcccgtagactgcatcggatcgcacagtcatctgacgatacgatgaaatgcttcatggaaaaagagaaaatggaacagctgcataagaaattgtggattcaagctggaggggacagagagaacataccctcgatttgggaagcaccaccgtcgagtgaaccaccaaacaacgtgagcacaaattcggaatgggaagcaccgacccagaaagataaatttccaaagccttgcaattggaggaaaaacgaattcaaaaaatggaccaaattggcatcccaaggccgcggaattgtaaattttgaaagagacaaaattagtaaccattggatccaatactacagacgcatacctcacaggaaactcctcactgcactacaactcagggccaacgtttaccccacgagagaatttctagccaggggtagacaagaccaatacatcaaggcgtgtaggcactgcgatgcggacaacgaatcctgcgcccacatcatcggcaactgcccagtgacacaggacgcccgaatcaagaggcacaattacatctgcgaactgcttctcgaggaggcgaagaagaaggactgggtagtgttcaaggaaccgcacataagggattccaacaaggaactgtacaaacctgacctgatatttgtgaaggatgggcgtgcacttgtcgtggatgtgacagtacggtatgaagcagccaaatcatcgctggaggaagccgctgcagagaaagtgagaaagtacaaacacctggaaacggaagtaagacatctcacgaatgcaaaggacgttacttttgtgggctttcccctaggagcgcgggggaaatggcaccaagataactttaaacttttgactgagcttggcctctccaaatcgaggcaagtgaaaatggcagagactttttccacagtagcgctcttttcatctgtggacattgtacatatgtttgccagtagggccagaaaatctatggttatgtgataataggctgccttctgcggggcttgccttctggccatgcccttcttctctcccttgcacctgtacctcttggtctttgaataaagcctgagtaggaaggaccggtaaaaaaaaaaaaaaaaaaaaaaaaaaaaaaacgttgactaaaaaaaaaaaaaaaaaaaaaaaaaaaaaaaaaaaaaaaaaaaaaaaaaaaaaaaaaaaaaaaaaaaaaa

SEQ ID NO: 10928 - DNA, 5264 bp, synthetic construct
  source 1..5264: mol_type = other DNA
gaaataagagagaaaagaagagtaagaagaaatataagagaattcgccaccatggcccctaagaaaaagcggaaggtgaatatcagcggctctagctgcggcagccccaacagcgccgacaccagcagcgacttcaaggacctgtggaccaagctgaaggaatgccacgaccgggaagtgcagggactccaggtgaaggtcaccaaactcaagcaagaaagaatcctggacgcccagagactggaagaattcttcaccaagaaccagcagctgagagagcagcagaaagtgctgcacgagacaatcaaggttctggaagatagactgcgggccggcctgtgcgacagatgcgccgtgaccgaggaacacatgcgcaaaaagcagcaggagttcgagaacattagacagcaaaatctgaaattgatcacagagctgatgaacgagagaaacacactgcaggaggagaacaagaagctgagcgagcagctgcaacagaagatcgagaatgatcagcaacaccaggccgctgagctggaatgtgaagaggacgtgatccccgacagcccaatcacagctttcagcttttctggcgtgaacagactgaggcggaaggaaaacccccacgtgcggtacatcgagcagacccataccaagctggaacacagcgtgtgtgccaacgagatgagaaaggtgtccaagtcctccacccatccccagcacaaccctaacgaaaatgagatcctggtggctgatacctacgaccagtctcagagccctatggccaaggcccacggcaccagctcttatacccctgataagagctccttcaacctggccaccgtggtggccgagacactgggcctgggcgtgcaggaggaaagcgagacacagggcccaatgagccctctgggagatgagctgtaccactgcctggaaggcaaccacaagaaacagccttttgagtccggctccgagactcctggaacaagcgagagcgctacacctgagggcagccctaagagaaaggtgtccagcgccgagggcgctgccaaggaagagcctaaacggagaagcgccagactgagcgccaagccccccgccaaggtggaagccaagcctaagaaggccgccgctaaggacaagagcagcgataagaaagtccagaccaagggcaagcggggcgccaaaggcaaacaggccgaggtggccaaccaggagacaaaggaagatctgcctgctgagaacggcgaaaccaagaccgaggaatctccagcttctgacgaggccggagagaaggaggccaaaagcgacagcggctctgagacacctggaacaagcgagagcgccaccccggaatcctatgaacaacttgcaccacaaccgtgtgtgggagaaactttacattctagcctcccacgagacagtgaactgtttgtgcctgaagaggggagcagcgagaaggagagcgaggacgcgccaaaaacatctcctccgacgcctgggaaacatggtttggaacagactggggaggaaaaagtgatggtgactgttcctgacaaaaatccaccttgtccttgctgtggtacccgggtaaactctgtgttgaatctgattgaacatctgaaagtgtcacacgggaaaaggggggtttgttttcggtgtgcaaaatgtggaaaggaaaatagtaactatcacagtgttgtttgtcattttaagaaatgcaggggtccagagacggagaaagccccagctggggagtggatttgtgaggtatgcaacagagattttacaaccaaaattggcctgggacaacacaagagattggcacacccagcagtgagaaatcaggaaaggatcgttgcttcccaaccgaaagaaacatcaaatagaggtgctcacaaaaggtgctggacaaaggaggaggaagaattactaataagactggaggctcagttcgagggaaacaaaaatattaataagcttattgcagaacacataaccaccaaaacagctaagcagatcagtgacaaaaggcgattgctgtccagaaagccagcagaggagccacgtgaggagcctggaacgtgtcatcacaccaggagagcagctgcgagcctgagaacggagcctgagatgagtcatcacgcccaggcagaggacagagataatggacctgggagacgccctctgccaggcagggcagctgccggagggagaacaatggacgagataagacgccaccctgataagggcaacggacagcagagacccaccaagcaaaaatcagaagaacagctgcaggcttactataaaaagacactagaggaacgactttcagctggggcacttaacaccttcccccgagcattcaagcaggtaatggaaggccgggatataaagctagtaatcaatcagacagcgcaggactgcttcggatgcctggaatccataagccaaataagaacggcaacccgagataaaaaggacacggtgacccgggagaaacacccaaagaaaccttttcagaagtggatgaagaagagagcaatcaaaaaaggtaattatcttcggttccagcgtttattttatcttgatagagggaaactggctaaaatcattttagatgatattgaatgcttgtcttgtgacataccactcagtgaaatttattcggtttttaaaacaagatgggaaacaactggtagctttaaaagccttggggactttaaaacttacgggaaggctgacaacactgccttcagagaattaattacggctaaagaaattgagaaaaatgtgcaggaaatgagcaaaggctcggctcccggtccagacgggattactcttggggacgtcgtaaagatggatcccgagttttcccggaccatggagattttcaatttatggttaacaactggtaaaatcccggacatggtgagggggtgcagaaccgttttgattccaaaatcatcaaagccggatcgtttgaaagacattaataactggagacctatcacgatcggttccatcttgctgagactgttctccaggattgtaacagctaggctgagcaaagcgtgccccctgaacccaaggcaaagaggctttatcagagcggcgggatgctctgaaaacttaaaactcctgcaaactataatttggtcggccaaaagagaacacagaccactgggtgttgtattcgtggacatcgccaaggcttttgacaccgtaagccaccagcacatcattcatgctttgcagcaaagagaggtggatccccacatcgtcggtctggtgagcaatatgtacgagaacatcagtacgtatatcaccacaaagaggaacacacacacagacaaaatccagatccgggttggagtaaagcagggtgacccgatgtcgccccttttatttaacctggcaatggaccctctattatgcaagctggaagagagtggcaaaggataccaccgaggacagagcagcatcacagcgatggcatttgcagacgatctggttttgctgagcgactcctgggaaaatatgaatacaaatattagcatactggagaccttctgcaatctgaccggactcaaaacacaggggcaaaagtgccacggcttttacatcaagccgacaaagaagtcttacaccatcaatgactgcgctgcctggactatcaacggcacacccctgaacatgatcgaccccggcgaatctgagaaatacctcggcctgcagtttgacccgtggattggaatagcaaggtccggtctctccacaaaactagatttttggcttcagcggatcgatcaaagaccacttaaacctctgcagaaaactgatattctcaaaacatacaccatccctcggctgatctacatagctgaccactcagaagtgaaaagcgcactactcgaaacccttgaccagaagatccggacagcggtcaaggaatggcttcacctacctccgtgcacctgcgatgccatcctgtactcgagcacgagagacggcggtttgggcatcaccaaattggcaggactgatccccagcgtgcaggcccgtagactgcatcggatcgcacagtcatctgacgatacgatgaaatgcttcatggaaaaagagaaaatggaacagctgcataagaaattgtggattcaagctggaggggacagagagaacataccctcgatttgggaagcaccaccgtcgagtgaaccaccaaacaacgtgagcacaaattcggaatgggaagcaccgacccagaaagataaatttccaaagccttgcaattggaggaaaaacgaattcaaaaaatggaccaaattggcatcccaaggccgcggaattgtaaattttgaaagagacaaaattagtaaccattggatccaatactacagacgcatacctcacaggaaactcctcactgcactacaactcagggccaacgtttaccccacgagagaatttctagccaggggtagacaagaccaatacatcaaggcgtgtaggcactgcgatgcggacaacgaatcctgcgcccacatcatcggcaactgcccagtgacacaggacgcccgaatcaagaggcacaattacatctgcgaactgcttctcgaggaggcgaagaagaaggactgggtagtgttcaaggaaccgcacataagggattccaacaaggaactgtacaaacctgacctgatatttgtgaaggatgggcgtgcacttgtcgtggatgtgacagtacggtatgaagcagccaaatcatcgctggaggaagccgctgcagagaaagtgagaaagtacaaacacctggaaacggaagtaagacatctcacgaatgcaaaggacgttacttttgtgggctttcccctaggagcgcgggggaaatggcaccaagataactttaaacttttgactgagcttggcctctccaaatcgaggcaagtgaaaatggcagagactttttccacagtagcgctcttttcatctgtggacattgtacatatgtttgccagtagggccagaaaatctatggttatgtgataataggctgccttctgcggggcttgccttctggccatgcccttcttctctcccttgcacctgtacctcttggtctttgaataaagcctgagtaggaaggaccggtaaaaaaaaaaaaaaaaaaaaaaaaaaaaaaacgttgactaaaaaaaaaaaaaaaaaaaaaaaaaaaaaaaaaaaaaaaaaaaaaaaaaaaaaaaaaaaaaaaaaaaaaa

SEQ ID NO: 10929 - DNA, 5264 bp, synthetic construct
  source 1..5264: mol_type = other DNA
gaaataagagagaaaagaagagtaagaagaaatataagagaattcgccaccatggcccctaagaaaaagcggaaggtgaatatcagcggctctagctgcggcagccccaacagcgccgacaccagcagcgacttcaaggacctgtggaccaagctgaaggaatgccacgaccgggaagtgcagggactccaggtgaaggtcaccaaactcaagcaagaaagaatcctggacgcccagagactggaagaattcttcaccaagaaccagcagctgagagagcagcagaaagtgctgcacgagacaatcaaggttctggaagatagactgcgggccggcctgtgcgacagatgcgccgtgaccgaggaacacatgcgcaaaaagcagcaggagttcgagaacattagacagcaaaatctgaaattgatcacagagctgatgaacgagagaaacacactgcaggaggagaacaagaagctgagcgagcagctgcaacagaagatcgagaatgatcagcaacaccaggccgctgagctggaatgtgaagaggacgtgatccccgacagcccaatcacagctttcagcttttctggcgtgaacagactgaggcggaaggaaaacccccacgtgcggtacatcgagcagacccataccaagctggaacacagcgtgtgtgccaacgagatgagaaaggtgtccaagtcctccacccatccccagcacaaccctaacgaaaatgagatcctggtggctgatacctacgaccagtctcagagccctatggccaaggcccacggcaccagctcttatacccctgataagagctccttcaacctggccaccgtggtggccgagacactgggcctgggcgtgcaggaggaaagcgagacacagggcccaatgagccctctgggagatgagctgtaccactgcctggaaggcaaccacaagaaacagccttttgagtccggctccgagactcctggaacaagcgagagcgctacacctgagggcagccctaagagaaaggtgtccagcgccgagggcgctgccaaggaagagcctaaacggagaagcgccagactgagcgccaagccccccgccaaggtggaagccaagcctaagaaggccgccgctaaggacaagagcagcgataagaaagtccagaccaagggcaagcggggcgccaaaggcaaacaggccgaggtggccaaccaggagacaaaggaagatctgcctgctgagaacggcgaaaccaagaccgaggaatctccagcttctgacgaggccggagagaaggaggccaaaagcgacagcggctctgagacacctggaacaagcgagagcgccaccccggaatcctatgaacaacttgcaccacaaccgtgtgtgggagaaactttacattctagcctcccacgagacagtgaactgtttgtgcctgaagaggggagcagcgagaaggagagcgaggacgcgccaaaaacatctcctccgacgcctgggaaacatggtttggaacagactggggaggaaaaagtgatggtgactgttcctgacaaaaatccaccttgtccttgctgtggtacccgggtaaactctgtgttgaatctgattgaacatctgaaagtgtcacacgggaaaaggggggtttgttttcggtgtgcaaaatgtggaaaggaaaatagtaactatcacagtgttgtttgtcattttaagaaatgcaggggtccagagacggagaaagccccagctggggagtggatttgtgaggtatgcaacagagattttacaaccaaaattggcctgggacaacacaagagattggcacacccagcagtgagaaatcaggaaaggatcgttgcttcccaaccgaaagaaacatcaaatagaggtgctcacaaaaggtgctggacaaaggaggaggaagaattactaataagactggaggctcagttcgagggaaacaaaaatattaataagcttattgcagaacacataaccaccaaaacagctaagcagatcagtgacaaaaggcgattgctgtccagaaagccagcagaggagccacgtgaggagcctggaacgtgtcatcacaccaggagagcagctgcgagcctgagaacggagcctgagatgagtcatcacgcccaggcagaggacagagataatggacctgggagacgccctctgccaggcagggcagctgccggagggagaacaatggacgagataagacgccaccctgataagggcaacggacagcagagacccaccaagcaaaaatcagaagaacagctgcaggcttactataaaaagacactagaggaacgactttcagctggggcacttaacaccttcccccgagcattcaagcaggtaatggaaggccgggatataaagctagtaatcaatcagacagcgcaggactgcttcggatgcctggaatccataagccaaataagaacggcaacccgagataaaaaggacacggtgacccgggagaaacacccaaagaaaccttttcagaagtggatgaagaagagagcaatcaaaaaaggtaattatcttcggttccagcgtttattttatcttgatagagggaaactggctaaaatcattttagatgatattgaatgcttgtcttgtgacataccactcagtgaaatttattcggtttttaaaacaagatgggaaacaactggtagctttaaaagccttggggactttaaaacttacgggaaggctgacaacactgccttcagagaattaattacggctaaagaaattgagaaaaatgtgcaggaaatgagcaaaggctcggctcccggtccagacgggattactcttggggacgtcgtaaagatggatcccgagttttcccggaccatggagattttcaatttatggttaacaactggtaaaatcccggacatggtgagggggtgcagaaccgttttgattccaaaatcatcaaagccggatcgtttgaaagacattaataactggagacctatcacgatcggttccatcttgctgagactgttctccaggattgtaacagctaggctgagcaaagcgtgccccctgaacccaaggcaaagaggctttatcagagcggcgggatgctctgaaaacttaaaactcctgcaaactataatttggtcggccaaaagagaacacagaccactgggtgttgtattcgtggacatcgccaaggcttttgacaccgtaagccaccagcacatcattcatgctttgcagcaaagagaggtggatccccacatcgtcggtctggtgagcaatatgtacgagaacatcagtacgtatatcaccacaaagaggaacacacacacagacaaaatccagatccgggttggagtaaagcagggtgacccgatgtcgccccttttatttaacctggcaatggaccctctattatgcaagctggaagagagtggcaaaggataccaccgaggacagagcagcatcacagcgatggcatttgcagacgatctggttttgctgagcgactcctgggaaaatatgaatacaaatattagcatactggagaccttctgcaatctgaccggactcaaaacacaggggcaaaagtgccacggcttttacatcaagccgacaaagaagtcttacaccatcaatgactgcgctgcctggactatcaacggcacacccctgaacatgatcgaccccggcgaatctgagaaatacctcggcctgcagtttgacccgtggattggaatagcaaggtccggtctctccacaaaactagatttttggcttcagcggatcgatcaagcaaagcttaaacctctgcagaaaactgatattctcaaaacatacaccatccctcggctgatctacatagctgaccactcagaagtgaaaagcgcactactcgaaacccttgaccagaagatccggacagcggtcaaggaatggcttcacctacctccgtgcacctgcgatgccatcctgtactcgagcacgagagacggcggtttgggcatcaccaaattggcaggactgatccccagcgtgcaggcccgtagactgcatcggatcgcacagtcatctgacgatacgatgaaatgcttcatggaaaaagagaaaatggaacagctgcataagaaattgtggattcaagctggaggggacagagagaacataccctcgatttgggaagcaccaccgtcgagtgaaccaccaaacaacgtgagcacaaattcggaatgggaagcaccgacccagaaagataaatttccaaagccttgcaattggaggaaaaacgaattcaaaaaatggaccaaattggcatcccaaggccgcggaattgtaaattttgaaagagacaaaattagtaaccattggatccaatactacagacgcatacctcacaggaaactcctcactgcactacaactcagggccaacgtttaccccacgagagaatttctagccaggggtagacaagaccaatacatcaaggcgtgtaggcactgcgatgcggacaacgaatcctgcgcccacatcatcggcaactgcccagtgacacaggacgcccgaatcaagaggcacaattacatctgcgaactgcttctcgaggaggcgaagaagaaggactgggtagtgttcaaggaaccgcacataagggattccaacaaggaactgtacaaacctgacctgatatttgtgaaggatgggcgtgcacttgtcgtggatgtgacagtacggtatgaagcagccaaatcatcgctggaggaagccgctgcagagaaagtgagaaagtacaaacacctggaaacggaagtaagacatctcacgaatgcaaaggacgttacttttgtgggctttcccctaggagcgcgggggaaatggcaccaagataactttaaacttttgactgagcttggcctctccaaatcgaggcaagtgaaaatggcagagactttttccacagtagcgctcttttcatctgtggacattgtacatatgtttgccagtagggccagaaaatctatggttatgtgataataggctgccttctgcggggcttgccttctggccatgcccttcttctctcccttgcacctgtacctcttggtctttgaataaagcctgagtaggaaggaccggtaaaaaaaaaaaaaaaaaaaaaaaaaaaaaaacgttgactaaaaaaaaaaaaaaaaaaaaaaaaaaaaaaaaaaaaaaaaaaaaaaaaaaaaaaaaaaaaaaaaaaaaaa

SEQ ID NO: 10930 - DNA, 5264 bp, synthetic construct
  source 1..5264: mol_type = other DNA
gaaataagagagaaaagaagagtaagaagaaatataagagaattcgccaccatggcccctaagaaaaagcggaaggtgaatatcagcggctctagctgcggcagccccaacagcgccgacaccagcagcgacttcaaggacctgtggaccaagctgaaggaatgccacgaccgggaagtgcagggactccaggtgaaggtcaccaaactcaagcaagaaagaatcctggacgcccagagactggaagaattcttcaccaagaaccagcagctgagagagcagcagaaagtgctgcacgagacaatcaaggttctggaagatagactgcgggccggcctgtgcgacagatgcgccgtgaccgaggaacacatgcgcaaaaagcagcaggagttcgagaacattagacagcaaaatctgaaattgatcacagagctgatgaacgagagaaacacactgcaggaggagaacaagaagctgagcgagcagctgcaacagaagatcgagaatgatcagcaacaccaggccgctgagctggaatgtgaagaggacgtgatccccgacagcccaatcacagctttcagcttttctggcgtgaacagactgaggcggaaggaaaacccccacgtgcggtacatcgagcagacccataccaagctggaacacagcgtgtgtgccaacgagatgagaaaggtgtccaagtcctccacccatccccagcacaaccctaacgaaaatgagatcctggtggctgatacctacgaccagtctcagagccctatggccaaggcccacggcaccagctcttatacccctgataagagctccttcaacctggccaccgtggtggccgagacactgggcctgggcgtgcaggaggaaagcgagacacagggcccaatgagccctctgggagatgagctgtaccactgcctggaaggcaaccacaagaaacagccttttgagtccggctccgagactcctggaacaagcgagagcgctacacctgagggcagccctaagagaaaggtgtccagcgccgagggcgctgccaaggaagagcctaaacggagaagcgccagactgagcgccaagccccccgccaaggtggaagccaagcctaagaaggccgccgctaaggacaagagcagcgataagaaagtccagaccaagggcaagcggggcgccaaaggcaaacaggccgaggtggccaaccaggagacaaaggaagatctgcctgctgagaacggcgaaaccaagaccgaggaatctccagcttctgacgaggccggagagaaggaggccaaaagcgacagcggctctgagacacctggaacaagcgagagcgccaccccggaatcctatgaacaacttgcaccacaaccgtgtgtgggagaaactttacattctagcctcccacgagacagtgaactgtttgtgcctgaagaggggagcagcgagaaggagagcgaggacgcgccaaaaacatctcctccgacgcctgggaaacatggtttggaacagactggggaggaaaaagtgatggtgactgttcctgacaaaaatccaccttgtccttgctgtggtacccgggtaaactctgtgttgaatctgattgaacatctgaaagtgtcacacgggaaaaggggggtttgttttcggtgtgcaaaatgtggaaaggaaaatagtaactatcacagtgttgtttgtcattttaagaaatgcaggggtccagagacggagaaagccccagctggggagtggatttgtgaggtatgcaacagagattttacaaccaaaattggcctgggacaacacaagagattggcacacccagcagtgagaaatcaggaaaggatcgttgcttcccaaccgaaagaaacatcaaatagaggtgctcacaaaaggtgctggacaaaggaggaggaagaattactaataagactggaggctcagttcgagggaaacaaaaatattaataagcttattgcagaacacataaccaccaaaacagctaagcagatcagtgacaaaaggcgattgctgtccagaaagccagcagaggagccacgtgaggagcctggaacgtgtcatcacaccaggagagcagctgcgagcctgagaacggagcctgagatgagtcatcacgcccaggcagaggacagagataatggacctgggagacgccctctgccaggcagggcagctgccggagggagaacaatggacgagataagacgccaccctgataagggcaacggacagcagagacccaccaagcaaaaatcagaagaacagctgcaggcttactataaaaagacactagaggaacgactttcagctggggcacttaacaccttcccccgagcattcaagcaggtaatggaaggccgggatataaagctagtaatcaatcagacagcgcaggactgcttcggatgcctggaatccataagccaaataagaacggcaacccgagataaaaaggacacggtgacccgggagaaacacccaaagaaaccttttcagaagtggatgaagaagagagcaatcaaaaaaggtaattatcttcggttccagcgtttattttatcttgatagagggaaactggctaaaatcattttagatgatattgaatgcttgtcttgtgacataccactcagtgaaatttattcggtttttaaaacaagatgggaaacaactggtagctttaaaagccttggggactttaaaacttacgggaaggctgacaacactgccttcagagaattaattacggctaaagaaattgagaaaaatgtgcaggaaatgagcaaaggctcggctcccggtccagacgggattactcttggggacgtcgtaaagatggatcccgagttttcccggaccatggagattttcaatttatggttaacaactggtaaaatcccggacatggtgagggggtgcagaaccgttttgattccaaaatcatcaaagccggatcgtttgaaagacattaataactggagacctatcacgatcggttccatcttgctgagactgttctccaggattgtaacagctaggctgagcaaagcgtgccccctgaacccaaggcaaagaggctttatcagagcggcgggatgctctgaaaacttaaaactcctgcaaactataatttggtcggccaaaagagaacacagaccactgggtgttgtattcgtggacatcgccaaggcttttgacaccgtaagccaccagcacatcattcatgctttgcagcaaagagaggtggatccccacatcgtcggtctggtgagcaatatgtacgagaacatcagtacgtatatcaccacaaagaggaacacacacacagacaaaatccagatccgggttggagtaaagcagggtgacccgatgtcgccccttttatttaacctggcaatggaccctctattatgcaagctggaagagagtggcaaaggataccaccgaggacagagcagcatcacagcgatggcatttgcagacgatctggttttgctgagcgactcctgggaaaatatgaatacaaatattagcatactggagaccttctgcaatctgaccggactcaaaacacaggggcaaaagtgccacggcttttacatcaagccgacaaagaagtcttacaccatcaatgactgcgctgcctggactatcaacggcacacccctgaacatgatcgaccccggcgaatctgagaaatacctcggcctgcagtttgacccgtggattggaatagcaaggtccggtctctccacaaaactagatttttggcttcagcggatcgatcaagcaccacttaaacctctgcagaaaactgatattctcaaaacattcaccatccctcggctgatctacatagctgaccactcagaagtgaaaagcgcactactcgaaacccttgaccagaagatccggacagcggtcaaggaatggcttcacctacctccgtgcacctgcgatgccatcctgtactcgagcacgagagacggcggtttgggcatcaccaaattggcaggactgatccccagcgtgcaggcccgtagactgcatcggatcgcacagtcatctgacgatacgatgaaatgcttcatggaaaaagagaaaatggaacagctgcataagaaattgtggattcaagctggaggggacagagagaacataccctcgatttgggaagcaccaccgtcgagtgaaccaccaaacaacgtgagcacaaattcggaatgggaagcaccgacccagaaagataaatttccaaagccttgcaattggaggaaaaacgaattcaaaaaatggaccaaattggcatcccaaggccgcggaattgtaaattttgaaagagacaaaattagtaaccattggatccaatactacagacgcatacctcacaggaaactcctcactgcactacaactcagggccaacgtttaccccacgagagaatttctagccaggggtagacaagaccaatacatcaaggcgtgtaggcactgcgatgcggacaacgaatcctgcgcccacatcatcggcaactgcccagtgacacaggacgcccgaatcaagaggcacaattacatctgcgaactgcttctcgaggaggcgaagaagaaggactgggtagtgttcaaggaaccgcacataagggattccaacaaggaactgtacaaacctgacctgatatttgtgaaggatgggcgtgcacttgtcgtggatgtgacagtacggtatgaagcagccaaatcatcgctggaggaagccgctgcagagaaagtgagaaagtacaaacacctggaaacggaagtaagacatctcacgaatgcaaaggacgttacttttgtgggctttcccctaggagcgcgggggaaatggcaccaagataactttaaacttttgactgagcttggcctctccaaatcgaggcaagtgaaaatggcagagactttttccacagtagcgctcttttcatctgtggacattgtacatatgtttgccagtagggccagaaaatctatggttatgtgataataggctgccttctgcggggcttgccttctggccatgcccttcttctctcccttgcacctgtacctcttggtctttgaataaagcctgagtaggaaggaccggtaaaaaaaaaaaaaaaaaaaaaaaaaaaaaaacgttgactaaaaaaaaaaaaaaaaaaaaaaaaaaaaaaaaaaaaaaaaaaaaaaaaaaaaaaaaaaaaaaaaaaaaaa

SEQ ID NO: 10931 - DNA, 5264 bp, synthetic construct
  source 1..5264: mol_type = other DNA
gaaataagagagaaaagaagagtaagaagaaatataagagaattcgccaccatggcccctaagaaaaagcggaaggtgaatatcagcggctctagctgcggcagccccaacagcgccgacaccagcagcgacttcaaggacctgtggaccaagctgaaggaatgccacgaccgggaagtgcagggactccaggtgaaggtcaccaaactcaagcaagaaagaatcctggacgcccagagactggaagaattcttcaccaagaaccagcagctgagagagcagcagaaagtgctgcacgagacaatcaaggttctggaagatagactgcgggccggcctgtgcgacagatgcgccgtgaccgaggaacacatgcgcaaaaagcagcaggagttcgagaacattagacagcaaaatctgaaattgatcacagagctgatgaacgagagaaacacactgcaggaggagaacaagaagctgagcgagcagctgcaacagaagatcgagaatgatcagcaacaccaggccgctgagctggaatgtgaagaggacgtgatccccgacagcccaatcacagctttcagcttttctggcgtgaacagactgaggcggaaggaaaacccccacgtgcggtacatcgagcagacccataccaagctggaacacagcgtgtgtgccaacgagatgagaaaggtgtccaagtcctccacccatccccagcacaaccctaacgaaaatgagatcctggtggctgatacctacgaccagtctcagagccctatggccaaggcccacggcaccagctcttatacccctgataagagctccttcaacctggccaccgtggtggccgagacactgggcctgggcgtgcaggaggaaagcgagacacagggcccaatgagccctctgggagatgagctgtaccactgcctggaaggcaaccacaagaaacagccttttgagtccggctccgagactcctggaacaagcgagagcgctacacctgagggcagccctaagagaaaggtgtccagcgccgagggcgctgccaaggaagagcctaaacggagaagcgccagactgagcgccaagccccccgccaaggtggaagccaagcctaagaaggccgccgctaaggacaagagcagcgataagaaagtccagaccaagggcaagcggggcgccaaaggcaaacaggccgaggtggccaaccaggagacaaaggaagatctgcctgctgagaacggcgaaaccaagaccgaggaatctccagcttctgacgaggccggagagaaggaggccaaaagcgacagcggctctgagacacctggaacaagcgagagcgccaccccggaatcctatgaacaacttgcaccacaaccgtgtgtgggagaaactttacattctagcctcccacgagacagtgaactgtttgtgcctgaagaggggagcagcgagaaggagagcgaggacgcgccaaaaacatctcctccgacgcctgggaaacatggtttggaacagactggggaggaaaaagtgatggtgactgttcctgacaaaaatccaccttgtccttgctgtggtacccgggtaaactctgtgttgaatctgattgaacatctgaaagtgtcacacgggaaaaggggggtttgttttcggtgtgcaaaatgtggaaaggaaaatagtaactatcacagtgttgtttgtcattttaagaaatgcaggggtccagagacggagaaagccccagctggggagtggatttgtgaggtatgcaacagagattttacaaccaaaattggcctgggacaacacaagagattggcacacccagcagtgagaaatcaggaaaggatcgttgcttcccaaccgaaagaaacatcaaatagaggtgctcacaaaaggtgctggacaaaggaggaggaagaattactaataagactggaggctcagttcgagggaaacaaaaatattaataagcttattgcagaacacataaccaccaaaacagctaagcagatcagtgacaaaaggcgattgctgtccagaaagccagcagaggagccacgtgaggagcctggaacgtgtcatcacaccaggagagcagctgcgagcctgagaacggagcctgagatgagtcatcacgcccaggcagaggacagagataatggacctgggagacgccctctgccaggcagggcagctgccggagggagaacaatggacgagataagacgccaccctgataagggcaacggacagcagagacccaccaagcaaaaatcagaagaacagctgcaggcttactataaaaagacactagaggaacgactttcagctggggcacttaacaccttcccccgagcattcaagcaggtaatggaaggccgggatataaagctagtaatcaatcagacagcgcaggactgcttcggatgcctggaatccataagccaaataagaacggcaacccgagataaaaaggacacggtgacccgggagaaacacccaaagaaaccttttcagaagtggatgaagaagagagcaatcaaaaaaggtaattatcttcggttccagcgtttattttatcttgatagagggaaactggctaaaatcattttagatgatattgaatgcttgtcttgtgacataccactcagtgaaatttattcggtttttaaaacaagatgggaaacaactggtagctttaaaagccttggggactttaaaacttacgggaaggctgacaacactgccttcagagaattaattacggctaaagaaattgagaaaaatgtgcaggaaatgagcaaaggctcggctcccggtccagacgggattactcttggggacgtcgtaaagatggatcccgagttttcccggaccatggagattttcaatttatggttaacaactggtaaaatcccggacatggtgagggggtgcagaaccgttttgattccaaaatcatcaaagccggatcgtttgaaagacattaataactggagacctatcacgatcggttccatcttgctgagactgttctccaggattgtaacagctaggctgagcaaagcgtgccccctgaacccaaggcaaagaggctttatcagagcggcgggatgctctgaaaacttaaaactcctgcaaactataatttggtcggccaaaagagaacacagaccactgggtgttgtattcgtggacatcgccaaggcttttgacaccgtaagccaccagcacatcattcatgctttgcagcaaagagaggtggatccccacatcgtcggtctggtgagcaatatgtacgagaacatcagtacgtatatcaccacaaagaggaacacacacacagacaaaatccagatccgggttggagtaaagcagggtgacccgatgtcgccccttttatttaacctggcaatggaccctctattatgcaagctggaagagagtggcaaaggataccaccgaggacagagcagcatcacagcgatggcatttgcagacgatctggttttgctgagcgactcctgggaaaatatgaatacaaatattagcatactggagaccttctgcaatctgaccggactcaaaacacaggggcaaaagtgccacggcttttacatcaagccgacaaagaagtcttacaccatcaatgactgcgctgcctggactatcaacggcacacccctgaacatgatcgaccccggcgaatctgagaaatacctcggcctgcagtttgacccgtggattggaatagcaaggtccggtctctccacaaaactagatttttggcttcagcggatcgatcaagcaccacttaaacctctgcagaaaactgatattctcaaaacatacagaatccctcggctgatctacatagctgaccactcagaagtgaaaagcgcactactcgaaacccttgaccagaagatccggacagcggtcaaggaatggcttcacctacctccgtgcacctgcgatgccatcctgtactcgagcacgagagacggcggtttgggcatcaccaaattggcaggactgatccccagcgtgcaggcccgtagactgcatcggatcgcacagtcatctgacgatacgatgaaatgcttcatggaaaaagagaaaatggaacagctgcataagaaattgtggattcaagctggaggggacagagagaacataccctcgatttgggaagcaccaccgtcgagtgaaccaccaaacaacgtgagcacaaattcggaatgggaagcaccgacccagaaagataaatttccaaagccttgcaattggaggaaaaacgaattcaaaaaatggaccaaattggcatcccaaggccgcggaattgtaaattttgaaagagacaaaattagtaaccattggatccaatactacagacgcatacctcacaggaaactcctcactgcactacaactcagggccaacgtttaccccacgagagaatttctagccaggggtagacaagaccaatacatcaaggcgtgtaggcactgcgatgcggacaacgaatcctgcgcccacatcatcggcaactgcccagtgacacaggacgcccgaatcaagaggcacaattacatctgcgaactgcttctcgaggaggcgaagaagaaggactgggtagtgttcaaggaaccgcacataagggattccaacaaggaactgtacaaacctgacctgatatttgtgaaggatgggcgtgcacttgtcgtggatgtgacagtacggtatgaagcagccaaatcatcgctggaggaagccgctgcagagaaagtgagaaagtacaaacacctggaaacggaagtaagacatctcacgaatgcaaaggacgttacttttgtgggctttcccctaggagcgcgggggaaatggcaccaagataactttaaacttttgactgagcttggcctctccaaatcgaggcaagtgaaaatggcagagactttttccacagtagcgctcttttcatctgtggacattgtacatatgtttgccagtagggccagaaaatctatggttatgtgataataggctgccttctgcggggcttgccttctggccatgcccttcttctctcccttgcacctgtacctcttggtctttgaataaagcctgagtaggaaggaccggtaaaaaaaaaaaaaaaaaaaaaaaaaaaaaaacgttgactaaaaaaaaaaaaaaaaaaaaaaaaaaaaaaaaaaaaaaaaaaaaaaaaaaaaaaaaaaaaaaaaaaaaaa

SEQ ID NO: 10932 - DNA, 5264 bp, synthetic construct
  source 1..5264: mol_type = other DNA
gaaataagagagaaaagaagagtaagaagaaatataagagaattcgccaccatggcccctaagaaaaagcggaaggtgaatatcagcggctctagctgcggcagccccaacagcgccgacaccagcagcgacttcaaggacctgtggaccaagctgaaggaatgccacgaccgggaagtgcagggactccaggtgaaggtcaccaaactcaagcaagaaagaatcctggacgcccagagactggaagaattcttcaccaagaaccagcagctgagagagcagcagaaagtgctgcacgagacaatcaaggttctggaagatagactgcgggccggcctgtgcgacagatgcgccgtgaccgaggaacacatgcgcaaaaagcagcaggagttcgagaacattagacagcaaaatctgaaattgatcacagagctgatgaacgagagaaacacactgcaggaggagaacaagaagctgagcgagcagctgcaacagaagatcgagaatgatcagcaacaccaggccgctgagctggaatgtgaagaggacgtgatccccgacagcccaatcacagctttcagcttttctggcgtgaacagactgaggcggaaggaaaacccccacgtgcggtacatcgagcagacccataccaagctggaacacagcgtgtgtgccaacgagatgagaaaggtgtccaagtcctccacccatccccagcacaaccctaacgaaaatgagatcctggtggctgatacctacgaccagtctcagagccctatggccaaggcccacggcaccagctcttatacccctgataagagctccttcaacctggccaccgtggtggccgagacactgggcctgggcgtgcaggaggaaagcgagacacagggcccaatgagccctctgggagatgagctgtaccactgcctggaaggcaaccacaagaaacagccttttgagtccggctccgagactcctggaacaagcgagagcgctacacctgagggcagccctaagagaaaggtgtccagcgccgagggcgctgccaaggaagagcctaaacggagaagcgccagactgagcgccaagccccccgccaaggtggaagccaagcctaagaaggccgccgctaaggacaagagcagcgataagaaagtccagaccaagggcaagcggggcgccaaaggcaaacaggccgaggtggccaaccaggagacaaaggaagatctgcctgctgagaacggcgaaaccaagaccgaggaatctccagcttctgacgaggccggagagaaggaggccaaaagcgacagcggctctgagacacctggaacaagcgagagcgccaccccggaatcctatgaacaacttgcaccacaaccgtgtgtgggagaaactttacattctagcctcccacgagacagtgaactgtttgtgcctgaagaggggagcagcgagaaggagagcgaggacgcgccaaaaacatctcctccgacgcctgggaaacatggtttggaacagactggggaggaaaaagtgatggtgactgttcctgacaaaaatccaccttgtccttgctgtggtacccgggtaaactctgtgttgaatctgattgaacatctgaaagtgtcacacgggaaaaggggggtttgttttcggtgtgcaaaatgtggaaaggaaaatagtaactatcacagtgttgtttgtcattttaagaaatgcaggggtccagagacggagaaagccccagctggggagtggatttgtgaggtatgcaacagagattttacaaccaaaattggcctgggacaacacaagagattggcacacccagcagtgagaaatcaggaaaggatcgttgcttcccaaccgaaagaaacatcaaatagaggtgctcacaaaaggtgctggacaaaggaggaggaagaattactaataagactggaggctcagttcgagggaaacaaaaatattaataagcttattgcagaacacataaccaccaaaacagctaagcagatcagtgacaaaaggcgattgctgtccagaaagccagcagaggagccacgtgaggagcctggaacgtgtcatcacaccaggagagcagctgcgagcctgagaacggagcctgagatgagtcatcacgcccaggcagaggacagagataatggacctgggagacgccctctgccaggcagggcagctgccggagggagaacaatggacgagataagacgccaccctgataagggcaacggacagcagagacccaccaagcaaaaatcagaagaacagctgcaggcttactataaaaagacactagaggaacgactttcagctggggcacttaacaccttcccccgagcattcaagcaggtaatggaaggccgggatataaagctagtaatcaatcagacagcgcaggactgcttcggatgcctggaatccataagccaaataagaacggcaacccgagataaaaaggacacggtgacccgggagaaacacccaaagaaaccttttcagaagtggatgaagaagagagcaatcaaaaaaggtaattatcttcggttccagcgtttattttatcttgatagagggaaactggctaaaatcattttagatgatattgaatgcttgtcttgtgacataccactcagtgaaatttattcggtttttaaaacaagatgggaaacaactggtagctttaaaagccttggggactttaaaacttacgggaaggctgacaacactgccttcagagaattaattacggctaaagaaattgagaaaaatgtgcaggaaatgagcaaaggctcggctcccggtccagacgggattactcttggggacgtcgtaaagatggatcccgagttttcccggaccatggagattttcaatttatggttaacaactggtaaaatcccggacatggtgagggggtgcagaaccgttttgattccaaaatcatcaaagccggatcgtttgaaagacattaataactggagacctatcacgatcggttccatcttgctgagactgttctccaggattgtaacagctaggctgagcaaagcgtgccccctgaacccaaggcaaagaggctttatcagagcggcgggatgctctgaaaacttaaaactcctgcaaactataatttggtcggccaaaagagaacacagaccactgggtgttgtattcgtggacatcgccaaggcttttgacaccgtaagccaccagcacatcattcatgctttgcagcaaagagaggtggatccccacatcgtcggtctggtgagcaatatgtacgagaacatcagtacgtatatcaccacaaagaggaacacacacacagacaaaatccagatccgggttggagtaaagcagggtgacccgatgtcgccccttttatttaacctggcaatggaccctctattatgcaagctggaagagagtggcaaaggataccaccgaggacagagcagcatcacagcgatggcatttgcagacgatctggttttgctgagcgactcctgggaaaatatgaatacaaatattagcatactggagaccttctgcaatctgaccggactcaaaacacaggggcaaaagtgccacggcttttacatcaagccgacaaagaagtcttacaccatcaatgactgcgctgcctggactatcaacggcacacccctgaacatgatcgaccccggcgaatctgagaaatacctcggcctgcagtttgacccgtggattggaatagcaaggtccggtctctccacaaaactagatttttggcttcagcggatcgatcaagcaccacttaaacctctgcagaaaactgatattctcaaaacatacaccatccctcggctgatctacatagctgaccactcagaagtgaaaagcgcactaatcgaaacccttgaccagaagatccggacagcggtcaaggaatggcttcacctacctccgtgcacctgcgatgccatcctgtactcgagcacgagagacggcggtttgggcatcaccaaattggcaggactgatccccagcgtgcaggcccgtagactgcatcggatcgcacagtcatctgacgatacgatgaaatgcttcatggaaaaagagaaaatggaacagctgcataagaaattgtggattcaagctggaggggacagagagaacataccctcgatttgggaagcaccaccgtcgagtgaaccaccaaacaacgtgagcacaaattcggaatgggaagcaccgacccagaaagataaatttccaaagccttgcaattggaggaaaaacgaattcaaaaaatggaccaaattggcatcccaaggccgcggaattgtaaattttgaaagagacaaaattagtaaccattggatccaatactacagacgcatacctcacaggaaactcctcactgcactacaactcagggccaacgtttaccccacgagagaatttctagccaggggtagacaagaccaatacatcaaggcgtgtaggcactgcgatgcggacaacgaatcctgcgcccacatcatcggcaactgcccagtgacacaggacgcccgaatcaagaggcacaattacatctgcgaactgcttctcgaggaggcgaagaagaaggactgggtagtgttcaaggaaccgcacataagggattccaacaaggaactgtacaaacctgacctgatatttgtgaaggatgggcgtgcacttgtcgtggatgtgacagtacggtatgaagcagccaaatcatcgctggaggaagccgctgcagagaaagtgagaaagtacaaacacctggaaacggaagtaagacatctcacgaatgcaaaggacgttacttttgtgggctttcccctaggagcgcgggggaaatggcaccaagataactttaaacttttgactgagcttggcctctccaaatcgaggcaagtgaaaatggcagagactttttccacagtagcgctcttttcatctgtggacattgtacatatgtttgccagtagggccagaaaatctatggttatgtgataataggctgccttctgcggggcttgccttctggccatgcccttcttctctcccttgcacctgtacctcttggtctttgaataaagcctgagtaggaaggaccggtaaaaaaaaaaaaaaaaaaaaaaaaaaaaaaacgttgactaaaaaaaaaaaaaaaaaaaaaaaaaaaaaaaaaaaaaaaaaaaaaaaaaaaaaaaaaaaaaaaaaaaaaa

SEQ ID NO: 10933 - DNA, 5264 bp, synthetic construct
  source 1..5264: mol_type = other DNA
gaaataagagagaaaagaagagtaagaagaaatataagagaattcgccaccatggcccctaagaaaaagcggaaggtgaatatcagcggctctagctgcggcagccccaacagcgccgacaccagcagcgacttcaaggacctgtggaccaagctgaaggaatgccacgaccgggaagtgcagggactccaggtgaaggtcaccaaactcaagcaagaaagaatcctggacgcccagagactggaagaattcttcaccaagaaccagcagctgagagagcagcagaaagtgctgcacgagacaatcaaggttctggaagatagactgcgggccggcctgtgcgacagatgcgccgtgaccgaggaacacatgcgcaaaaagcagcaggagttcgagaacattagacagcaaaatctgaaattgatcacagagctgatgaacgagagaaacacactgcaggaggagaacaagaagctgagcgagcagctgcaacagaagatcgagaatgatcagcaacaccaggccgctgagctggaatgtgaagaggacgtgatccccgacagcccaatcacagctttcagcttttctggcgtgaacagactgaggcggaaggaaaacccccacgtgcggtacatcgagcagacccataccaagctggaacacagcgtgtgtgccaacgagatgagaaaggtgtccaagtcctccacccatccccagcacaaccctaacgaaaatgagatcctggtggctgatacctacgaccagtctcagagccctatggccaaggcccacggcaccagctcttatacccctgataagagctccttcaacctggccaccgtggtggccgagacactgggcctgggcgtgcaggaggaaagcgagacacagggcccaatgagccctctgggagatgagctgtaccactgcctggaaggcaaccacaagaaacagccttttgagtccggctccgagactcctggaacaagcgagagcgctacacctgagggcagccctaagagaaaggtgtccagcgccgagggcgctgccaaggaagagcctaaacggagaagcgccagactgagcgccaagccccccgccaaggtggaagccaagcctaagaaggccgccgctaaggacaagagcagcgataagaaagtccagaccaagggcaagcggggcgccaaaggcaaacaggccgaggtggccaaccaggagacaaaggaagatctgcctgctgagaacggcgaaaccaagaccgaggaatctccagcttctgacgaggccggagagaaggaggccaaaagcgacagcggctctgagacacctggaacaagcgagagcgccaccccggaatcctatgaacaacttgcaccacaaccgtgtgtgggagaaactttacattctagcctcccacgagacagtgaactgtttgtgcctgaagaggggagcagcgagaaggagagcgaggacgcgccaaaaacatctcctccgacgcctgggaaacatggtttggaacagactggggaggaaaaagtgatggtgactgttcctgacaaaaatccaccttgtccttgctgtggtacccgggtaaactctgtgttgaatctgattgaacatctgaaagtgtcacacgggaaaaggggggtttgttttcggtgtgcaaaatgtggaaaggaaaatagtaactatcacagtgttgtttgtcattttaagaaatgcaggggtccagagacggagaaagccccagctggggagtggatttgtgaggtatgcaacagagattttacaaccaaaattggcctgggacaacacaagagattggcacacccagcagtgagaaatcaggaaaggatcgttgcttcccaaccgaaagaaacatcaaatagaggtgctcacaaaaggtgctggacaaaggaggaggaagaattactaataagactggaggctcagttcgagggaaacaaaaatattaataagcttattgcagaacacataaccaccaaaacagctaagcagatcagtgacaaaaggcgattgctgtccagaaagccagcagaggagccacgtgaggagcctggaacgtgtcatcacaccaggagagcagctgcgagcctgagaacggagcctgagatgagtcatcacgcccaggcagaggacagagataatggacctgggagacgccctctgccaggcagggcagctgccggagggagaacaatggacgagataagacgccaccctgataagggcaacggacagcagagacccaccaagcaaaaatcagaagaacagctgcaggcttactataaaaagacactagaggaacgactttcagctggggcacttaacaccttcccccgagcattcaagcaggtaatggaaggccgggatataaagctagtaatcaatcagacagcgcaggactgcttcggatgcctggaatccataagccaaataagaacggcaacccgagataaaaaggacacggtgacccgggagaaacacccaaagaaaccttttcagaagtggatgaagaagagagcaatcaaaaaaggtaattatcttcggttccagcgtttattttatcttgatagagggaaactggctaaaatcattttagatgatattgaatgcttgtcttgtgacataccactcagtgaaatttattcggtttttaaaacaagatgggaaacaactggtagctttaaaagccttggggactttaaaacttacgggaaggctgacaacactgccttcagagaattaattacggctaaagaaattgagaaaaatgtgcaggaaatgagcaaaggctcggctcccggtccagacgggattactcttggggacgtcgtaaagatggatcccgagttttcccggaccatggagattttcaatttatggttaacaactggtaaaatcccggacatggtgagggggtgcagaaccgttttgattccaaaatcatcaaagccggatcgtttgaaagacattaataactggagacctatcacgatcggttccatcttgctgagactgttctccaggattgtaacagctaggctgagcaaagcgtgccccctgaacccaaggcaaagaggctttatcagagcggcgggatgctctgaaaacttaaaactcctgcaaactataatttggtcggccaaaagagaacacagaccactgggtgttgtattcgtggacatcgccaaggcttttgacaccgtaagccaccagcacatcattcatgctttgcagcaaagagaggtggatccccacatcgtcggtctggtgagcaatatgtacgagaacatcagtacgtatatcaccacaaagaggaacacacacacagacaaaatccagatccgggttggagtaaagcagggtgacccgatgtcgccccttttatttaacctggcaatggaccctctattatgcaagctggaagagagtggcaaaggataccaccgaggacagagcagcatcacagcgatggcatttgcagacgatctggttttgctgagcgactcctgggaaaatatgaatacaaatattagcatactggagaccttctgcaatctgaccggactcaaaacacaggggcaaaagtgccacggcttttacatcaagccgacaaagaagtcttacaccatcaatgactgcgctgcctggactatcaacggcacacccctgaacatgatcgaccccggcgaatctgagaaatacctcggcctgcagtttgacccgtggattggaatagcaaggtccggtctctccacaaaactagatttttggcttcagcggatcgatcaagcaccacttaaacctctgcagaaaactgatattctcaaaacatacaccatccctcggctgatctacatagctgaccactcagaagtgaaaagcgcactactcgaaacccttgaccagaagatccggaaggcggtcaaggaatggcttcacctacctccgtgcacctgcgatgccatcctgtactcgagcacgagagacggcggtttgggcatcaccaaattggcaggactgatccccagcgtgcaggcccgtagactgcatcggatcgcacagtcatctgacgatacgatgaaatgcttcatggaaaaagagaaaatggaacagctgcataagaaattgtggattcaagctggaggggacagagagaacataccctcgatttgggaagcaccaccgtcgagtgaaccaccaaacaacgtgagcacaaattcggaatgggaagcaccgacccagaaagataaatttccaaagccttgcaattggaggaaaaacgaattcaaaaaatggaccaaattggcatcccaaggccgcggaattgtaaattttgaaagagacaaaattagtaaccattggatccaatactacagacgcatacctcacaggaaactcctcactgcactacaactcagggccaacgtttaccccacgagagaatttctagccaggggtagacaagaccaatacatcaaggcgtgtaggcactgcgatgcggacaacgaatcctgcgcccacatcatcggcaactgcccagtgacacaggacgcccgaatcaagaggcacaattacatctgcgaactgcttctcgaggaggcgaagaagaaggactgggtagtgttcaaggaaccgcacataagggattccaacaaggaactgtacaaacctgacctgatatttgtgaaggatgggcgtgcacttgtcgtggatgtgacagtacggtatgaagcagccaaatcatcgctggaggaagccgctgcagagaaagtgagaaagtacaaacacctggaaacggaagtaagacatctcacgaatgcaaaggacgttacttttgtgggctttcccctaggagcgcgggggaaatggcaccaagataactttaaacttttgactgagcttggcctctccaaatcgaggcaagtgaaaatggcagagactttttccacagtagcgctcttttcatctgtggacattgtacatatgtttgccagtagggccagaaaatctatggttatgtgataataggctgccttctgcggggcttgccttctggccatgcccttcttctctcccttgcacctgtacctcttggtctttgaataaagcctgagtaggaaggaccggtaaaaaaaaaaaaaaaaaaaaaaaaaaaaaaacgttgactaaaaaaaaaaaaaaaaaaaaaaaaaaaaaaaaaaaaaaaaaaaaaaaaaaaaaaaaaaaaaaaaaaaaaa

SEQ ID NO: 10934 - DNA, 5264 bp, synthetic construct
  source 1..5264: mol_type = other DNA
gaaataagagagaaaagaagagtaagaagaaatataagagaattcgccaccatggcccctaagaaaaagcggaaggtgaatatcagcggctctagctgcggcagccccaacagcgccgacaccagcagcgacttcaaggacctgtggaccaagctgaaggaatgccacgaccgggaagtgcagggactccaggtgaaggtcaccaaactcaagcaagaaagaatcctggacgcccagagactggaagaattcttcaccaagaaccagcagctgagagagcagcagaaagtgctgcacgagacaatcaaggttctggaagatagactgcgggccggcctgtgcgacagatgcgccgtgaccgaggaacacatgcgcaaaaagcagcaggagttcgagaacattagacagcaaaatctgaaattgatcacagagctgatgaacgagagaaacacactgcaggaggagaacaagaagctgagcgagcagctgcaacagaagatcgagaatgatcagcaacaccaggccgctgagctggaatgtgaagaggacgtgatccccgacagcccaatcacagctttcagcttttctggcgtgaacagactgaggcggaaggaaaacccccacgtgcggtacatcgagcagacccataccaagctggaacacagcgtgtgtgccaacgagatgagaaaggtgtccaagtcctccacccatccccagcacaaccctaacgaaaatgagatcctggtggctgatacctacgaccagtctcagagccctatggccaaggcccacggcaccagctcttatacccctgataagagctccttcaacctggccaccgtggtggccgagacactgggcctgggcgtgcaggaggaaagcgagacacagggcccaatgagccctctgggagatgagctgtaccactgcctggaaggcaaccacaagaaacagccttttgagtccggctccgagactcctggaacaagcgagagcgctacacctgagggcagccctaagagaaaggtgtccagcgccgagggcgctgccaaggaagagcctaaacggagaagcgccagactgagcgccaagccccccgccaaggtggaagccaagcctaagaaggccgccgctaaggacaagagcagcgataagaaagtccagaccaagggcaagcggggcgccaaaggcaaacaggccgaggtggccaaccaggagacaaaggaagatctgcctgctgagaacggcgaaaccaagaccgaggaatctccagcttctgacgaggccggagagaaggaggccaaaagcgacagcggctctgagacacctggaacaagcgagagcgccaccccggaatcctatgaacaacttgcaccacaaccgtgtgtgggagaaactttacattctagcctcccacgagacagtgaactgtttgtgcctgaagaggggagcagcgagaaggagagcgaggacgcgccaaaaacatctcctccgacgcctgggaaacatggtttggaacagactggggaggaaaaagtgatggtgactgttcctgacaaaaatccaccttgtccttgctgtggtacccgggtaaactctgtgttgaatctgattgaacatctgaaagtgtcacacgggaaaaggggggtttgttttcggtgtgcaaaatgtggaaaggaaaatagtaactatcacagtgttgtttgtcattttaagaaatgcaggggtccagagacggagaaagccccagctggggagtggatttgtgaggtatgcaacagagattttacaaccaaaattggcctgggacaacacaagagattggcacacccagcagtgagaaatcaggaaaggatcgttgcttcccaaccgaaagaaacatcaaatagaggtgctcacaaaaggtgctggacaaaggaggaggaagaattactaataagactggaggctcagttcgagggaaacaaaaatattaataagcttattgcagaacacataaccaccaaaacagctaagcagatcagtgacaaaaggcgattgctgtccagaaagccagcagaggagccacgtgaggagcctggaacgtgtcatcacaccaggagagcagctgcgagcctgagaacggagcctgagatgagtcatcacgcccaggcagaggacagagataatggacctgggagacgccctctgccaggcagggcagctgccggagggagaacaatggacgagataagacgccaccctgataagggcaacggacagcagagacccaccaagcaaaaatcagaagaacagctgcaggcttactataaaaagacactagaggaacgactttcagctggggcacttaacaccttcccccgagcattcaagcaggtaatggaaggccgggatataaagctagtaatcaatcagacagcgcaggactgcttcggatgcctggaatccataagccaaataagaacggcaacccgagataaaaaggacacggtgacccgggagaaacacccaaagaaaccttttcagaagtggatgaagaagagagcaatcaaaaaaggtaattatcttcggttccagcgtttattttatcttgatagagggaaactggctaaaatcattttagatgatattgaatgcttgtcttgtgacataccactcagtgaaatttattcggtttttaaaacaagatgggaaacaactggtagctttaaaagccttggggactttaaaacttacgggaaggctgacaacactgccttcagagaattaattacggctaaagaaattgagaaaaatgtgcaggaaatgagcaaaggctcggctcccggtccagacgggattactcttggggacgtcgtaaagatggatcccgagttttcccggaccatggagattttcaatttatggttaacaactggtaaaatcccggacatggtgagggggtgcagaaccgttttgattccaaaatcatcaaagccggatcgtttgaaagacattaataactggagacctatcacgatcggttccatcttgctgagactgttctccaggattgtaacagctaggctgagcaaagcgtgccccctgaacccaaggcaaagaggctttatcagagcggcgggatgctctgaaaacttaaaactcctgcaaactataatttggtcggccaaaagagaacacagaccactgggtgttgtattcgtggacatcgccaaggcttttgacaccgtaagccaccagcacatcattcatgctttgcagcaaagagaggtggatccccacatcgtcggtctggtgagcaatatgtacgagaacatcagtacgtatatcaccacaaagaggaacacacacacagacaaaatccagatccgggttggagtaaagcagggtgacccgatgtcgccccttttatttaacctggcaatggaccctctattatgcaagctggaagagagtggcaaaggataccaccgaggacagagcagcatcacagcgatggcatttgcagacgatctggttttgctgagcgactcctgggaaaatatgaatacaaatattagcatactggagaccttctgcaatctgaccggactcaaaacacaggggcaaaagtgccacggcttttacatcaagccgacaaagaagtcttacaccatcaatgactgcgctgcctggactatcaacggcacacccctgaacatgatcgaccccggcgaatctgagaaatacctcggcctgcagtttgacccgtggattggaatagcaaggtccggtctctccacaaaactagatttttggcttcagcggatcgatcaagcaccacttaaacctctgcagaaaactgatattctcaaaacatacaccatccctcggctgatctacatagctgaccactcagaagtgaaaagcgcactactcgaaacccttgaccagaagatccggacagcggtcaagaagtggcttcacctacctccgtgcacctgcgatgccatcctgtactcgagcacgagagacggcggtttgggcatcaccaaattggcaggactgatccccagcgtgcaggcccgtagactgcatcggatcgcacagtcatctgacgatacgatgaaatgcttcatggaaaaagagaaaatggaacagctgcataagaaattgtggattcaagctggaggggacagagagaacataccctcgatttgggaagcaccaccgtcgagtgaaccaccaaacaacgtgagcacaaattcggaatgggaagcaccgacccagaaagataaatttccaaagccttgcaattggaggaaaaacgaattcaaaaaatggaccaaattggcatcccaaggccgcggaattgtaaattttgaaagagacaaaattagtaaccattggatccaatactacagacgcatacctcacaggaaactcctcactgcactacaactcagggccaacgtttaccccacgagagaatttctagccaggggtagacaagaccaatacatcaaggcgtgtaggcactgcgatgcggacaacgaatcctgcgcccacatcatcggcaactgcccagtgacacaggacgcccgaatcaagaggcacaattacatctgcgaactgcttctcgaggaggcgaagaagaaggactgggtagtgttcaaggaaccgcacataagggattccaacaaggaactgtacaaacctgacctgatatttgtgaaggatgggcgtgcacttgtcgtggatgtgacagtacggtatgaagcagccaaatcatcgctggaggaagccgctgcagagaaagtgagaaagtacaaacacctggaaacggaagtaagacatctcacgaatgcaaaggacgttacttttgtgggctttcccctaggagcgcgggggaaatggcaccaagataactttaaacttttgactgagcttggcctctccaaatcgaggcaagtgaaaatggcagagactttttccacagtagcgctcttttcatctgtggacattgtacatatgtttgccagtagggccagaaaatctatggttatgtgataataggctgccttctgcggggcttgccttctggccatgcccttcttctctcccttgcacctgtacctcttggtctttgaataaagcctgagtaggaaggaccggtaaaaaaaaaaaaaaaaaaaaaaaaaaaaaaacgttgactaaaaaaaaaaaaaaaaaaaaaaaaaaaaaaaaaaaaaaaaaaaaaaaaaaaaaaaaaaaaaaaaaaaaaa

SEQ ID NO: 10935 - DNA, 5264 bp, synthetic construct
  source 1..5264: mol_type = other DNA
gaaataagagagaaaagaagagtaagaagaaatataagagaattcgccaccatggcccctaagaaaaagcggaaggtgaatatcagcggctctagctgcggcagccccaacagcgccgacaccagcagcgacttcaaggacctgtggaccaagctgaaggaatgccacgaccgggaagtgcagggactccaggtgaaggtcaccaaactcaagcaagaaagaatcctggacgcccagagactggaagaattcttcaccaagaaccagcagctgagagagcagcagaaagtgctgcacgagacaatcaaggttctggaagatagactgcgggccggcctgtgcgacagatgcgccgtgaccgaggaacacatgcgcaaaaagcagcaggagttcgagaacattagacagcaaaatctgaaattgatcacagagctgatgaacgagagaaacacactgcaggaggagaacaagaagctgagcgagcagctgcaacagaagatcgagaatgatcagcaacaccaggccgctgagctggaatgtgaagaggacgtgatccccgacagcccaatcacagctttcagcttttctggcgtgaacagactgaggcggaaggaaaacccccacgtgcggtacatcgagcagacccataccaagctggaacacagcgtgtgtgccaacgagatgagaaaggtgtccaagtcctccacccatccccagcacaaccctaacgaaaatgagatcctggtggctgatacctacgaccagtctcagagccctatggccaaggcccacggcaccagctcttatacccctgataagagctccttcaacctggccaccgtggtggccgagacactgggcctgggcgtgcaggaggaaagcgagacacagggcccaatgagccctctgggagatgagctgtaccactgcctggaaggcaaccacaagaaacagccttttgagtccggctccgagactcctggaacaagcgagagcgctacacctgagggcagccctaagagaaaggtgtccagcgccgagggcgctgccaaggaagagcctaaacggagaagcgccagactgagcgccaagccccccgccaaggtggaagccaagcctaagaaggccgccgctaaggacaagagcagcgataagaaagtccagaccaagggcaagcggggcgccaaaggcaaacaggccgaggtggccaaccaggagacaaaggaagatctgcctgctgagaacggcgaaaccaagaccgaggaatctccagcttctgacgaggccggagagaaggaggccaaaagcgacagcggctctgagacacctggaacaagcgagagcgccaccccggaatcctatgaacaacttgcaccacaaccgtgtgtgggagaaactttacattctagcctcccacgagacagtgaactgtttgtgcctgaagaggggagcagcgagaaggagagcgaggacgcgccaaaaacatctcctccgacgcctgggaaacatggtttggaacagactggggaggaaaaagtgatggtgactgttcctgacaaaaatccaccttgtccttgctgtggtacccgggtaaactctgtgttgaatctgattgaacatctgaaagtgtcacacgggaaaaggggggtttgttttcggtgtgcaaaatgtggaaaggaaaatagtaactatcacagtgttgtttgtcattttaagaaatgcaggggtccagagacggagaaagccccagctggggagtggatttgtgaggtatgcaacagagattttacaaccaaaattggcctgggacaacacaagagattggcacacccagcagtgagaaatcaggaaaggatcgttgcttcccaaccgaaagaaacatcaaatagaggtgctcacaaaaggtgctggacaaaggaggaggaagaattactaataagactggaggctcagttcgagggaaacaaaaatattaataagcttattgcagaacacataaccaccaaaacagctaagcagatcagtgacaaaaggcgattgctgtccagaaagccagcagaggagccacgtgaggagcctggaacgtgtcatcacaccaggagagcagctgcgagcctgagaacggagcctgagatgagtcatcacgcccaggcagaggacagagataatggacctgggagacgccctctgccaggcagggcagctgccggagggagaacaatggacgagataagacgccaccctgataagggcaacggacagcagagacccaccaagcaaaaatcagaagaacagctgcaggcttactataaaaagacactagaggaacgactttcagctggggcacttaacaccttcccccgagcattcaagcaggtaatggaaggccgggatataaagctagtaatcaatcagacagcgcaggactgcttcggatgcctggaatccataagccaaataagaacggcaacccgagataaaaaggacacggtgacccgggagaaacacccaaagaaaccttttcagaagtggatgaagaagagagcaatcaaaaaaggtaattatcttcggttccagcgtttattttatcttgatagagggaaactggctaaaatcattttagatgatattgaatgcttgtcttgtgacataccactcagtgaaatttattcggtttttaaaacaagatgggaaacaactggtagctttaaaagccttggggactttaaaacttacgggaaggctgacaacactgccttcagagaattaattacggctaaagaaattgagaaaaatgtgcaggaaatgagcaaaggctcggctcccggtccagacgggattactcttggggacgtcgtaaagatggatcccgagttttcccggaccatggagattttcaatttatggttaacaactggtaaaatcccggacatggtgagggggtgcagaaccgttttgattccaaaatcatcaaagccggatcgtttgaaagacattaataactggagacctatcacgatcggttccatcttgctgagactgttctccaggattgtaacagctaggctgagcaaagcgtgccccctgaacccaaggcaaagaggctttatcagagcggcgggatgctctgaaaacttaaaactcctgcaaactataatttggtcggccaaaagagaacacagaccactgggtgttgtattcgtggacatcgccaaggcttttgacaccgtaagccaccagcacatcattcatgctttgcagcaaagagaggtggatccccacatcgtcggtctggtgagcaatatgtacgagaacatcagtacgtatatcaccacaaagaggaacacacacacagacaaaatccagatccgggttggagtaaagcagggtgacccgatgtcgccccttttatttaacctggcaatggaccctctattatgcaagctggaagagagtggcaaaggataccaccgaggacagagcagcatcacagcgatggcatttgcagacgatctggttttgctgagcgactcctgggaaaatatgaatacaaatattagcatactggagaccttctgcaatctgaccggactcaaaacacaggggcaaaagtgccacggcttttacatcaagccgacaaagaagtcttacaccatcaatgactgcgctgcctggactatcaacggcacacccctgaacatgatcgaccccggcgaatctgagaaatacctcggcctgcagtttgacccgtggattggaatagcaaggtccggtctctccacaaaactagatttttggcttcagcggatcgatcaagcaccacttaaacctctgcagaaaactgatattctcaaaacatacaccatccctcggctgatctacatagctgaccactcagaagtgaaaagcgcactactcgaaacccttgaccagaagatccggacagcggtcaaggaatggcttcacctacctccgtgcacctgcaacgccatcctgtactcgagcacgagagacggcggtttgggcatcaccaaattggcaggactgatccccagcgtgcaggcccgtagactgcatcggatcgcacagtcatctgacgatacgatgaaatgcttcatggaaaaagagaaaatggaacagctgcataagaaattgtggattcaagctggaggggacagagagaacataccctcgatttgggaagcaccaccgtcgagtgaaccaccaaacaacgtgagcacaaattcggaatgggaagcaccgacccagaaagataaatttccaaagccttgcaattggaggaaaaacgaattcaaaaaatggaccaaattggcatcccaaggccgcggaattgtaaattttgaaagagacaaaattagtaaccattggatccaatactacagacgcatacctcacaggaaactcctcactgcactacaactcagggccaacgtttaccccacgagagaatttctagccaggggtagacaagaccaatacatcaaggcgtgtaggcactgcgatgcggacaacgaatcctgcgcccacatcatcggcaactgcccagtgacacaggacgcccgaatcaagaggcacaattacatctgcgaactgcttctcgaggaggcgaagaagaaggactgggtagtgttcaaggaaccgcacataagggattccaacaaggaactgtacaaacctgacctgatatttgtgaaggatgggcgtgcacttgtcgtggatgtgacagtacggtatgaagcagccaaatcatcgctggaggaagccgctgcagagaaagtgagaaagtacaaacacctggaaacggaagtaagacatctcacgaatgcaaaggacgttacttttgtgggctttcccctaggagcgcgggggaaatggcaccaagataactttaaacttttgactgagcttggcctctccaaatcgaggcaagtgaaaatggcagagactttttccacagtagcgctcttttcatctgtggacattgtacatatgtttgccagtagggccagaaaatctatggttatgtgataataggctgccttctgcggggcttgccttctggccatgcccttcttctctcccttgcacctgtacctcttggtctttgaataaagcctgagtaggaaggaccggtaaaaaaaaaaaaaaaaaaaaaaaaaaaaaaacgttgactaaaaaaaaaaaaaaaaaaaaaaaaaaaaaaaaaaaaaaaaaaaaaaaaaaaaaaaaaaaaaaaaaaaaaa

SEQ ID NO: 10936 - DNA, 5264 bp, synthetic construct
  source 1..5264: mol_type = other DNA
gaaataagagagaaaagaagagtaagaagaaatataagagaattcgccaccatggcccctaagaaaaagcggaaggtgaatatcagcggctctagctgcggcagccccaacagcgccgacaccagcagcgacttcaaggacctgtggaccaagctgaaggaatgccacgaccgggaagtgcagggactccaggtgaaggtcaccaaactcaagcaagaaagaatcctggacgcccagagactggaagaattcttcaccaagaaccagcagctgagagagcagcagaaagtgctgcacgagacaatcaaggttctggaagatagactgcgggccggcctgtgcgacagatgcgccgtgaccgaggaacacatgcgcaaaaagcagcaggagttcgagaacattagacagcaaaatctgaaattgatcacagagctgatgaacgagagaaacacactgcaggaggagaacaagaagctgagcgagcagctgcaacagaagatcgagaatgatcagcaacaccaggccgctgagctggaatgtgaagaggacgtgatccccgacagcccaatcacagctttcagcttttctggcgtgaacagactgaggcggaaggaaaacccccacgtgcggtacatcgagcagacccataccaagctggaacacagcgtgtgtgccaacgagatgagaaaggtgtccaagtcctccacccatccccagcacaaccctaacgaaaatgagatcctggtggctgatacctacgaccagtctcagagccctatggccaaggcccacggcaccagctcttatacccctgataagagctccttcaacctggccaccgtggtggccgagacactgggcctgggcgtgcaggaggaaagcgagacacagggcccaatgagccctctgggagatgagctgtaccactgcctggaaggcaaccacaagaaacagccttttgagtccggctccgagactcctggaacaagcgagagcgctacacctgagggcagccctaagagaaaggtgtccagcgccgagggcgctgccaaggaagagcctaaacggagaagcgccagactgagcgccaagccccccgccaaggtggaagccaagcctaagaaggccgccgctaaggacaagagcagcgataagaaagtccagaccaagggcaagcggggcgccaaaggcaaacaggccgaggtggccaaccaggagacaaaggaagatctgcctgctgagaacggcgaaaccaagaccgaggaatctccagcttctgacgaggccggagagaaggaggccaaaagcgacagcggctctgagacacctggaacaagcgagagcgccaccccggaatcctatgaacaacttgcaccacaaccgtgtgtgggagaaactttacattctagcctcccacgagacagtgaactgtttgtgcctgaagaggggagcagcgagaaggagagcgaggacgcgccaaaaacatctcctccgacgcctgggaaacatggtttggaacagactggggaggaaaaagtgatggtgactgttcctgacaaaaatccaccttgtccttgctgtggtacccgggtaaactctgtgttgaatctgattgaacatctgaaagtgtcacacgggaaaaggggggtttgttttcggtgtgcaaaatgtggaaaggaaaatagtaactatcacagtgttgtttgtcattttaagaaatgcaggggtccagagacggagaaagccccagctggggagtggatttgtgaggtatgcaacagagattttacaaccaaaattggcctgggacaacacaagagattggcacacccagcagtgagaaatcaggaaaggatcgttgcttcccaaccgaaagaaacatcaaatagaggtgctcacaaaaggtgctggacaaaggaggaggaagaattactaataagactggaggctcagttcgagggaaacaaaaatattaataagcttattgcagaacacataaccaccaaaacagctaagcagatcagtgacaaaaggcgattgctgtccagaaagccagcagaggagccacgtgaggagcctggaacgtgtcatcacaccaggagagcagctgcgagcctgagaacggagcctgagatgagtcatcacgcccaggcagaggacagagataatggacctgggagacgccctctgccaggcagggcagctgccggagggagaacaatggacgagataagacgccaccctgataagggcaacggacagcagagacccaccaagcaaaaatcagaagaacagctgcaggcttactataaaaagacactagaggaacgactttcagctggggcacttaacaccttcccccgagcattcaagcaggtaatggaaggccgggatataaagctagtaatcaatcagacagcgcaggactgcttcggatgcctggaatccataagccaaataagaacggcaacccgagataaaaaggacacggtgacccgggagaaacacccaaagaaaccttttcagaagtggatgaagaagagagcaatcaaaaaaggtaattatcttcggttccagcgtttattttatcttgatagagggaaactggctaaaatcattttagatgatattgaatgcttgtcttgtgacataccactcagtgaaatttattcggtttttaaaacaagatgggaaacaactggtagctttaaaagccttggggactttaaaacttacgggaaggctgacaacactgccttcagagaattaattacggctaaagaaattgagaaaaatgtgcaggaaatgagcaaaggctcggctcccggtccagacgggattactcttggggacgtcgtaaagatggatcccgagttttcccggaccatggagattttcaatttatggttaacaactggtaaaatcccggacatggtgagggggtgcagaaccgttttgattccaaaatcatcaaagccggatcgtttgaaagacattaataactggagacctatcacgatcggttccatcttgctgagactgttctccaggattgtaacagctaggctgagcaaagcgtgccccctgaacccaaggcaaagaggctttatcagagcggcgggatgctctgaaaacttaaaactcctgcaaactataatttggtcggccaaaagagaacacagaccactgggtgttgtattcgtggacatcgccaaggcttttgacaccgtaagccaccagcacatcattcatgctttgcagcaaagagaggtggatccccacatcgtcggtctggtgagcaatatgtacgagaacatcagtacgtatatcaccacaaagaggaacacacacacagacaaaatccagatccgggttggagtaaagcagggtgacccgatgtcgccccttttatttaacctggcaatggaccctctattatgcaagctggaagagagtggcaaaggataccaccgaggacagagcagcatcacagcgatggcatttgcagacgatctggttttgctgagcgactcctgggaaaatatgaatacaaatattagcatactggagaccttctgcaatctgaccggactcaaaacacaggggcaaaagtgccacggcttttacatcaagccgacaaagaagtcttacaccatcaatgactgcgctgcctggactatcaacggcacacccctgaacatgatcgaccccggcgaatctgagaaatacctcggcctgcagtttgacccgtggattggaatagcaaggtccggtctctccacaaaactagatttttggcttcagcggatcgatcaagcaccacttaaacctctgcagaaaactgatattctcaaaacatacaccatccctcggctgatctacatagctgaccactcagaagtgaaaagcgcactactcgaaacccttgaccagaagatccggacagcggtcaaggaatggcttcacctacctccgtgcacctgcgatggcatcctgtactcgagcacgagagacggcggtttgggcatcaccaaattggcaggactgatccccagcgtgcaggcccgtagactgcatcggatcgcacagtcatctgacgatacgatgaaatgcttcatggaaaaagagaaaatggaacagctgcataagaaattgtggattcaagctggaggggacagagagaacataccctcgatttgggaagcaccaccgtcgagtgaaccaccaaacaacgtgagcacaaattcggaatgggaagcaccgacccagaaagataaatttccaaagccttgcaattggaggaaaaacgaattcaaaaaatggaccaaattggcatcccaaggccgcggaattgtaaattttgaaagagacaaaattagtaaccattggatccaatactacagacgcatacctcacaggaaactcctcactgcactacaactcagggccaacgtttaccccacgagagaatttctagccaggggtagacaagaccaatacatcaaggcgtgtaggcactgcgatgcggacaacgaatcctgcgcccacatcatcggcaactgcccagtgacacaggacgcccgaatcaagaggcacaattacatctgcgaactgcttctcgaggaggcgaagaagaaggactgggtagtgttcaaggaaccgcacataagggattccaacaaggaactgtacaaacctgacctgatatttgtgaaggatgggcgtgcacttgtcgtggatgtgacagtacggtatgaagcagccaaatcatcgctggaggaagccgctgcagagaaagtgagaaagtacaaacacctggaaacggaagtaagacatctcacgaatgcaaaggacgttacttttgtgggctttcccctaggagcgcgggggaaatggcaccaagataactttaaacttttgactgagcttggcctctccaaatcgaggcaagtgaaaatggcagagactttttccacagtagcgctcttttcatctgtggacattgtacatatgtttgccagtagggccagaaaatctatggttatgtgataataggctgccttctgcggggcttgccttctggccatgcccttcttctctcccttgcacctgtacctcttggtctttgaataaagcctgagtaggaaggaccggtaaaaaaaaaaaaaaaaaaaaaaaaaaaaaaacgttgactaaaaaaaaaaaaaaaaaaaaaaaaaaaaaaaaaaaaaaaaaaaaaaaaaaaaaaaaaaaaaaaaaaaaaa

SEQ ID NO: 10937 - DNA, 5264 bp, synthetic construct
  source 1..5264: mol_type = other DNA
gaaataagagagaaaagaagagtaagaagaaatataagagaattcgccaccatggcccctaagaaaaagcggaaggtgaatatcagcggctctagctgcggcagccccaacagcgccgacaccagcagcgacttcaaggacctgtggaccaagctgaaggaatgccacgaccgggaagtgcagggactccaggtgaaggtcaccaaactcaagcaagaaagaatcctggacgcccagagactggaagaattcttcaccaagaaccagcagctgagagagcagcagaaagtgctgcacgagacaatcaaggttctggaagatagactgcgggccggcctgtgcgacagatgcgccgtgaccgaggaacacatgcgcaaaaagcagcaggagttcgagaacattagacagcaaaatctgaaattgatcacagagctgatgaacgagagaaacacactgcaggaggagaacaagaagctgagcgagcagctgcaacagaagatcgagaatgatcagcaacaccaggccgctgagctggaatgtgaagaggacgtgatccccgacagcccaatcacagctttcagcttttctggcgtgaacagactgaggcggaaggaaaacccccacgtgcggtacatcgagcagacccataccaagctggaacacagcgtgtgtgccaacgagatgagaaaggtgtccaagtcctccacccatccccagcacaaccctaacgaaaatgagatcctggtggctgatacctacgaccagtctcagagccctatggccaaggcccacggcaccagctcttatacccctgataagagctccttcaacctggccaccgtggtggccgagacactgggcctgggcgtgcaggaggaaagcgagacacagggcccaatgagccctctgggagatgagctgtaccactgcctggaaggcaaccacaagaaacagccttttgagtccggctccgagactcctggaacaagcgagagcgctacacctgagggcagccctaagagaaaggtgtccagcgccgagggcgctgccaaggaagagcctaaacggagaagcgccagactgagcgccaagccccccgccaaggtggaagccaagcctaagaaggccgccgctaaggacaagagcagcgataagaaagtccagaccaagggcaagcggggcgccaaaggcaaacaggccgaggtggccaaccaggagacaaaggaagatctgcctgctgagaacggcgaaaccaagaccgaggaatctccagcttctgacgaggccggagagaaggaggccaaaagcgacagcggctctgagacacctggaacaagcgagagcgccaccccggaatcctatgaacaacttgcaccacaaccgtgtgtgggagaaactttacattctagcctcccacgagacagtgaactgtttgtgcctgaagaggggagcagcgagaaggagagcgaggacgcgccaaaaacatctcctccgacgcctgggaaacatggtttggaacagactggggaggaaaaagtgatggtgactgttcctgacaaaaatccaccttgtccttgctgtggtacccgggtaaactctgtgttgaatctgattgaacatctgaaagtgtcacacgggaaaaggggggtttgttttcggtgtgcaaaatgtggaaaggaaaatagtaactatcacagtgttgtttgtcattttaagaaatgcaggggtccagagacggagaaagccccagctggggagtggatttgtgaggtatgcaacagagattttacaaccaaaattggcctgggacaacacaagagattggcacacccagcagtgagaaatcaggaaaggatcgttgcttcccaaccgaaagaaacatcaaatagaggtgctcacaaaaggtgctggacaaaggaggaggaagaattactaataagactggaggctcagttcgagggaaacaaaaatattaataagcttattgcagaacacataaccaccaaaacagctaagcagatcagtgacaaaaggcgattgctgtccagaaagccagcagaggagccacgtgaggagcctggaacgtgtcatcacaccaggagagcagctgcgagcctgagaacggagcctgagatgagtcatcacgcccaggcagaggacagagataatggacctgggagacgccctctgccaggcagggcagctgccggagggagaacaatggacgagataagacgccaccctgataagggcaacggacagcagagacccaccaagcaaaaatcagaagaacagctgcaggcttactataaaaagacactagaggaacgactttcagctggggcacttaacaccttcccccgagcattcaagcaggtaatggaaggccgggatataaagctagtaatcaatcagacagcgcaggactgcttcggatgcctggaatccataagccaaataagaacggcaacccgagataaaaaggacacggtgacccgggagaaacacccaaagaaaccttttcagaagtggatgaagaagagagcaatcaaaaaaggtaattatcttcggttccagcgtttattttatcttgatagagggaaactggctaaaatcattttagatgatattgaatgcttgtcttgtgacataccactcagtgaaatttattcggtttttaaaacaagatgggaaacaactggtagctttaaaagccttggggactttaaaacttacgggaaggctgacaacactgccttcagagaattaattacggctaaagaaattgagaaaaatgtgcaggaaatgagcaaaggctcggctcccggtccagacgggattactcttggggacgtcgtaaagatggatcccgagttttcccggaccatggagattttcaatttatggttaacaactggtaaaatcccggacatggtgagggggtgcagaaccgttttgattccaaaatcatcaaagccggatcgtttgaaagacattaataactggagacctatcacgatcggttccatcttgctgagactgttctccaggattgtaacagctaggctgagcaaagcgtgccccctgaacccaaggcaaagaggctttatcagagcggcgggatgctctgaaaacttaaaactcctgcaaactataatttggtcggccaaaagagaacacagaccactgggtgttgtattcgtggacatcgccaaggcttttgacaccgtaagccaccagcacatcattcatgctttgcagcaaagagaggtggatccccacatcgtcggtctggtgagcaatatgtacgagaacatcagtacgtatatcaccacaaagaggaacacacacacagacaaaatccagatccgggttggagtaaagcagggtgacccgatgtcgccccttttatttaacctggcaatggaccctctattatgcaagctggaagagagtggcaaaggataccaccgaggacagagcagcatcacagcgatggcatttgcagacgatctggttttgctgagcgactcctgggaaaatatgaatacaaatattagcatactggagaccttctgcaatctgaccggactcaaaacacaggggcaaaagtgccacggcttttacatcaagccgacaaagaagtcttacaccatcaatgactgcgctgcctggactatcaacggcacacccctgaacatgatcgaccccggcgaatctgagaaatacctcggcctgcagtttgacccgtggattggaatagcaaggtccggtctctccacaaaactagatttttggcttcagcggatcgatcaagcaccacttaaacctctgcagaaaactgatattctcaaaacatacaccatccctcggctgatctacatagctgaccactcagaagtgaaaagcgcactactcgaaacccttgaccagaagatccggacagcggtcaaggaatggcttcacctacctccgtgcacctgcgatgccatcctgcactcgagcacgagagacggcggtttgggcatcaccaaattggcaggactgatccccagcgtgcaggcccgtagactgcatcggatcgcacagtcatctgacgatacgatgaaatgcttcatggaaaaagagaaaatggaacagctgcataagaaattgtggattcaagctggaggggacagagagaacataccctcgatttgggaagcaccaccgtcgagtgaaccaccaaacaacgtgagcacaaattcggaatgggaagcaccgacccagaaagataaatttccaaagccttgcaattggaggaaaaacgaattcaaaaaatggaccaaattggcatcccaaggccgcggaattgtaaattttgaaagagacaaaattagtaaccattggatccaatactacagacgcatacctcacaggaaactcctcactgcactacaactcagggccaacgtttaccccacgagagaatttctagccaggggtagacaagaccaatacatcaaggcgtgtaggcactgcgatgcggacaacgaatcctgcgcccacatcatcggcaactgcccagtgacacaggacgcccgaatcaagaggcacaattacatctgcgaactgcttctcgaggaggcgaagaagaaggactgggtagtgttcaaggaaccgcacataagggattccaacaaggaactgtacaaacctgacctgatatttgtgaaggatgggcgtgcacttgtcgtggatgtgacagtacggtatgaagcagccaaatcatcgctggaggaagccgctgcagagaaagtgagaaagtacaaacacctggaaacggaagtaagacatctcacgaatgcaaaggacgttacttttgtgggctttcccctaggagcgcgggggaaatggcaccaagataactttaaacttttgactgagcttggcctctccaaatcgaggcaagtgaaaatggcagagactttttccacagtagcgctcttttcatctgtggacattgtacatatgtttgccagtagggccagaaaatctatggttatgtgataataggctgccttctgcggggcttgccttctggccatgcccttcttctctcccttgcacctgtacctcttggtctttgaataaagcctgagtaggaaggaccggtaaaaaaaaaaaaaaaaaaaaaaaaaaaaaaacgttgactaaaaaaaaaaaaaaaaaaaaaaaaaaaaaaaaaaaaaaaaaaaaaaaaaaaaaaaaaaaaaaaaaaaaaa

SEQ ID NO: 10938 - DNA, 5264 bp, synthetic construct
  source 1..5264: mol_type = other DNA
gaaataagagagaaaagaagagtaagaagaaatataagagaattcgccaccatggcccctaagaaaaagcggaaggtgaatatcagcggctctagctgcggcagccccaacagcgccgacaccagcagcgacttcaaggacctgtggaccaagctgaaggaatgccacgaccgggaagtgcagggactccaggtgaaggtcaccaaactcaagcaagaaagaatcctggacgcccagagactggaagaattcttcaccaagaaccagcagctgagagagcagcagaaagtgctgcacgagacaatcaaggttctggaagatagactgcgggccggcctgtgcgacagatgcgccgtgaccgaggaacacatgcgcaaaaagcagcaggagttcgagaacattagacagcaaaatctgaaattgatcacagagctgatgaacgagagaaacacactgcaggaggagaacaagaagctgagcgagcagctgcaacagaagatcgagaatgatcagcaacaccaggccgctgagctggaatgtgaagaggacgtgatccccgacagcccaatcacagctttcagcttttctggcgtgaacagactgaggcggaaggaaaacccccacgtgcggtacatcgagcagacccataccaagctggaacacagcgtgtgtgccaacgagatgagaaaggtgtccaagtcctccacccatccccagcacaaccctaacgaaaatgagatcctggtggctgatacctacgaccagtctcagagccctatggccaaggcccacggcaccagctcttatacccctgataagagctccttcaacctggccaccgtggtggccgagacactgggcctgggcgtgcaggaggaaagcgagacacagggcccaatgagccctctgggagatgagctgtaccactgcctggaaggcaaccacaagaaacagccttttgagtccggctccgagactcctggaacaagcgagagcgctacacctgagggcagccctaagagaaaggtgtccagcgccgagggcgctgccaaggaagagcctaaacggagaagcgccagactgagcgccaagccccccgccaaggtggaagccaagcctaagaaggccgccgctaaggacaagagcagcgataagaaagtccagaccaagggcaagcggggcgccaaaggcaaacaggccgaggtggccaaccaggagacaaaggaagatctgcctgctgagaacggcgaaaccaagaccgaggaatctccagcttctgacgaggccggagagaaggaggccaaaagcgacagcggctctgagacacctggaacaagcgagagcgccaccccggaatcctatgaacaacttgcaccacaaccgtgtgtgggagaaactttacattctagcctcccacgagacagtgaactgtttgtgcctgaagaggggagcagcgagaaggagagcgaggacgcgccaaaaacatctcctccgacgcctgggaaacatggtttggaacagactggggaggaaaaagtgatggtgactgttcctgacaaaaatccaccttgtccttgctgtggtacccgggtaaactctgtgttgaatctgattgaacatctgaaagtgtcacacgggaaaaggggggtttgttttcggtgtgcaaaatgtggaaaggaaaatagtaactatcacagtgttgtttgtcattttaagaaatgcaggggtccagagacggagaaagccccagctggggagtggatttgtgaggtatgcaacagagattttacaaccaaaattggcctgggacaacacaagagattggcacacccagcagtgagaaatcaggaaaggatcgttgcttcccaaccgaaagaaacatcaaatagaggtgctcacaaaaggtgctggacaaaggaggaggaagaattactaataagactggaggctcagttcgagggaaacaaaaatattaataagcttattgcagaacacataaccaccaaaacagctaagcagatcagtgacaaaaggcgattgctgtccagaaagccagcagaggagccacgtgaggagcctggaacgtgtcatcacaccaggagagcagctgcgagcctgagaacggagcctgagatgagtcatcacgcccaggcagaggacagagataatggacctgggagacgccctctgccaggcagggcagctgccggagggagaacaatggacgagataagacgccaccctgataagggcaacggacagcagagacccaccaagcaaaaatcagaagaacagctgcaggcttactataaaaagacactagaggaacgactttcagctggggcacttaacaccttcccccgagcattcaagcaggtaatggaaggccgggatataaagctagtaatcaatcagacagcgcaggactgcttcggatgcctggaatccataagccaaataagaacggcaacccgagataaaaaggacacggtgacccgggagaaacacccaaagaaaccttttcagaagtggatgaagaagagagcaatcaaaaaaggtaattatcttcggttccagcgtttattttatcttgatagagggaaactggctaaaatcattttagatgatattgaatgcttgtcttgtgacataccactcagtgaaatttattcggtttttaaaacaagatgggaaacaactggtagctttaaaagccttggggactttaaaacttacgggaaggctgacaacactgccttcagagaattaattacggctaaagaaattgagaaaaatgtgcaggaaatgagcaaaggctcggctcccggtccagacgggattactcttggggacgtcgtaaagatggatcccgagttttcccggaccatggagattttcaatttatggttaacaactggtaaaatcccggacatggtgagggggtgcagaaccgttttgattccaaaatcatcaaagccggatcgtttgaaagacattaataactggagacctatcacgatcggttccatcttgctgagactgttctccaggattgtaacagctaggctgagcaaagcgtgccccctgaacccaaggcaaagaggctttatcagagcggcgggatgctctgaaaacttaaaactcctgcaaactataatttggtcggccaaaagagaacacagaccactgggtgttgtattcgtggacatcgccaaggcttttgacaccgtaagccaccagcacatcattcatgctttgcagcaaagagaggtggatccccacatcgtcggtctggtgagcaatatgtacgagaacatcagtacgtatatcaccacaaagaggaacacacacacagacaaaatccagatccgggttggagtaaagcagggtgacccgatgtcgccccttttatttaacctggcaatggaccctctattatgcaagctggaagagagtggcaaaggataccaccgaggacagagcagcatcacagcgatggcatttgcagacgatctggttttgctgagcgactcctgggaaaatatgaatacaaatattagcatactggagaccttctgcaatctgaccggactcaaaacacaggggcaaaagtgccacggcttttacatcaagccgacaaagaagtcttacaccatcaatgactgcgctgcctggactatcaacggcacacccctgaacatgatcgaccccggcgaatctgagaaatacctcggcctgcagtttgacccgtggattggaatagcaaggtccggtctctccacaaaactagatttttggcttcagcggatcgatcaagcaccacttaaacctctgcagaaaactgatattctcaaaacatacaccatccctcggctgatctacatagctgaccactcagaagtgaaaagcgcactactcgaaacccttgaccagaagatccggacagcggtcaaggaatggcttcacctacctccgtgcacctgcgatgccatcctgtactcgagaacgagagacggcggtttgggcatcaccaaattggcaggactgatccccagcgtgcaggcccgtagactgcatcggatcgcacagtcatctgacgatacgatgaaatgcttcatggaaaaagagaaaatggaacagctgcataagaaattgtggattcaagctggaggggacagagagaacataccctcgatttgggaagcaccaccgtcgagtgaaccaccaaacaacgtgagcacaaattcggaatgggaagcaccgacccagaaagataaatttccaaagccttgcaattggaggaaaaacgaattcaaaaaatggaccaaattggcatcccaaggccgcggaattgtaaattttgaaagagacaaaattagtaaccattggatccaatactacagacgcatacctcacaggaaactcctcactgcactacaactcagggccaacgtttaccccacgagagaatttctagccaggggtagacaagaccaatacatcaaggcgtgtaggcactgcgatgcggacaacgaatcctgcgcccacatcatcggcaactgcccagtgacacaggacgcccgaatcaagaggcacaattacatctgcgaactgcttctcgaggaggcgaagaagaaggactgggtagtgttcaaggaaccgcacataagggattccaacaaggaactgtacaaacctgacctgatatttgtgaaggatgggcgtgcacttgtcgtggatgtgacagtacggtatgaagcagccaaatcatcgctggaggaagccgctgcagagaaagtgagaaagtacaaacacctggaaacggaagtaagacatctcacgaatgcaaaggacgttacttttgtgggctttcccctaggagcgcgggggaaatggcaccaagataactttaaacttttgactgagcttggcctctccaaatcgaggcaagtgaaaatggcagagactttttccacagtagcgctcttttcatctgtggacattgtacatatgtttgccagtagggccagaaaatctatggttatgtgataataggctgccttctgcggggcttgccttctggccatgcccttcttctctcccttgcacctgtacctcttggtctttgaataaagcctgagtaggaaggaccggtaaaaaaaaaaaaaaaaaaaaaaaaaaaaaaacgttgactaaaaaaaaaaaaaaaaaaaaaaaaaaaaaaaaaaaaaaaaaaaaaaaaaaaaaaaaaaaaaaaaaaaaaa

SEQ ID NO: 10939 - DNA, 5264 bp, synthetic construct
  source 1..5264: mol_type = other DNA
gaaataagagagaaaagaagagtaagaagaaatataagagaattcgccaccatggcccctaagaaaaagcggaaggtgaatatcagcggctctagctgcggcagccccaacagcgccgacaccagcagcgacttcaaggacctgtggaccaagctgaaggaatgccacgaccgggaagtgcagggactccaggtgaaggtcaccaaactcaagcaagaaagaatcctggacgcccagagactggaagaattcttcaccaagaaccagcagctgagagagcagcagaaagtgctgcacgagacaatcaaggttctggaagatagactgcgggccggcctgtgcgacagatgcgccgtgaccgaggaacacatgcgcaaaaagcagcaggagttcgagaacattagacagcaaaatctgaaattgatcacagagctgatgaacgagagaaacacactgcaggaggagaacaagaagctgagcgagcagctgcaacagaagatcgagaatgatcagcaacaccaggccgctgagctggaatgtgaagaggacgtgatccccgacagcccaatcacagctttcagcttttctggcgtgaacagactgaggcggaaggaaaacccccacgtgcggtacatcgagcagacccataccaagctggaacacagcgtgtgtgccaacgagatgagaaaggtgtccaagtcctccacccatccccagcacaaccctaacgaaaatgagatcctggtggctgatacctacgaccagtctcagagccctatggccaaggcccacggcaccagctcttatacccctgataagagctccttcaacctggccaccgtggtggccgagacactgggcctgggcgtgcaggaggaaagcgagacacagggcccaatgagccctctgggagatgagctgtaccactgcctggaaggcaaccacaagaaacagccttttgagtccggctccgagactcctggaacaagcgagagcgctacacctgagggcagccctaagagaaaggtgtccagcgccgagggcgctgccaaggaagagcctaaacggagaagcgccagactgagcgccaagccccccgccaaggtggaagccaagcctaagaaggccgccgctaaggacaagagcagcgataagaaagtccagaccaagggcaagcggggcgccaaaggcaaacaggccgaggtggccaaccaggagacaaaggaagatctgcctgctgagaacggcgaaaccaagaccgaggaatctccagcttctgacgaggccggagagaaggaggccaaaagcgacagcggctctgagacacctggaacaagcgagagcgccaccccggaatcctatgaacaacttgcaccacaaccgtgtgtgggagaaactttacattctagcctcccacgagacagtgaactgtttgtgcctgaagaggggagcagcgagaaggagagcgaggacgcgccaaaaacatctcctccgacgcctgggaaacatggtttggaacagactggggaggaaaaagtgatggtgactgttcctgacaaaaatccaccttgtccttgctgtggtacccgggtaaactctgtgttgaatctgattgaacatctgaaagtgtcacacgggaaaaggggggtttgttttcggtgtgcaaaatgtggaaaggaaaatagtaactatcacagtgttgtttgtcattttaagaaatgcaggggtccagagacggagaaagccccagctggggagtggatttgtgaggtatgcaacagagattttacaaccaaaattggcctgggacaacacaagagattggcacacccagcagtgagaaatcaggaaaggatcgttgcttcccaaccgaaagaaacatcaaatagaggtgctcacaaaaggtgctggacaaaggaggaggaagaattactaataagactggaggctcagttcgagggaaacaaaaatattaataagcttattgcagaacacataaccaccaaaacagctaagcagatcagtgacaaaaggcgattgctgtccagaaagccagcagaggagccacgtgaggagcctggaacgtgtcatcacaccaggagagcagctgcgagcctgagaacggagcctgagatgagtcatcacgcccaggcagaggacagagataatggacctgggagacgccctctgccaggcagggcagctgccggagggagaacaatggacgagataagacgccaccctgataagggcaacggacagcagagacccaccaagcaaaaatcagaagaacagctgcaggcttactataaaaagacactagaggaacgactttcagctggggcacttaacaccttcccccgagcattcaagcaggtaatggaaggccgggatataaagctagtaatcaatcagacagcgcaggactgcttcggatgcctggaatccataagccaaataagaacggcaacccgagataaaaaggacacggtgacccgggagaaacacccaaagaaaccttttcagaagtggatgaagaagagagcaatcaaaaaaggtaattatcttcggttccagcgtttattttatcttgatagagggaaactggctaaaatcattttagatgatattgaatgcttgtcttgtgacataccactcagtgaaatttattcggtttttaaaacaagatgggaaacaactggtagctttaaaagccttggggactttaaaacttacgggaaggctgacaacactgccttcagagaattaattacggctaaagaaattgagaaaaatgtgcaggaaatgagcaaaggctcggctcccggtccagacgggattactcttggggacgtcgtaaagatggatcccgagttttcccggaccatggagattttcaatttatggttaacaactggtaaaatcccggacatggtgagggggtgcagaaccgttttgattccaaaatcatcaaagccggatcgtttgaaagacattaataactggagacctatcacgatcggttccatcttgctgagactgttctccaggattgtaacagctaggctgagcaaagcgtgccccctgaacccaaggcaaagaggctttatcagagcggcgggatgctctgaaaacttaaaactcctgcaaactataatttggtcggccaaaagagaacacagaccactgggtgttgtattcgtggacatcgccaaggcttttgacaccgtaagccaccagcacatcattcatgctttgcagcaaagagaggtggatccccacatcgtcggtctggtgagcaatatgtacgagaacatcagtacgtatatcaccacaaagaggaacacacacacagacaaaatccagatccgggttggagtaaagcagggtgacccgatgtcgccccttttatttaacctggcaatggaccctctattatgcaagctggaagagagtggcaaaggataccaccgaggacagagcagcatcacagcgatggcatttgcagacgatctggttttgctgagcgactcctgggaaaatatgaatacaaatattagcatactggagaccttctgcaatctgaccggactcaaaacacaggggcaaaagtgccacggcttttacatcaagccgacaaagaagtcttacaccatcaatgactgcgctgcctggactatcaacggcacacccctgaacatgatcgaccccggcgaatctgagaaatacctcggcctgcagtttgacccgtggattggaatagcaaggtccggtctctccacaaaactagatttttggcttcagcggatcgatcaagcaccacttaaacctctgcagaaaactgatattctcaaaacatacaccatccctcggctgatctacatagctgaccactcagaagtgaaaagcgcactactcgaaacccttgaccagaagatccggacagcggtcaaggaatggcttcacctacctccgtgcacctgcgatgccatcctgtactcgagcacgagagacggcggtttgggcatcaccagattggcaggactgatccccagcgtgcaggcccgtagactgcatcggatcgcacagtcatctgacgatacgatgaaatgcttcatggaaaaagagaaaatggaacagctgcataagaaattgtggattcaagctggaggggacagagagaacataccctcgatttgggaagcaccaccgtcgagtgaaccaccaaacaacgtgagcacaaattcggaatgggaagcaccgacccagaaagataaatttccaaagccttgcaattggaggaaaaacgaattcaaaaaatggaccaaattggcatcccaaggccgcggaattgtaaattttgaaagagacaaaattagtaaccattggatccaatactacagacgcatacctcacaggaaactcctcactgcactacaactcagggccaacgtttaccccacgagagaatttctagccaggggtagacaagaccaatacatcaaggcgtgtaggcactgcgatgcggacaacgaatcctgcgcccacatcatcggcaactgcccagtgacacaggacgcccgaatcaagaggcacaattacatctgcgaactgcttctcgaggaggcgaagaagaaggactgggtagtgttcaaggaaccgcacataagggattccaacaaggaactgtacaaacctgacctgatatttgtgaaggatgggcgtgcacttgtcgtggatgtgacagtacggtatgaagcagccaaatcatcgctggaggaagccgctgcagagaaagtgagaaagtacaaacacctggaaacggaagtaagacatctcacgaatgcaaaggacgttacttttgtgggctttcccctaggagcgcgggggaaatggcaccaagataactttaaacttttgactgagcttggcctctccaaatcgaggcaagtgaaaatggcagagactttttccacagtagcgctcttttcatctgtggacattgtacatatgtttgccagtagggccagaaaatctatggttatgtgataataggctgccttctgcggggcttgccttctggccatgcccttcttctctcccttgcacctgtacctcttggtctttgaataaagcctgagtaggaaggaccggtaaaaaaaaaaaaaaaaaaaaaaaaaaaaaaacgttgactaaaaaaaaaaaaaaaaaaaaaaaaaaaaaaaaaaaaaaaaaaaaaaaaaaaaaaaaaaaaaaaaaaaaaa

SEQ ID NO: 10940 - DNA, 5264 bp, synthetic construct
  source 1..5264: mol_type = other DNA
gaaataagagagaaaagaagagtaagaagaaatataagagaattcgccaccatggcccctaagaaaaagcggaaggtgaatatcagcggctctagctgcggcagccccaacagcgccgacaccagcagcgacttcaaggacctgtggaccaagctgaaggaatgccacgaccgggaagtgcagggactccaggtgaaggtcaccaaactcaagcaagaaagaatcctggacgcccagagactggaagaattcttcaccaagaaccagcagctgagagagcagcagaaagtgctgcacgagacaatcaaggttctggaagatagactgcgggccggcctgtgcgacagatgcgccgtgaccgaggaacacatgcgcaaaaagcagcaggagttcgagaacattagacagcaaaatctgaaattgatcacagagctgatgaacgagagaaacacactgcaggaggagaacaagaagctgagcgagcagctgcaacagaagatcgagaatgatcagcaacaccaggccgctgagctggaatgtgaagaggacgtgatccccgacagcccaatcacagctttcagcttttctggcgtgaacagactgaggcggaaggaaaacccccacgtgcggtacatcgagcagacccataccaagctggaacacagcgtgtgtgccaacgagatgagaaaggtgtccaagtcctccacccatccccagcacaaccctaacgaaaatgagatcctggtggctgatacctacgaccagtctcagagccctatggccaaggcccacggcaccagctcttatacccctgataagagctccttcaacctggccaccgtggtggccgagacactgggcctgggcgtgcaggaggaaagcgagacacagggcccaatgagccctctgggagatgagctgtaccactgcctggaaggcaaccacaagaaacagccttttgagtccggctccgagactcctggaacaagcgagagcgctacacctgagggcagccctaagagaaaggtgtccagcgccgagggcgctgccaaggaagagcctaaacggagaagcgccagactgagcgccaagccccccgccaaggtggaagccaagcctaagaaggccgccgctaaggacaagagcagcgataagaaagtccagaccaagggcaagcggggcgccaaaggcaaacaggccgaggtggccaaccaggagacaaaggaagatctgcctgctgagaacggcgaaaccaagaccgaggaatctccagcttctgacgaggccggagagaaggaggccaaaagcgacagcggctctgagacacctggaacaagcgagagcgccaccccggaatcctatgaacaacttgcaccacaaccgtgtgtgggagaaactttacattctagcctcccacgagacagtgaactgtttgtgcctgaagaggggagcagcgagaaggagagcgaggacgcgccaaaaacatctcctccgacgcctgggaaacatggtttggaacagactggggaggaaaaagtgatggtgactgttcctgacaaaaatccaccttgtccttgctgtggtacccgggtaaactctgtgttgaatctgattgaacatctgaaagtgtcacacgggaaaaggggggtttgttttcggtgtgcaaaatgtggaaaggaaaatagtaactatcacagtgttgtttgtcattttaagaaatgcaggggtccagagacggagaaagccccagctggggagtggatttgtgaggtatgcaacagagattttacaaccaaaattggcctgggacaacacaagagattggcacacccagcagtgagaaatcaggaaaggatcgttgcttcccaaccgaaagaaacatcaaatagaggtgctcacaaaaggtgctggacaaaggaggaggaagaattactaataagactggaggctcagttcgagggaaacaaaaatattaataagcttattgcagaacacataaccaccaaaacagctaagcagatcagtgacaaaaggcgattgctgtccagaaagccagcagaggagccacgtgaggagcctggaacgtgtcatcacaccaggagagcagctgcgagcctgagaacggagcctgagatgagtcatcacgcccaggcagaggacagagataatggacctgggagacgccctctgccaggcagggcagctgccggagggagaacaatggacgagataagacgccaccctgataagggcaacggacagcagagacccaccaagcaaaaatcagaagaacagctgcaggcttactataaaaagacactagaggaacgactttcagctggggcacttaacaccttcccccgagcattcaagcaggtaatggaaggccgggatataaagctagtaatcaatcagacagcgcaggactgcttcggatgcctggaatccataagccaaataagaacggcaacccgagataaaaaggacacggtgacccgggagaaacacccaaagaaaccttttcagaagtggatgaagaagagagcaatcaaaaaaggtaattatcttcggttccagcgtttattttatcttgatagagggaaactggctaaaatcattttagatgatattgaatgcttgtcttgtgacataccactcagtgaaatttattcggtttttaaaacaagatgggaaacaactggtagctttaaaagccttggggactttaaaacttacgggaaggctgacaacactgccttcagagaattaattacggctaaagaaattgagaaaaatgtgcaggaaatgagcaaaggctcggctcccggtccagacgggattactcttggggacgtcgtaaagatggatcccgagttttcccggaccatggagattttcaatttatggttaacaactggtaaaatcccggacatggtgagggggtgcagaaccgttttgattccaaaatcatcaaagccggatcgtttgaaagacattaataactggagacctatcacgatcggttccatcttgctgagactgttctccaggattgtaacagctaggctgagcaaagcgtgccccctgaacccaaggcaaagaggctttatcagagcggcgggatgctctgaaaacttaaaactcctgcaaactataatttggtcggccaaaagagaacacagaccactgggtgttgtattcgtggacatcgccaaggcttttgacaccgtaagccaccagcacatcattcatgctttgcagcaaagagaggtggatccccacatcgtcggtctggtgagcaatatgtacgagaacatcagtacgtatatcaccacaaagaggaacacacacacagacaaaatccagatccgggttggagtaaagcagggtgacccgatgtcgccccttttatttaacctggcaatggaccctctattatgcaagctggaagagagtggcaaaggataccaccgaggacagagcagcatcacagcgatggcatttgcagacgatctggttttgctgagcgactcctgggaaaatatgaatacaaatattagcatactggagaccttctgcaatctgaccggactcaaaacacaggggcaaaagtgccacggcttttacatcaagccgacaaagaagtcttacaccatcaatgactgcgctgcctggactatcaacggcacacccctgaacatgatcgaccccggcgaatctgagaaatacctcggcctgcagtttgacccgtggattggaatagcaaggtccggtctctccacaaaactagatttttggcttcagcggatcgatcaagcaccacttaaacctctgcagaaaactgatattctcaaaacatacaccatccctcggctgatctacatagctgaccactcagaagtgaaaagcgcactactcgaaacccttgaccagaagatccggacagcggtcaaggaatggcttcacctacctccgtgcacctgcgatgccatcctgtactcgagcacgagagacggcggtttgggcatcaccaaattggcaggactgatccccagcagacaggcccgtagactgcatcggatcgcacagtcatctgacgatacgatgaaatgcttcatggaaaaagagaaaatggaacagctgcataagaaattgtggattcaagctggaggggacagagagaacataccctcgatttgggaagcaccaccgtcgagtgaaccaccaaacaacgtgagcacaaattcggaatgggaagcaccgacccagaaagataaatttccaaagccttgcaattggaggaaaaacgaattcaaaaaatggaccaaattggcatcccaaggccgcggaattgtaaattttgaaagagacaaaattagtaaccattggatccaatactacagacgcatacctcacaggaaactcctcactgcactacaactcagggccaacgtttaccccacgagagaatttctagccaggggtagacaagaccaatacatcaaggcgtgtaggcactgcgatgcggacaacgaatcctgcgcccacatcatcggcaactgcccagtgacacaggacgcccgaatcaagaggcacaattacatctgcgaactgcttctcgaggaggcgaagaagaaggactgggtagtgttcaaggaaccgcacataagggattccaacaaggaactgtacaaacctgacctgatatttgtgaaggatgggcgtgcacttgtcgtggatgtgacagtacggtatgaagcagccaaatcatcgctggaggaagccgctgcagagaaagtgagaaagtacaaacacctggaaacggaagtaagacatctcacgaatgcaaaggacgttacttttgtgggctttcccctaggagcgcgggggaaatggcaccaagataactttaaacttttgactgagcttggcctctccaaatcgaggcaagtgaaaatggcagagactttttccacagtagcgctcttttcatctgtggacattgtacatatgtttgccagtagggccagaaaatctatggttatgtgataataggctgccttctgcggggcttgccttctggccatgcccttcttctctcccttgcacctgtacctcttggtctttgaataaagcctgagtaggaaggaccggtaaaaaaaaaaaaaaaaaaaaaaaaaaaaaaacgttgactaaaaaaaaaaaaaaaaaaaaaaaaaaaaaaaaaaaaaaaaaaaaaaaaaaaaaaaaaaaaaaaaaaaaaa

SEQ ID NO: 10941 - DNA, 5264 bp, synthetic construct
  source 1..5264: mol_type = other DNA
gaaataagagagaaaagaagagtaagaagaaatataagagaattcgccaccatggcccctaagaaaaagcggaaggtgaatatcagcggctctagctgcggcagccccaacagcgccgacaccagcagcgacttcaaggacctgtggaccaagctgaaggaatgccacgaccgggaagtgcagggactccaggtgaaggtcaccaaactcaagcaagaaagaatcctggacgcccagagactggaagaattcttcaccaagaaccagcagctgagagagcagcagaaagtgctgcacgagacaatcaaggttctggaagatagactgcgggccggcctgtgcgacagatgcgccgtgaccgaggaacacatgcgcaaaaagcagcaggagttcgagaacattagacagcaaaatctgaaattgatcacagagctgatgaacgagagaaacacactgcaggaggagaacaagaagctgagcgagcagctgcaacagaagatcgagaatgatcagcaacaccaggccgctgagctggaatgtgaagaggacgtgatccccgacagcccaatcacagctttcagcttttctggcgtgaacagactgaggcggaaggaaaacccccacgtgcggtacatcgagcagacccataccaagctggaacacagcgtgtgtgccaacgagatgagaaaggtgtccaagtcctccacccatccccagcacaaccctaacgaaaatgagatcctggtggctgatacctacgaccagtctcagagccctatggccaaggcccacggcaccagctcttatacccctgataagagctccttcaacctggccaccgtggtggccgagacactgggcctgggcgtgcaggaggaaagcgagacacagggcccaatgagccctctgggagatgagctgtaccactgcctggaaggcaaccacaagaaacagccttttgagtccggctccgagactcctggaacaagcgagagcgctacacctgagggcagccctaagagaaaggtgtccagcgccgagggcgctgccaaggaagagcctaaacggagaagcgccagactgagcgccaagccccccgccaaggtggaagccaagcctaagaaggccgccgctaaggacaagagcagcgataagaaagtccagaccaagggcaagcggggcgccaaaggcaaacaggccgaggtggccaaccaggagacaaaggaagatctgcctgctgagaacggcgaaaccaagaccgaggaatctccagcttctgacgaggccggagagaaggaggccaaaagcgacagcggctctgagacacctggaacaagcgagagcgccaccccggaatcctatgaacaacttgcaccacaaccgtgtgtgggagaaactttacattctagcctcccacgagacagtgaactgtttgtgcctgaagaggggagcagcgagaaggagagcgaggacgcgccaaaaacatctcctccgacgcctgggaaacatggtttggaacagactggggaggaaaaagtgatggtgactgttcctgacaaaaatccaccttgtccttgctgtggtacccgggtaaactctgtgttgaatctgattgaacatctgaaagtgtcacacgggaaaaggggggtttgttttcggtgtgcaaaatgtggaaaggaaaatagtaactatcacagtgttgtttgtcattttaagaaatgcaggggtccagagacggagaaagccccagctggggagtggatttgtgaggtatgcaacagagattttacaaccaaaattggcctgggacaacacaagagattggcacacccagcagtgagaaatcaggaaaggatcgttgcttcccaaccgaaagaaacatcaaatagaggtgctcacaaaaggtgctggacaaaggaggaggaagaattactaataagactggaggctcagttcgagggaaacaaaaatattaataagcttattgcagaacacataaccaccaaaacagctaagcagatcagtgacaaaaggcgattgctgtccagaaagccagcagaggagccacgtgaggagcctggaacgtgtcatcacaccaggagagcagctgcgagcctgagaacggagcctgagatgagtcatcacgcccaggcagaggacagagataatggacctgggagacgccctctgccaggcagggcagctgccggagggagaacaatggacgagataagacgccaccctgataagggcaacggacagcagagacccaccaagcaaaaatcagaagaacagctgcaggcttactataaaaagacactagaggaacgactttcagctggggcacttaacaccttcccccgagcattcaagcaggtaatggaaggccgggatataaagctagtaatcaatcagacagcgcaggactgcttcggatgcctggaatccataagccaaataagaacggcaacccgagataaaaaggacacggtgacccgggagaaacacccaaagaaaccttttcagaagtggatgaagaagagagcaatcaaaaaaggtaattatcttcggttccagcgtttattttatcttgatagagggaaactggctaaaatcattttagatgatattgaatgcttgtcttgtgacataccactcagtgaaatttattcggtttttaaaacaagatgggaaacaactggtagctttaaaagccttggggactttaaaacttacgggaaggctgacaacactgccttcagagaattaattacggctaaagaaattgagaaaaatgtgcaggaaatgagcaaaggctcggctcccggtccagacgggattactcttggggacgtcgtaaagatggatcccgagttttcccggaccatggagattttcaatttatggttaacaactggtaaaatcccggacatggtgagggggtgcagaaccgttttgattccaaaatcatcaaagccggatcgtttgaaagacattaataactggagacctatcacgatcggttccatcttgctgagactgttctccaggattgtaacagctaggctgagcaaagcgtgccccctgaacccaaggcaaagaggctttatcagagcggcgggatgctctgaaaacttaaaactcctgcaaactataatttggtcggccaaaagagaacacagaccactgggtgttgtattcgtggacatcgccaaggcttttgacaccgtaagccaccagcacatcattcatgctttgcagcaaagagaggtggatccccacatcgtcggtctggtgagcaatatgtacgagaacatcagtacgtatatcaccacaaagaggaacacacacacagacaaaatccagatccgggttggagtaaagcagggtgacccgatgtcgccccttttatttaacctggcaatggaccctctattatgcaagctggaagagagtggcaaaggataccaccgaggacagagcagcatcacagcgatggcatttgcagacgatctggttttgctgagcgactcctgggaaaatatgaatacaaatattagcatactggagaccttctgcaatctgaccggactcaaaacacaggggcaaaagtgccacggcttttacatcaagccgacaaagaagtcttacaccatcaatgactgcgctgcctggactatcaacggcacacccctgaacatgatcgaccccggcgaatctgagaaatacctcggcctgcagtttgacccgtggattggaatagcaaggtccggtctctccacaaaactagatttttggcttcagcggatcgatcaagcaccacttaaacctctgcagaaaactgatattctcaaaacatacaccatccctcggctgatctacatagctgaccactcagaagtgaaaagcgcactactcgaaacccttgaccagaagatccggacagcggtcaaggaatggcttcacctacctccgtgcacctgcgatgccatcctgtactcgagcacgagagacggcggtttgggcatcaccaaattggcaggactgatccccagcgtgcaggcccgtagactgcatcggatcgcacagtcatctgacgatacgatgagatgcttcatggaaaaagagaaaatggaacagctgcataagaaattgtggattcaagctggaggggacagagagaacataccctcgatttgggaagcaccaccgtcgagtgaaccaccaaacaacgtgagcacaaattcggaatgggaagcaccgacccagaaagataaatttccaaagccttgcaattggaggaaaaacgaattcaaaaaatggaccaaattggcatcccaaggccgcggaattgtaaattttgaaagagacaaaattagtaaccattggatccaatactacagacgcatacctcacaggaaactcctcactgcactacaactcagggccaacgtttaccccacgagagaatttctagccaggggtagacaagaccaatacatcaaggcgtgtaggcactgcgatgcggacaacgaatcctgcgcccacatcatcggcaactgcccagtgacacaggacgcccgaatcaagaggcacaattacatctgcgaactgcttctcgaggaggcgaagaagaaggactgggtagtgttcaaggaaccgcacataagggattccaacaaggaactgtacaaacctgacctgatatttgtgaaggatgggcgtgcacttgtcgtggatgtgacagtacggtatgaagcagccaaatcatcgctggaggaagccgctgcagagaaagtgagaaagtacaaacacctggaaacggaagtaagacatctcacgaatgcaaaggacgttacttttgtgggctttcccctaggagcgcgggggaaatggcaccaagataactttaaacttttgactgagcttggcctctccaaatcgaggcaagtgaaaatggcagagactttttccacagtagcgctcttttcatctgtggacattgtacatatgtttgccagtagggccagaaaatctatggttatgtgataataggctgccttctgcggggcttgccttctggccatgcccttcttctctcccttgcacctgtacctcttggtctttgaataaagcctgagtaggaaggaccggtaaaaaaaaaaaaaaaaaaaaaaaaaaaaaaacgttgactaaaaaaaaaaaaaaaaaaaaaaaaaaaaaaaaaaaaaaaaaaaaaaaaaaaaaaaaaaaaaaaaaaaaaa

SEQ ID NO: 10942 - DNA, 5264 bp, synthetic construct
  source 1..5264: mol_type = other DNA
gaaataagagagaaaagaagagtaagaagaaatataagagaattcgccaccatggcccctaagaaaaagcggaaggtgaatatcagcggctctagctgcggcagccccaacagcgccgacaccagcagcgacttcaaggacctgtggaccaagctgaaggaatgccacgaccgggaagtgcagggactccaggtgaaggtcaccaaactcaagcaagaaagaatcctggacgcccagagactggaagaattcttcaccaagaaccagcagctgagagagcagcagaaagtgctgcacgagacaatcaaggttctggaagatagactgcgggccggcctgtgcgacagatgcgccgtgaccgaggaacacatgcgcaaaaagcagcaggagttcgagaacattagacagcaaaatctgaaattgatcacagagctgatgaacgagagaaacacactgcaggaggagaacaagaagctgagcgagcagctgcaacagaagatcgagaatgatcagcaacaccaggccgctgagctggaatgtgaagaggacgtgatccccgacagcccaatcacagctttcagcttttctggcgtgaacagactgaggcggaaggaaaacccccacgtgcggtacatcgagcagacccataccaagctggaacacagcgtgtgtgccaacgagatgagaaaggtgtccaagtcctccacccatccccagcacaaccctaacgaaaatgagatcctggtggctgatacctacgaccagtctcagagccctatggccaaggcccacggcaccagctcttatacccctgataagagctccttcaacctggccaccgtggtggccgagacactgggcctgggcgtgcaggaggaaagcgagacacagggcccaatgagccctctgggagatgagctgtaccactgcctggaaggcaaccacaagaaacagccttttgagtccggctccgagactcctggaacaagcgagagcgctacacctgagggcagccctaagagaaaggtgtccagcgccgagggcgctgccaaggaagagcctaaacggagaagcgccagactgagcgccaagccccccgccaaggtggaagccaagcctaagaaggccgccgctaaggacaagagcagcgataagaaagtccagaccaagggcaagcggggcgccaaaggcaaacaggccgaggtggccaaccaggagacaaaggaagatctgcctgctgagaacggcgaaaccaagaccgaggaatctccagcttctgacgaggccggagagaaggaggccaaaagcgacagcggctctgagacacctggaacaagcgagagcgccaccccggaatcctatgaacaacttgcaccacaaccgtgtgtgggagaaactttacattctagcctcccacgagacagtgaactgtttgtgcctgaagaggggagcagcgagaaggagagcgaggacgcgccaaaaacatctcctccgacgcctgggaaacatggtttggaacagactggggaggaaaaagtgatggtgactgttcctgacaaaaatccaccttgtccttgctgtggtacccgggtaaactctgtgttgaatctgattgaacatctgaaagtgtcacacgggaaaaggggggtttgttttcggtgtgcaaaatgtggaaaggaaaatagtaactatcacagtgttgtttgtcattttaagaaatgcaggggtccagagacggagaaagccccagctggggagtggatttgtgaggtatgcaacagagattttacaaccaaaattggcctgggacaacacaagagattggcacacccagcagtgagaaatcaggaaaggatcgttgcttcccaaccgaaagaaacatcaaatagaggtgctcacaaaaggtgctggacaaaggaggaggaagaattactaataagactggaggctcagttcgagggaaacaaaaatattaataagcttattgcagaacacataaccaccaaaacagctaagcagatcagtgacaaaaggcgattgctgtccagaaagccagcagaggagccacgtgaggagcctggaacgtgtcatcacaccaggagagcagctgcgagcctgagaacggagcctgagatgagtcatcacgcccaggcagaggacagagataatggacctgggagacgccctctgccaggcagggcagctgccggagggagaacaatggacgagataagacgccaccctgataagggcaacggacagcagagacccaccaagcaaaaatcagaagaacagctgcaggcttactataaaaagacactagaggaacgactttcagctggggcacttaacaccttcccccgagcattcaagcaggtaatggaaggccgggatataaagctagtaatcaatcagacagcgcaggactgcttcggatgcctggaatccataagccaaataagaacggcaacccgagataaaaaggacacggtgacccgggagaaacacccaaagaaaccttttcagaagtggatgaagaagagagcaatcaaaaaaggtaattatcttcggttccagcgtttattttatcttgatagagggaaactggctaaaatcattttagatgatattgaatgcttgtcttgtgacataccactcagtgaaatttattcggtttttaaaacaagatgggaaacaactggtagctttaaaagccttggggactttaaaacttacgggaaggctgacaacactgccttcagagaattaattacggctaaagaaattgagaaaaatgtgcaggaaatgagcaaaggctcggctcccggtccagacgggattactcttggggacgtcgtaaagatggatcccgagttttcccggaccatggagattttcaatttatggttaacaactggtaaaatcccggacatggtgagggggtgcagaaccgttttgattccaaaatcatcaaagccggatcgtttgaaagacattaataactggagacctatcacgatcggttccatcttgctgagactgttctccaggattgtaacagctaggctgagcaaagcgtgccccctgaacccaaggcaaagaggctttatcagagcggcgggatgctctgaaaacttaaaactcctgcaaactataatttggtcggccaaaagagaacacagaccactgggtgttgtattcgtggacatcgccaaggcttttgacaccgtaagccaccagcacatcattcatgctttgcagcaaagagaggtggatccccacatcgtcggtctggtgagcaatatgtacgagaacatcagtacgtatatcaccacaaagaggaacacacacacagacaaaatccagatccgggttggagtaaagcagggtgacccgatgtcgccccttttatttaacctggcaatggaccctctattatgcaagctggaagagagtggcaaaggataccaccgaggacagagcagcatcacagcgatggcatttgcagacgatctggttttgctgagcgactcctgggaaaatatgaatacaaatattagcatactggagaccttctgcaatctgaccggactcaaaacacaggggcaaaagtgccacggcttttacatcaagccgacaaagaagtcttacaccatcaatgactgcgctgcctggactatcaacggcacacccctgaacatgatcgaccccggcgaatctgagaaatacctcggcctgcagtttgacccgtggattggaatagcaaggtccggtctctccacaaaactagatttttggcttcagcggatcgatcaagcaccacttaaacctctgcagaaaactgatattctcaaaacatacaccatccctcggctgatctacatagctgaccactcagaagtgaaaagcgcactactcgaaacccttgaccagaagatccggacagcggtcaaggaatggcttcacctacctccgtgcacctgcgatgccatcctgtactcgagcacgagagacggcggtttgggcatcaccaaattggcaggactgatccccagcgtgcaggcccgtagactgcatcggatcgcacagtcatctgacgatacgatgaaatgcctgatggaaaaagagaaaatggaacagctgcataagaaattgtggattcaagctggaggggacagagagaacataccctcgatttgggaagcaccaccgtcgagtgaaccaccaaacaacgtgagcacaaattcggaatgggaagcaccgacccagaaagataaatttccaaagccttgcaattggaggaaaaacgaattcaaaaaatggaccaaattggcatcccaaggccgcggaattgtaaattttgaaagagacaaaattagtaaccattggatccaatactacagacgcatacctcacaggaaactcctcactgcactacaactcagggccaacgtttaccccacgagagaatttctagccaggggtagacaagaccaatacatcaaggcgtgtaggcactgcgatgcggacaacgaatcctgcgcccacatcatcggcaactgcccagtgacacaggacgcccgaatcaagaggcacaattacatctgcgaactgcttctcgaggaggcgaagaagaaggactgggtagtgttcaaggaaccgcacataagggattccaacaaggaactgtacaaacctgacctgatatttgtgaaggatgggcgtgcacttgtcgtggatgtgacagtacggtatgaagcagccaaatcatcgctggaggaagccgctgcagagaaagtgagaaagtacaaacacctggaaacggaagtaagacatctcacgaatgcaaaggacgttacttttgtgggctttcccctaggagcgcgggggaaatggcaccaagataactttaaacttttgactgagcttggcctctccaaatcgaggcaagtgaaaatggcagagactttttccacagtagcgctcttttcatctgtggacattgtacatatgtttgccagtagggccagaaaatctatggttatgtgataataggctgccttctgcggggcttgccttctggccatgcccttcttctctcccttgcacctgtacctcttggtctttgaataaagcctgagtaggaaggaccggtaaaaaaaaaaaaaaaaaaaaaaaaaaaaaaacgttgactaaaaaaaaaaaaaaaaaaaaaaaaaaaaaaaaaaaaaaaaaaaaaaaaaaaaaaaaaaaaaaaaaaaaaa

SEQ ID NO: 10943 - DNA, 5264 bp, synthetic construct
  source 1..5264: mol_type = other DNA
gaaataagagagaaaagaagagtaagaagaaatataagagaattcgccaccatggcccctaagaaaaagcggaaggtgaatatcagcggctctagctgcggcagccccaacagcgccgacaccagcagcgacttcaaggacctgtggaccaagctgaaggaatgccacgaccgggaagtgcagggactccaggtgaaggtcaccaaactcaagcaagaaagaatcctggacgcccagagactggaagaattcttcaccaagaaccagcagctgagagagcagcagaaagtgctgcacgagacaatcaaggttctggaagatagactgcgggccggcctgtgcgacagatgcgccgtgaccgaggaacacatgcgcaaaaagcagcaggagttcgagaacattagacagcaaaatctgaaattgatcacagagctgatgaacgagagaaacacactgcaggaggagaacaagaagctgagcgagcagctgcaacagaagatcgagaatgatcagcaacaccaggccgctgagctggaatgtgaagaggacgtgatccccgacagcccaatcacagctttcagcttttctggcgtgaacagactgaggcggaaggaaaacccccacgtgcggtacatcgagcagacccataccaagctggaacacagcgtgtgtgccaacgagatgagaaaggtgtccaagtcctccacccatccccagcacaaccctaacgaaaatgagatcctggtggctgatacctacgaccagtctcagagccctatggccaaggcccacggcaccagctcttatacccctgataagagctccttcaacctggccaccgtggtggccgagacactgggcctgggcgtgcaggaggaaagcgagacacagggcccaatgagccctctgggagatgagctgtaccactgcctggaaggcaaccacaagaaacagccttttgagtccggctccgagactcctggaacaagcgagagcgctacacctgagggcagccctaagagaaaggtgtccagcgccgagggcgctgccaaggaagagcctaaacggagaagcgccagactgagcgccaagccccccgccaaggtggaagccaagcctaagaaggccgccgctaaggacaagagcagcgataagaaagtccagaccaagggcaagcggggcgccaaaggcaaacaggccgaggtggccaaccaggagacaaaggaagatctgcctgctgagaacggcgaaaccaagaccgaggaatctccagcttctgacgaggccggagagaaggaggccaaaagcgacagcggctctgagacacctggaacaagcgagagcgccaccccggaatcctatgaacaacttgcaccacaaccgtgtgtgggagaaactttacattctagcctcccacgagacagtgaactgtttgtgcctgaagaggggagcagcgagaaggagagcgaggacgcgccaaaaacatctcctccgacgcctgggaaacatggtttggaacagactggggaggaaaaagtgatggtgactgttcctgacaaaaatccaccttgtccttgctgtggtacccgggtaaactctgtgttgaatctgattgaacatctgaaagtgtcacacgggaaaaggggggtttgttttcggtgtgcaaaatgtggaaaggaaaatagtaactatcacagtgttgtttgtcattttaagaaatgcaggggtccagagacggagaaagccccagctggggagtggatttgtgaggtatgcaacagagattttacaaccaaaattggcctgggacaacacaagagattggcacacccagcagtgagaaatcaggaaaggatcgttgcttcccaaccgaaagaaacatcaaatagaggtgctcacaaaaggtgctggacaaaggaggaggaagaattactaataagactggaggctcagttcgagggaaacaaaaatattaataagcttattgcagaacacataaccaccaaaacagctaagcagatcagtgacaaaaggcgattgctgtccagaaagccagcagaggagccacgtgaggagcctggaacgtgtcatcacaccaggagagcagctgcgagcctgagaacggagcctgagatgagtcatcacgcccaggcagaggacagagataatggacctgggagacgccctctgccaggcagggcagctgccggagggagaacaatggacgagataagacgccaccctgataagggcaacggacagcagagacccaccaagcaaaaatcagaagaacagctgcaggcttactataaaaagacactagaggaacgactttcagctggggcacttaacaccttcccccgagcattcaagcaggtaatggaaggccgggatataaagctagtaatcaatcagacagcgcaggactgcttcggatgcctggaatccataagccaaataagaacggcaacccgagataaaaaggacacggtgacccgggagaaacacccaaagaaaccttttcagaagtggatgaagaagagagcaatcaaaaaaggtaattatcttcggttccagcgtttattttatcttgatagagggaaactggctaaaatcattttagatgatattgaatgcttgtcttgtgacataccactcagtgaaatttattcggtttttaaaacaagatgggaaacaactggtagctttaaaagccttggggactttaaaacttacgggaaggctgacaacactgccttcagagaattaattacggctaaagaaattgagaaaaatgtgcaggaaatgagcaaaggctcggctcccggtccagacgggattactcttggggacgtcgtaaagatggatcccgagttttcccggaccatggagattttcaatttatggttaacaactggtaaaatcccggacatggtgagggggtgcagaaccgttttgattccaaaatcatcaaagccggatcgtttgaaagacattaataactggagacctatcacgatcggttccatcttgctgagactgttctccaggattgtaacagctaggctgagcaaagcgtgccccctgaacccaaggcaaagaggctttatcagagcggcgggatgctctgaaaacttaaaactcctgcaaactataatttggtcggccaaaagagaacacagaccactgggtgttgtattcgtggacatcgccaaggcttttgacaccgtaagccaccagcacatcattcatgctttgcagcaaagagaggtggatccccacatcgtcggtctggtgagcaatatgtacgagaacatcagtacgtatatcaccacaaagaggaacacacacacagacaaaatccagatccgggttggagtaaagcagggtgacccgatgtcgccccttttatttaacctggcaatggaccctctattatgcaagctggaagagagtggcaaaggataccaccgaggacagagcagcatcacagcgatggcatttgcagacgatctggttttgctgagcgactcctgggaaaatatgaatacaaatattagcatactggagaccttctgcaatctgaccggactcaaaacacaggggcaaaagtgccacggcttttacatcaagccgacaaagaagtcttacaccatcaatgactgcgctgcctggactatcaacggcacacccctgaacatgatcgaccccggcgaatctgagaaatacctcggcctgcagtttgacccgtggattggaatagcaaggtccggtctctccacaaaactagatttttggcttcagcggatcgatcaagcaccacttaaacctctgcagaaaactgatattctcaaaacatacaccatccctcggctgatctacatagctgaccactcagaagtgaaaagcgcactactcgaaacccttgaccagaagatccggacagcggtcaaggaatggcttcacctacctccgtgcacctgcgatgccatcctgtactcgagcacgagagacggcggtttgggcatcaccaaattggcaggactgatccccagcgtgcaggcccgtagactgcatcggatcgcacagtcatctgacgatacgatgaaatgcttcatgaagaaagagaaaatggaacagctgcataagaaattgtggattcaagctggaggggacagagagaacataccctcgatttgggaagcaccaccgtcgagtgaaccaccaaacaacgtgagcacaaattcggaatgggaagcaccgacccagaaagataaatttccaaagccttgcaattggaggaaaaacgaattcaaaaaatggaccaaattggcatcccaaggccgcggaattgtaaattttgaaagagacaaaattagtaaccattggatccaatactacagacgcatacctcacaggaaactcctcactgcactacaactcagggccaacgtttaccccacgagagaatttctagccaggggtagacaagaccaatacatcaaggcgtgtaggcactgcgatgcggacaacgaatcctgcgcccacatcatcggcaactgcccagtgacacaggacgcccgaatcaagaggcacaattacatctgcgaactgcttctcgaggaggcgaagaagaaggactgggtagtgttcaaggaaccgcacataagggattccaacaaggaactgtacaaacctgacctgatatttgtgaaggatgggcgtgcacttgtcgtggatgtgacagtacggtatgaagcagccaaatcatcgctggaggaagccgctgcagagaaagtgagaaagtacaaacacctggaaacggaagtaagacatctcacgaatgcaaaggacgttacttttgtgggctttcccctaggagcgcgggggaaatggcaccaagataactttaaacttttgactgagcttggcctctccaaatcgaggcaagtgaaaatggcagagactttttccacagtagcgctcttttcatctgtggacattgtacatatgtttgccagtagggccagaaaatctatggttatgtgataataggctgccttctgcggggcttgccttctggccatgcccttcttctctcccttgcacctgtacctcttggtctttgaataaagcctgagtaggaaggaccggtaaaaaaaaaaaaaaaaaaaaaaaaaaaaaaacgttgactaaaaaaaaaaaaaaaaaaaaaaaaaaaaaaaaaaaaaaaaaaaaaaaaaaaaaaaaaaaaaaaaaaaaaa

SEQ ID NO: 10944 - DNA, 5264 bp, synthetic construct
  source 1..5264: mol_type = other DNA
gaaataagagagaaaagaagagtaagaagaaatataagagaattcgccaccatggcccctaagaaaaagcggaaggtgaatatcagcggctctagctgcggcagccccaacagcgccgacaccagcagcgacttcaaggacctgtggaccaagctgaaggaatgccacgaccgggaagtgcagggactccaggtgaaggtcaccaaactcaagcaagaaagaatcctggacgcccagagactggaagaattcttcaccaagaaccagcagctgagagagcagcagaaagtgctgcacgagacaatcaaggttctggaagatagactgcgggccggcctgtgcgacagatgcgccgtgaccgaggaacacatgcgcaaaaagcagcaggagttcgagaacattagacagcaaaatctgaaattgatcacagagctgatgaacgagagaaacacactgcaggaggagaacaagaagctgagcgagcagctgcaacagaagatcgagaatgatcagcaacaccaggccgctgagctggaatgtgaagaggacgtgatccccgacagcccaatcacagctttcagcttttctggcgtgaacagactgaggcggaaggaaaacccccacgtgcggtacatcgagcagacccataccaagctggaacacagcgtgtgtgccaacgagatgagaaaggtgtccaagtcctccacccatccccagcacaaccctaacgaaaatgagatcctggtggctgatacctacgaccagtctcagagccctatggccaaggcccacggcaccagctcttatacccctgataagagctccttcaacctggccaccgtggtggccgagacactgggcctgggcgtgcaggaggaaagcgagacacagggcccaatgagccctctgggagatgagctgtaccactgcctggaaggcaaccacaagaaacagccttttgagtccggctccgagactcctggaacaagcgagagcgctacacctgagggcagccctaagagaaaggtgtccagcgccgagggcgctgccaaggaagagcctaaacggagaagcgccagactgagcgccaagccccccgccaaggtggaagccaagcctaagaaggccgccgctaaggacaagagcagcgataagaaagtccagaccaagggcaagcggggcgccaaaggcaaacaggccgaggtggccaaccaggagacaaaggaagatctgcctgctgagaacggcgaaaccaagaccgaggaatctccagcttctgacgaggccggagagaaggaggccaaaagcgacagcggctctgagacacctggaacaagcgagagcgccaccccggaatcctatgaacaacttgcaccacaaccgtgtgtgggagaaactttacattctagcctcccacgagacagtgaactgtttgtgcctgaagaggggagcagcgagaaggagagcgaggacgcgccaaaaacatctcctccgacgcctgggaaacatggtttggaacagactggggaggaaaaagtgatggtgactgttcctgacaaaaatccaccttgtccttgctgtggtacccgggtaaactctgtgttgaatctgattgaacatctgaaagtgtcacacgggaaaaggggggtttgttttcggtgtgcaaaatgtggaaaggaaaatagtaactatcacagtgttgtttgtcattttaagaaatgcaggggtccagagacggagaaagccccagctggggagtggatttgtgaggtatgcaacagagattttacaaccaaaattggcctgggacaacacaagagattggcacacccagcagtgagaaatcaggaaaggatcgttgcttcccaaccgaaagaaacatcaaatagaggtgctcacaaaaggtgctggacaaaggaggaggaagaattactaataagactggaggctcagttcgagggaaacaaaaatattaataagcttattgcagaacacataaccaccaaaacagctaagcagatcagtgacaaaaggcgattgctgtccagaaagccagcagaggagccacgtgaggagcctggaacgtgtcatcacaccaggagagcagctgcgagcctgagaacggagcctgagatgagtcatcacgcccaggcagaggacagagataatggacctgggagacgccctctgccaggcagggcagctgccggagggagaacaatggacgagataagacgccaccctgataagggcaacggacagcagagacccaccaagcaaaaatcagaagaacagctgcaggcttactataaaaagacactagaggaacgactttcagctggggcacttaacaccttcccccgagcattcaagcaggtaatggaaggccgggatataaagctagtaatcaatcagacagcgcaggactgcttcggatgcctggaatccataagccaaataagaacggcaacccgagataaaaaggacacggtgacccgggagaaacacccaaagaaaccttttcagaagtggatgaagaagagagcaatcaaaaaaggtaattatcttcggttccagcgtttattttatcttgatagagggaaactggctaaaatcattttagatgatattgaatgcttgtcttgtgacataccactcagtgaaatttattcggtttttaaaacaagatgggaaacaactggtagctttaaaagccttggggactttaaaacttacgggaaggctgacaacactgccttcagagaattaattacggctaaagaaattgagaaaaatgtgcaggaaatgagcaaaggctcggctcccggtccagacgggattactcttggggacgtcgtaaagatggatcccgagttttcccggaccatggagattttcaatttatggttaacaactggtaaaatcccggacatggtgagggggtgcagaaccgttttgattccaaaatcatcaaagccggatcgtttgaaagacattaataactggagacctatcacgatcggttccatcttgctgagactgttctccaggattgtaacagctaggctgagcaaagcgtgccccctgaacccaaggcaaagaggctttatcagagcggcgggatgctctgaaaacttaaaactcctgcaaactataatttggtcggccaaaagagaacacagaccactgggtgttgtattcgtggacatcgccaaggcttttgacaccgtaagccaccagcacatcattcatgctttgcagcaaagagaggtggatccccacatcgtcggtctggtgagcaatatgtacgagaacatcagtacgtatatcaccacaaagaggaacacacacacagacaaaatccagatccgggttggagtaaagcagggtgacccgatgtcgccccttttatttaacctggcaatggaccctctattatgcaagctggaagagagtggcaaaggataccaccgaggacagagcagcatcacagcgatggcatttgcagacgatctggttttgctgagcgactcctgggaaaatatgaatacaaatattagcatactggagaccttctgcaatctgaccggactcaaaacacaggggcaaaagtgccacggcttttacatcaagccgacaaagaagtcttacaccatcaatgactgcgctgcctggactatcaacggcacacccctgaacatgatcgaccccggcgaatctgagaaatacctcggcctgcagtttgacccgtggattggaatagcaaggtccggtctctccacaaaactagatttttggcttcagcggatcgatcaagcaccacttaaacctctgcagaaaactgatattctcaaaacatacaccatccctcggctgatctacatagctgaccactcagaagtgaaaagcgcactactcgaaacccttgaccagaagatccggacagcggtcaaggaatggcttcacctacctccgtgcacctgcgatgccatcctgtactcgagcacgagagacggcggtttgggcatcaccaaattggcaggactgatccccagcgtgcaggcccgtagactgcatcggatcgcacagtcatctgacgatacgatgaaatgcttcatggaaaaagagaaaatggaacagctgcataagagattgtggattcaagctggaggggacagagagaacataccctcgatttgggaagcaccaccgtcgagtgaaccaccaaacaacgtgagcacaaattcggaatgggaagcaccgacccagaaagataaatttccaaagccttgcaattggaggaaaaacgaattcaaaaaatggaccaaattggcatcccaaggccgcggaattgtaaattttgaaagagacaaaattagtaaccattggatccaatactacagacgcatacctcacaggaaactcctcactgcactacaactcagggccaacgtttaccccacgagagaatttctagccaggggtagacaagaccaatacatcaaggcgtgtaggcactgcgatgcggacaacgaatcctgcgcccacatcatcggcaactgcccagtgacacaggacgcccgaatcaagaggcacaattacatctgcgaactgcttctcgaggaggcgaagaagaaggactgggtagtgttcaaggaaccgcacataagggattccaacaaggaactgtacaaacctgacctgatatttgtgaaggatgggcgtgcacttgtcgtggatgtgacagtacggtatgaagcagccaaatcatcgctggaggaagccgctgcagagaaagtgagaaagtacaaacacctggaaacggaagtaagacatctcacgaatgcaaaggacgttacttttgtgggctttcccctaggagcgcgggggaaatggcaccaagataactttaaacttttgactgagcttggcctctccaaatcgaggcaagtgaaaatggcagagactttttccacagtagcgctcttttcatctgtggacattgtacatatgtttgccagtagggccagaaaatctatggttatgtgataataggctgccttctgcggggcttgccttctggccatgcccttcttctctcccttgcacctgtacctcttggtctttgaataaagcctgagtaggaaggaccggtaaaaaaaaaaaaaaaaaaaaaaaaaaaaaaacgttgactaaaaaaaaaaaaaaaaaaaaaaaaaaaaaaaaaaaaaaaaaaaaaaaaaaaaaaaaaaaaaaaaaaaaaa

SEQ ID NO: 10945 - DNA, 5264 bp, synthetic construct
  source 1..5264: mol_type = other DNA
gaaataagagagaaaagaagagtaagaagaaatataagagaattcgccaccatggcccctaagaaaaagcggaaggtgaatatcagcggctctagctgcggcagccccaacagcgccgacaccagcagcgacttcaaggacctgtggaccaagctgaaggaatgccacgaccgggaagtgcagggactccaggtgaaggtcaccaaactcaagcaagaaagaatcctggacgcccagagactggaagaattcttcaccaagaaccagcagctgagagagcagcagaaagtgctgcacgagacaatcaaggttctggaagatagactgcgggccggcctgtgcgacagatgcgccgtgaccgaggaacacatgcgcaaaaagcagcaggagttcgagaacattagacagcaaaatctgaaattgatcacagagctgatgaacgagagaaacacactgcaggaggagaacaagaagctgagcgagcagctgcaacagaagatcgagaatgatcagcaacaccaggccgctgagctggaatgtgaagaggacgtgatccccgacagcccaatcacagctttcagcttttctggcgtgaacagactgaggcggaaggaaaacccccacgtgcggtacatcgagcagacccataccaagctggaacacagcgtgtgtgccaacgagatgagaaaggtgtccaagtcctccacccatccccagcacaaccctaacgaaaatgagatcctggtggctgatacctacgaccagtctcagagccctatggccaaggcccacggcaccagctcttatacccctgataagagctccttcaacctggccaccgtggtggccgagacactgggcctgggcgtgcaggaggaaagcgagacacagggcccaatgagccctctgggagatgagctgtaccactgcctggaaggcaaccacaagaaacagccttttgagtccggctccgagactcctggaacaagcgagagcgctacacctgagggcagccctaagagaaaggtgtccagcgccgagggcgctgccaaggaagagcctaaacggagaagcgccagactgagcgccaagccccccgccaaggtggaagccaagcctaagaaggccgccgctaaggacaagagcagcgataagaaagtccagaccaagggcaagcggggcgccaaaggcaaacaggccgaggtggccaaccaggagacaaaggaagatctgcctgctgagaacggcgaaaccaagaccgaggaatctccagcttctgacgaggccggagagaaggaggccaaaagcgacagcggctctgagacacctggaacaagcgagagcgccaccccggaatcctatgaacaacttgcaccacaaccgtgtgtgggagaaactttacattctagcctcccacgagacagtgaactgtttgtgcctgaagaggggagcagcgagaaggagagcgaggacgcgccaaaaacatctcctccgacgcctgggaaacatggtttggaacagactggggaggaaaaagtgatggtgactgttcctgacaaaaatccaccttgtccttgctgtggtacccgggtaaactctgtgttgaatctgattgaacatctgaaagtgtcacacgggaaaaggggggtttgttttcggtgtgcaaaatgtggaaaggaaaatagtaactatcacagtgttgtttgtcattttaagaaatgcaggggtccagagacggagaaagccccagctggggagtggatttgtgaggtatgcaacagagattttacaaccaaaattggcctgggacaacacaagagattggcacacccagcagtgagaaatcaggaaaggatcgttgcttcccaaccgaaagaaacatcaaatagaggtgctcacaaaaggtgctggacaaaggaggaggaagaattactaataagactggaggctcagttcgagggaaacaaaaatattaataagcttattgcagaacacataaccaccaaaacagctaagcagatcagtgacaaaaggcgattgctgtccagaaagccagcagaggagccacgtgaggagcctggaacgtgtcatcacaccaggagagcagctgcgagcctgagaacggagcctgagatgagtcatcacgcccaggcagaggacagagataatggacctgggagacgccctctgccaggcagggcagctgccggagggagaacaatggacgagataagacgccaccctgataagggcaacggacagcagagacccaccaagcaaaaatcagaagaacagctgcaggcttactataaaaagacactagaggaacgactttcagctggggcacttaacaccttcccccgagcattcaagcaggtaatggaaggccgggatataaagctagtaatcaatcagacagcgcaggactgcttcggatgcctggaatccataagccaaataagaacggcaacccgagataaaaaggacacggtgacccgggagaaacacccaaagaaaccttttcagaagtggatgaagaagagagcaatcaaaaaaggtaattatcttcggttccagcgtttattttatcttgatagagggaaactggctaaaatcattttagatgatattgaatgcttgtcttgtgacataccactcagtgaaatttattcggtttttaaaacaagatgggaaacaactggtagctttaaaagccttggggactttaaaacttacgggaaggctgacaacactgccttcagagaattaattacggctaaagaaattgagaaaaatgtgcaggaaatgagcaaaggctcggctcccggtccagacgggattactcttggggacgtcgtaaagatggatcccgagttttcccggaccatggagattttcaatttatggttaacaactggtaaaatcccggacatggtgagggggtgcagaaccgttttgattccaaaatcatcaaagccggatcgtttgaaagacattaataactggagacctatcacgatcggttccatcttgctgagactgttctccaggattgtaacagctaggctgagcaaagcgtgccccctgaacccaaggcaaagaggctttatcagagcggcgggatgctctgaaaacttaaaactcctgcaaactataatttggtcggccaaaagagaacacagaccactgggtgttgtattcgtggacatcgccaaggcttttgacaccgtaagccaccagcacatcattcatgctttgcagcaaagagaggtggatccccacatcgtcggtctggtgagcaatatgtacgagaacatcagtacgtatatcaccacaaagaggaacacacacacagacaaaatccagatccgggttggagtaaagcagggtgacccgatgtcgccccttttatttaacctggcaatggaccctctattatgcaagctggaagagagtggcaaaggataccaccgaggacagagcagcatcacagcgatggcatttgcagacgatctggttttgctgagcgactcctgggaaaatatgaatacaaatattagcatactggagaccttctgcaatctgaccggactcaaaacacaggggcaaaagtgccacggcttttacatcaagccgacaaagaagtcttacaccatcaatgactgcgctgcctggactatcaacggcacacccctgaacatgatcgaccccggcgaatctgagaaatacctcggcctgcagtttgacccgtggattggaatagcaaggtccggtctctccacaaaactagatttttggcttcagcggatcgatcaagcaccacttaaacctctgcagaaaactgatattctcaaaacatacaccatccctcggctgatctacatagctgaccactcagaagtgaaaagcgcactactcgaaacccttgaccagaagatccggacagcggtcaaggaatggcttcacctacctccgtgcacctgcgatgccatcctgtactcgagcacgagagacggcggtttgggcatcaccaaattggcaggactgatccccagcgtgcaggcccgtagactgcatcggatcgcacagtcatctgacgatacgatgaaatgcttcatggaaaaagagaaaatggaacagctgcataagaaattgtggattcaagctagaggggacagagagaacataccctcgatttgggaagcaccaccgtcgagtgaaccaccaaacaacgtgagcacaaattcggaatgggaagcaccgacccagaaagataaatttccaaagccttgcaattggaggaaaaacgaattcaaaaaatggaccaaattggcatcccaaggccgcggaattgtaaattttgaaagagacaaaattagtaaccattggatccaatactacagacgcatacctcacaggaaactcctcactgcactacaactcagggccaacgtttaccccacgagagaatttctagccaggggtagacaagaccaatacatcaaggcgtgtaggcactgcgatgcggacaacgaatcctgcgcccacatcatcggcaactgcccagtgacacaggacgcccgaatcaagaggcacaattacatctgcgaactgcttctcgaggaggcgaagaagaaggactgggtagtgttcaaggaaccgcacataagggattccaacaaggaactgtacaaacctgacctgatatttgtgaaggatgggcgtgcacttgtcgtggatgtgacagtacggtatgaagcagccaaatcatcgctggaggaagccgctgcagagaaagtgagaaagtacaaacacctggaaacggaagtaagacatctcacgaatgcaaaggacgttacttttgtgggctttcccctaggagcgcgggggaaatggcaccaagataactttaaacttttgactgagcttggcctctccaaatcgaggcaagtgaaaatggcagagactttttccacagtagcgctcttttcatctgtggacattgtacatatgtttgccagtagggccagaaaatctatggttatgtgataataggctgccttctgcggggcttgccttctggccatgcccttcttctctcccttgcacctgtacctcttggtctttgaataaagcctgagtaggaaggaccggtaaaaaaaaaaaaaaaaaaaaaaaaaaaaaaacgttgactaaaaaaaaaaaaaaaaaaaaaaaaaaaaaaaaaaaaaaaaaaaaaaaaaaaaaaaaaaaaaaaaaaaaaa

SEQ ID NO: 10946 - DNA, 5264 bp, synthetic construct
  source 1..5264: mol_type = other DNA
gaaataagagagaaaagaagagtaagaagaaatataagagaattcgccaccatggcccctaagaaaaagcggaaggtgaatatcagcggctctagctgcggcagccccaacagcgccgacaccagcagcgacttcaaggacctgtggaccaagctgaaggaatgccacgaccgggaagtgcagggactccaggtgaaggtcaccaaactcaagcaagaaagaatcctggacgcccagagactggaagaattcttcaccaagaaccagcagctgagagagcagcagaaagtgctgcacgagacaatcaaggttctggaagatagactgcgggccggcctgtgcgacagatgcgccgtgaccgaggaacacatgcgcaaaaagcagcaggagttcgagaacattagacagcaaaatctgaaattgatcacagagctgatgaacgagagaaacacactgcaggaggagaacaagaagctgagcgagcagctgcaacagaagatcgagaatgatcagcaacaccaggccgctgagctggaatgtgaagaggacgtgatccccgacagcccaatcacagctttcagcttttctggcgtgaacagactgaggcggaaggaaaacccccacgtgcggtacatcgagcagacccataccaagctggaacacagcgtgtgtgccaacgagatgagaaaggtgtccaagtcctccacccatccccagcacaaccctaacgaaaatgagatcctggtggctgatacctacgaccagtctcagagccctatggccaaggcccacggcaccagctcttatacccctgataagagctccttcaacctggccaccgtggtggccgagacactgggcctgggcgtgcaggaggaaagcgagacacagggcccaatgagccctctgggagatgagctgtaccactgcctggaaggcaaccacaagaaacagccttttgagtccggctccgagactcctggaacaagcgagagcgctacacctgagggcagccctaagagaaaggtgtccagcgccgagggcgctgccaaggaagagcctaaacggagaagcgccagactgagcgccaagccccccgccaaggtggaagccaagcctaagaaggccgccgctaaggacaagagcagcgataagaaagtccagaccaagggcaagcggggcgccaaaggcaaacaggccgaggtggccaaccaggagacaaaggaagatctgcctgctgagaacggcgaaaccaagaccgaggaatctccagcttctgacgaggccggagagaaggaggccaaaagcgacagcggctctgagacacctggaacaagcgagagcgccaccccggaatcctatgaacaacttgcaccacaaccgtgtgtgggagaaactttacattctagcctcccacgagacagtgaactgtttgtgcctgaagaggggagcagcgagaaggagagcgaggacgcgccaaaaacatctcctccgacgcctgggaaacatggtttggaacagactggggaggaaaaagtgatggtgactgttcctgacaaaaatccaccttgtccttgctgtggtacccgggtaaactctgtgttgaatctgattgaacatctgaaagtgtcacacgggaaaaggggggtttgttttcggtgtgcaaaatgtggaaaggaaaatagtaactatcacagtgttgtttgtcattttaagaaatgcaggggtccagagacggagaaagccccagctggggagtggatttgtgaggtatgcaacagagattttacaaccaaaattggcctgggacaacacaagagattggcacacccagcagtgagaaatcaggaaaggatcgttgcttcccaaccgaaagaaacatcaaatagaggtgctcacaaaaggtgctggacaaaggaggaggaagaattactaataagactggaggctcagttcgagggaaacaaaaatattaataagcttattgcagaacacataaccaccaaaacagctaagcagatcagtgacaaaaggcgattgctgtccagaaagccagcagaggagccacgtgaggagcctggaacgtgtcatcacaccaggagagcagctgcgagcctgagaacggagcctgagatgagtcatcacgcccaggcagaggacagagataatggacctgggagacgccctctgccaggcagggcagctgccggagggagaacaatggacgagataagacgccaccctgataagggcaacggacagcagagacccaccaagcaaaaatcagaagaacagctgcaggcttactataaaaagacactagaggaacgactttcagctggggcacttaacaccttcccccgagcattcaagcaggtaatggaaggccgggatataaagctagtaatcaatcagacagcgcaggactgcttcggatgcctggaatccataagccaaataagaacggcaacccgagataaaaaggacacggtgacccgggagaaacacccaaagaaaccttttcagaagtggatgaagaagagagcaatcaaaaaaggtaattatcttcggttccagcgtttattttatcttgatagagggaaactggctaaaatcattttagatgatattgaatgcttgtcttgtgacataccactcagtgaaatttattcggtttttaaaacaagatgggaaacaactggtagctttaaaagccttggggactttaaaacttacgggaaggctgacaacactgccttcagagaattaattacggctaaagaaattgagaaaaatgtgcaggaaatgagcaaaggctcggctcccggtccagacgggattactcttggggacgtcgtaaagatggatcccgagttttcccggaccatggagattttcaatttatggttaacaactggtaaaatcccggacatggtgagggggtgcagaaccgttttgattccaaaatcatcaaagccggatcgtttgaaagacattaataactggagacctatcacgatcggttccatcttgctgagactgttctccaggattgtaacagctaggctgagcaaagcgtgccccctgaacccaaggcaaagaggctttatcagagcggcgggatgctctgaaaacttaaaactcctgcaaactataatttggtcggccaaaagagaacacagaccactgggtgttgtattcgtggacatcgccaaggcttttgacaccgtaagccaccagcacatcattcatgctttgcagcaaagagaggtggatccccacatcgtcggtctggtgagcaatatgtacgagaacatcagtacgtatatcaccacaaagaggaacacacacacagacaaaatccagatccgggttggagtaaagcagggtgacccgatgtcgccccttttatttaacctggcaatggaccctctattatgcaagctggaagagagtggcaaaggataccaccgaggacagagcagcatcacagcgatggcatttgcagacgatctggttttgctgagcgactcctgggaaaatatgaatacaaatattagcatactggagaccttctgcaatctgaccggactcaaaacacaggggcaaaagtgccacggcttttacatcaagccgacaaagaagtcttacaccatcaatgactgcgctgcctggactatcaacggcacacccctgaacatgatcgaccccggcgaatctgagaaatacctcggcctgcagtttgacccgtggattggaatagcaaggtccggtctctccacaaaactagatttttggcttcagcggatcgatcaagcaccacttaaacctctgcagaaaactgatattctcaaaacatacaccatccctcggctgatctacatagctgaccactcagaagtgaaaagcgcactactcgaaacccttgaccagaagatccggacagcggtcaaggaatggcttcacctacctccgtgcacctgcgatgccatcctgtactcgagcacgagagacggcggtttgggcatcaccaaattggcaggactgatccccagcgtgcaggcccgtagactgcatcggatcgcacagtcatctgacgatacgatgaaatgcttcatggaaaaagagaaaatggaacagctgcataagaaattgtggattcaagctggaggggacagagagaacataccctcgatttgggaagcaccaccgtcgagtgaaccaccaaacaacgtgagcacaaattcggaatggaaggcaccgacccagaaagataaatttccaaagccttgcaattggaggaaaaacgaattcaaaaaatggaccaaattggcatcccaaggccgcggaattgtaaattttgaaagagacaaaattagtaaccattggatccaatactacagacgcatacctcacaggaaactcctcactgcactacaactcagggccaacgtttaccccacgagagaatttctagccaggggtagacaagaccaatacatcaaggcgtgtaggcactgcgatgcggacaacgaatcctgcgcccacatcatcggcaactgcccagtgacacaggacgcccgaatcaagaggcacaattacatctgcgaactgcttctcgaggaggcgaagaagaaggactgggtagtgttcaaggaaccgcacataagggattccaacaaggaactgtacaaacctgacctgatatttgtgaaggatgggcgtgcacttgtcgtggatgtgacagtacggtatgaagcagccaaatcatcgctggaggaagccgctgcagagaaagtgagaaagtacaaacacctggaaacggaagtaagacatctcacgaatgcaaaggacgttacttttgtgggctttcccctaggagcgcgggggaaatggcaccaagataactttaaacttttgactgagcttggcctctccaaatcgaggcaagtgaaaatggcagagactttttccacagtagcgctcttttcatctgtggacattgtacatatgtttgccagtagggccagaaaatctatggttatgtgataataggctgccttctgcggggcttgccttctggccatgcccttcttctctcccttgcacctgtacctcttggtctttgaataaagcctgagtaggaaggaccggtaaaaaaaaaaaaaaaaaaaaaaaaaaaaaaacgttgactaaaaaaaaaaaaaaaaaaaaaaaaaaaaaaaaaaaaaaaaaaaaaaaaaaaaaaaaaaaaaaaaaaaaaa

SEQ ID NO: 10947 - DNA, 5264 bp, synthetic construct
  source 1..5264: mol_type = other DNA
gaaataagagagaaaagaagagtaagaagaaatataagagaattcgccaccatggcccctaagaaaaagcggaaggtgaatatcagcggctctagctgcggcagccccaacagcgccgacaccagcagcgacttcaaggacctgtggaccaagctgaaggaatgccacgaccgggaagtgcagggactccaggtgaaggtcaccaaactcaagcaagaaagaatcctggacgcccagagactggaagaattcttcaccaagaaccagcagctgagagagcagcagaaagtgctgcacgagacaatcaaggttctggaagatagactgcgggccggcctgtgcgacagatgcgccgtgaccgaggaacacatgcgcaaaaagcagcaggagttcgagaacattagacagcaaaatctgaaattgatcacagagctgatgaacgagagaaacacactgcaggaggagaacaagaagctgagcgagcagctgcaacagaagatcgagaatgatcagcaacaccaggccgctgagctggaatgtgaagaggacgtgatccccgacagcccaatcacagctttcagcttttctggcgtgaacagactgaggcggaaggaaaacccccacgtgcggtacatcgagcagacccataccaagctggaacacagcgtgtgtgccaacgagatgagaaaggtgtccaagtcctccacccatccccagcacaaccctaacgaaaatgagatcctggtggctgatacctacgaccagtctcagagccctatggccaaggcccacggcaccagctcttatacccctgataagagctccttcaacctggccaccgtggtggccgagacactgggcctgggcgtgcaggaggaaagcgagacacagggcccaatgagccctctgggagatgagctgtaccactgcctggaaggcaaccacaagaaacagccttttgagtccggctccgagactcctggaacaagcgagagcgctacacctgagggcagccctaagagaaaggtgtccagcgccgagggcgctgccaaggaagagcctaaacggagaagcgccagactgagcgccaagccccccgccaaggtggaagccaagcctaagaaggccgccgctaaggacaagagcagcgataagaaagtccagaccaagggcaagcggggcgccaaaggcaaacaggccgaggtggccaaccaggagacaaaggaagatctgcctgctgagaacggcgaaaccaagaccgaggaatctccagcttctgacgaggccggagagaaggaggccaaaagcgacagcggctctgagacacctggaacaagcgagagcgccaccccggaatcctatgaacaacttgcaccacaaccgtgtgtgggagaaactttacattctagcctcccacgagacagtgaactgtttgtgcctgaagaggggagcagcgagaaggagagcgaggacgcgccaaaaacatctcctccgacgcctgggaaacatggtttggaacagactggggaggaaaaagtgatggtgactgttcctgacaaaaatccaccttgtccttgctgtggtacccgggtaaactctgtgttgaatctgattgaacatctgaaagtgtcacacgggaaaaggggggtttgttttcggtgtgcaaaatgtggaaaggaaaatagtaactatcacagtgttgtttgtcattttaagaaatgcaggggtccagagacggagaaagccccagctggggagtggatttgtgaggtatgcaacagagattttacaaccaaaattggcctgggacaacacaagagattggcacacccagcagtgagaaatcaggaaaggatcgttgcttcccaaccgaaagaaacatcaaatagaggtgctcacaaaaggtgctggacaaaggaggaggaagaattactaataagactggaggctcagttcgagggaaacaaaaatattaataagcttattgcagaacacataaccaccaaaacagctaagcagatcagtgacaaaaggcgattgctgtccagaaagccagcagaggagccacgtgaggagcctggaacgtgtcatcacaccaggagagcagctgcgagcctgagaacggagcctgagatgagtcatcacgcccaggcagaggacagagataatggacctgggagacgccctctgccaggcagggcagctgccggagggagaacaatggacgagataagacgccaccctgataagggcaacggacagcagagacccaccaagcaaaaatcagaagaacagctgcaggcttactataaaaagacactagaggaacgactttcagctggggcacttaacaccttcccccgagcattcaagcaggtaatggaaggccgggatataaagctagtaatcaatcagacagcgcaggactgcttcggatgcctggaatccataagccaaataagaacggcaacccgagataaaaaggacacggtgacccgggagaaacacccaaagaaaccttttcagaagtggatgaagaagagagcaatcaaaaaaggtaattatcttcggttccagcgtttattttatcttgatagagggaaactggctaaaatcattttagatgatattgaatgcttgtcttgtgacataccactcagtgaaatttattcggtttttaaaacaagatgggaaacaactggtagctttaaaagccttggggactttaaaacttacgggaaggctgacaacactgccttcagagaattaattacggctaaagaaattgagaaaaatgtgcaggaaatgagcaaaggctcggctcccggtccagacgggattactcttggggacgtcgtaaagatggatcccgagttttcccggaccatggagattttcaatttatggttaacaactggtaaaatcccggacatggtgagggggtgcagaaccgttttgattccaaaatcatcaaagccggatcgtttgaaagacattaataactggagacctatcacgatcggttccatcttgctgagactgttctccaggattgtaacagctaggctgagcaaagcgtgccccctgaacccaaggcaaagaggctttatcagagcggcgggatgctctgaaaacttaaaactcctgcaaactataatttggtcggccaaaagagaacacagaccactgggtgttgtattcgtggacatcgccaaggcttttgacaccgtaagccaccagcacatcattcatgctttgcagcaaagagaggtggatccccacatcgtcggtctggtgagcaatatgtacgagaacatcagtacgtatatcaccacaaagaggaacacacacacagacaaaatccagatccgggttggagtaaagcagggtgacccgatgtcgccccttttatttaacctggcaatggaccctctattatgcaagctggaagagagtggcaaaggataccaccgaggacagagcagcatcacagcgatggcatttgcagacgatctggttttgctgagcgactcctgggaaaatatgaatacaaatattagcatactggagaccttctgcaatctgaccggactcaaaacacaggggcaaaagtgccacggcttttacatcaagccgacaaagaagtcttacaccatcaatgactgcgctgcctggactatcaacggcacacccctgaacatgatcgaccccggcgaatctgagaaatacctcggcctgcagtttgacccgtggattggaatagcaaggtccggtctctccacaaaactagatttttggcttcagcggatcgatcaagcaccacttaaacctctgcagaaaactgatattctcaaaacatacaccatccctcggctgatctacatagctgaccactcagaagtgaaaagcgcactactcgaaacccttgaccagaagatccggacagcggtcaaggaatggcttcacctacctccgtgcacctgcgatgccatcctgtactcgagcacgagagacggcggtttgggcatcaccaaattggcaggactgatccccagcgtgcaggcccgtagactgcatcggatcgcacagtcatctgacgatacgatgaaatgcttcatggaaaaagagaaaatggaacagctgcataagaaattgtggattcaagctggaggggacagagagaacataccctcgatttgggaagcaccaccgtcgagtgaaccaccaaacaacgtgagcacaaattcggaatgggaagcaccgacccagagagataaatttccaaagccttgcaattggaggaaaaacgaattcaaaaaatggaccaaattggcatcccaaggccgcggaattgtaaattttgaaagagacaaaattagtaaccattggatccaatactacagacgcatacctcacaggaaactcctcactgcactacaactcagggccaacgtttaccccacgagagaatttctagccaggggtagacaagaccaatacatcaaggcgtgtaggcactgcgatgcggacaacgaatcctgcgcccacatcatcggcaactgcccagtgacacaggacgcccgaatcaagaggcacaattacatctgcgaactgcttctcgaggaggcgaagaagaaggactgggtagtgttcaaggaaccgcacataagggattccaacaaggaactgtacaaacctgacctgatatttgtgaaggatgggcgtgcacttgtcgtggatgtgacagtacggtatgaagcagccaaatcatcgctggaggaagccgctgcagagaaagtgagaaagtacaaacacctggaaacggaagtaagacatctcacgaatgcaaaggacgttacttttgtgggctttcccctaggagcgcgggggaaatggcaccaagataactttaaacttttgactgagcttggcctctccaaatcgaggcaagtgaaaatggcagagactttttccacagtagcgctcttttcatctgtggacattgtacatatgtttgccagtagggccagaaaatctatggttatgtgataataggctgccttctgcggggcttgccttctggccatgcccttcttctctcccttgcacctgtacctcttggtctttgaataaagcctgagtaggaaggaccggtaaaaaaaaaaaaaaaaaaaaaaaaaaaaaaacgttgactaaaaaaaaaaaaaaaaaaaaaaaaaaaaaaaaaaaaaaaaaaaaaaaaaaaaaaaaaaaaaaaaaaaaaa

SEQ ID NO: 10948 - DNA, 5264 bp, synthetic construct
  source 1..5264: mol_type = other DNA
gaaataagagagaaaagaagagtaagaagaaatataagagaattcgccaccatggcccctaagaaaaagcggaaggtgaatatcagcggctctagctgcggcagccccaacagcgccgacaccagcagcgacttcaaggacctgtggaccaagctgaaggaatgccacgaccgggaagtgcagggactccaggtgaaggtcaccaaactcaagcaagaaagaatcctggacgcccagagactggaagaattcttcaccaagaaccagcagctgagagagcagcagaaagtgctgcacgagacaatcaaggttctggaagatagactgcgggccggcctgtgcgacagatgcgccgtgaccgaggaacacatgcgcaaaaagcagcaggagttcgagaacattagacagcaaaatctgaaattgatcacagagctgatgaacgagagaaacacactgcaggaggagaacaagaagctgagcgagcagctgcaacagaagatcgagaatgatcagcaacaccaggccgctgagctggaatgtgaagaggacgtgatccccgacagcccaatcacagctttcagcttttctggcgtgaacagactgaggcggaaggaaaacccccacgtgcggtacatcgagcagacccataccaagctggaacacagcgtgtgtgccaacgagatgagaaaggtgtccaagtcctccacccatccccagcacaaccctaacgaaaatgagatcctggtggctgatacctacgaccagtctcagagccctatggccaaggcccacggcaccagctcttatacccctgataagagctccttcaacctggccaccgtggtggccgagacactgggcctgggcgtgcaggaggaaagcgagacacagggcccaatgagccctctgggagatgagctgtaccactgcctggaaggcaaccacaagaaacagccttttgagtccggctccgagactcctggaacaagcgagagcgctacacctgagggcagccctaagagaaaggtgtccagcgccgagggcgctgccaaggaagagcctaaacggagaagcgccagactgagcgccaagccccccgccaaggtggaagccaagcctaagaaggccgccgctaaggacaagagcagcgataagaaagtccagaccaagggcaagcggggcgccaaaggcaaacaggccgaggtggccaaccaggagacaaaggaagatctgcctgctgagaacggcgaaaccaagaccgaggaatctccagcttctgacgaggccggagagaaggaggccaaaagcgacagcggctctgagacacctggaacaagcgagagcgccaccccggaatcctatgaacaacttgcaccacaaccgtgtgtgggagaaactttacattctagcctcccacgagacagtgaactgtttgtgcctgaagaggggagcagcgagaaggagagcgaggacgcgccaaaaacatctcctccgacgcctgggaaacatggtttggaacagactggggaggaaaaagtgatggtgactgttcctgacaaaaatccaccttgtccttgctgtggtacccgggtaaactctgtgttgaatctgattgaacatctgaaagtgtcacacgggaaaaggggggtttgttttcggtgtgcaaaatgtggaaaggaaaatagtaactatcacagtgttgtttgtcattttaagaaatgcaggggtccagagacggagaaagccccagctggggagtggatttgtgaggtatgcaacagagattttacaaccaaaattggcctgggacaacacaagagattggcacacccagcagtgagaaatcaggaaaggatcgttgcttcccaaccgaaagaaacatcaaatagaggtgctcacaaaaggtgctggacaaaggaggaggaagaattactaataagactggaggctcagttcgagggaaacaaaaatattaataagcttattgcagaacacataaccaccaaaacagctaagcagatcagtgacaaaaggcgattgctgtccagaaagccagcagaggagccacgtgaggagcctggaacgtgtcatcacaccaggagagcagctgcgagcctgagaacggagcctgagatgagtcatcacgcccaggcagaggacagagataatggacctgggagacgccctctgccaggcagggcagctgccggagggagaacaatggacgagataagacgccaccctgataagggcaacggacagcagagacccaccaagcaaaaatcagaagaacagctgcaggcttactataaaaagacactagaggaacgactttcagctggggcacttaacaccttcccccgagcattcaagcaggtaatggaaggccgggatataaagctagtaatcaatcagacagcgcaggactgcttcggatgcctggaatccataagccaaataagaacggcaacccgagataaaaaggacacggtgacccgggagaaacacccaaagaaaccttttcagaagtggatgaagaagagagcaatcaaaaaaggtaattatcttcggttccagcgtttattttatcttgatagagggaaactggctaaaatcattttagatgatattgaatgcttgtcttgtgacataccactcagtgaaatttattcggtttttaaaacaagatgggaaacaactggtagctttaaaagccttggggactttaaaacttacgggaaggctgacaacactgccttcagagaattaattacggctaaagaaattgagaaaaatgtgcaggaaatgagcaaaggctcggctcccggtccagacgggattactcttggggacgtcgtaaagatggatcccgagttttcccggaccatggagattttcaatttatggttaacaactggtaaaatcccggacatggtgagggggtgcagaaccgttttgattccaaaatcatcaaagccggatcgtttgaaagacattaataactggagacctatcacgatcggttccatcttgctgagactgttctccaggattgtaacagctaggctgagcaaagcgtgccccctgaacccaaggcaaagaggctttatcagagcggcgggatgctctgaaaacttaaaactcctgcaaactataatttggtcggccaaaagagaacacagaccactgggtgttgtattcgtggacatcgccaaggcttttgacaccgtaagccaccagcacatcattcatgctttgcagcaaagagaggtggatccccacatcgtcggtctggtgagcaatatgtacgagaacatcagtacgtatatcaccacaaagaggaacacacacacagacaaaatccagatccgggttggagtaaagcagggtgacccgatgtcgccccttttatttaacctggcaatggaccctctattatgcaagctggaagagagtggcaaaggataccaccgaggacagagcagcatcacagcgatggcatttgcagacgatctggttttgctgagcgactcctgggaaaatatgaatacaaatattagcatactggagaccttctgcaatctgaccggactcaaaacacaggggcaaaagtgccacggcttttacatcaagccgacaaagaagtcttacaccatcaatgactgcgctgcctggactatcaacggcacacccctgaacatgatcgaccccggcgaatctgagaaatacctcggcctgcagtttgacccgtggattggaatagcaaggtccggtctctccacaaaactagatttttggcttcagcggatcgatcaagcaccacttaaacctctgcagaaaactgatattctcaaaacatacaccatccctcggctgatctacatagctgaccactcagaagtgaaaagcgcactactcgaaacccttgaccagaagatccggacagcggtcaaggaatggcttcacctacctccgtgcacctgcgatgccatcctgtactcgagcacgagagacggcggtttgggcatcaccaaattggcaggactgatccccagcgtgcaggcccgtagactgcatcggatcgcacagtcatctgacgatacgatgaaatgcttcatggaaaaagagaaaatggaacagctgcataagaaattgtggattcaagctggaggggacagagagaacataccctcgatttgggaagcaccaccgtcgagtgaaccaccaaacaacgtgagcacaaattcggaatgggaagcaccgacccagaaagataaatttccaaagccttgcaattggaggaaaaacgaattcaaaaaatggaccaaattggcatcccacggccgcggaattgtaaattttgaaagagacaaaattagtaaccattggatccaatactacagacgcatacctcacaggaaactcctcactgcactacaactcagggccaacgtttaccccacgagagaatttctagccaggggtagacaagaccaatacatcaaggcgtgtaggcactgcgatgcggacaacgaatcctgcgcccacatcatcggcaactgcccagtgacacaggacgcccgaatcaagaggcacaattacatctgcgaactgcttctcgaggaggcgaagaagaaggactgggtagtgttcaaggaaccgcacataagggattccaacaaggaactgtacaaacctgacctgatatttgtgaaggatgggcgtgcacttgtcgtggatgtgacagtacggtatgaagcagccaaatcatcgctggaggaagccgctgcagagaaagtgagaaagtacaaacacctggaaacggaagtaagacatctcacgaatgcaaaggacgttacttttgtgggctttcccctaggagcgcgggggaaatggcaccaagataactttaaacttttgactgagcttggcctctccaaatcgaggcaagtgaaaatggcagagactttttccacagtagcgctcttttcatctgtggacattgtacatatgtttgccagtagggccagaaaatctatggttatgtgataataggctgccttctgcggggcttgccttctggccatgcccttcttctctcccttgcacctgtacctcttggtctttgaataaagcctgagtaggaaggaccggtaaaaaaaaaaaaaaaaaaaaaaaaaaaaaaacgttgactaaaaaaaaaaaaaaaaaaaaaaaaaaaaaaaaaaaaaaaaaaaaaaaaaaaaaaaaaaaaaaaaaaaaaa

SEQ ID NO: 10949 - DNA, 5264 bp, synthetic construct
  source 1..5264: mol_type = other DNA
gaaataagagagaaaagaagagtaagaagaaatataagagaattcgccaccatggcccctaagaaaaagcggaaggtgaatatcagcggctctagctgcggcagccccaacagcgccgacaccagcagcgacttcaaggacctgtggaccaagctgaaggaatgccacgaccgggaagtgcagggactccaggtgaaggtcaccaaactcaagcaagaaagaatcctggacgcccagagactggaagaattcttcaccaagaaccagcagctgagagagcagcagaaagtgctgcacgagacaatcaaggttctggaagatagactgcgggccggcctgtgcgacagatgcgccgtgaccgaggaacacatgcgcaaaaagcagcaggagttcgagaacattagacagcaaaatctgaaattgatcacagagctgatgaacgagagaaacacactgcaggaggagaacaagaagctgagcgagcagctgcaacagaagatcgagaatgatcagcaacaccaggccgctgagctggaatgtgaagaggacgtgatccccgacagcccaatcacagctttcagcttttctggcgtgaacagactgaggcggaaggaaaacccccacgtgcggtacatcgagcagacccataccaagctggaacacagcgtgtgtgccaacgagatgagaaaggtgtccaagtcctccacccatccccagcacaaccctaacgaaaatgagatcctggtggctgatacctacgaccagtctcagagccctatggccaaggcccacggcaccagctcttatacccctgataagagctccttcaacctggccaccgtggtggccgagacactgggcctgggcgtgcaggaggaaagcgagacacagggcccaatgagccctctgggagatgagctgtaccactgcctggaaggcaaccacaagaaacagccttttgagtccggctccgagactcctggaacaagcgagagcgctacacctgagggcagccctaagagaaaggtgtccagcgccgagggcgctgccaaggaagagcctaaacggagaagcgccagactgagcgccaagccccccgccaaggtggaagccaagcctaagaaggccgccgctaaggacaagagcagcgataagaaagtccagaccaagggcaagcggggcgccaaaggcaaacaggccgaggtggccaaccaggagacaaaggaagatctgcctgctgagaacggcgaaaccaagaccgaggaatctccagcttctgacgaggccggagagaaggaggccaaaagcgacagcggctctgagacacctggaacaagcgagagcgccaccccggaatcctatgaacaacttgcaccacaaccgtgtgtgggagaaactttacattctagcctcccacgagacagtgaactgtttgtgcctgaagaggggagcagcgagaaggagagcgaggacgcgccaaaaacatctcctccgacgcctgggaaacatggtttggaacagactggggaggaaaaagtgatggtgactgttcctgacaaaaatccaccttgtccttgctgtggtacccgggtaaactctgtgttgaatctgattgaacatctgaaagtgtcacacgggaaaaggggggtttgttttcggtgtgcaaaatgtggaaaggaaaatagtaactatcacagtgttgtttgtcattttaagaaatgcaggggtccagagacggagaaagccccagctggggagtggatttgtgaggtatgcaacagagattttacaaccaaaattggcctgggacaacacaagagattggcacacccagcagtgagaaatcaggaaaggatcgttgcttcccaaccgaaagaaacatcaaatagaggtgctcacaaaaggtgctggacaaaggaggaggaagaattactaataagactggaggctcagttcgagggaaacaaaaatattaataagcttattgcagaacacataaccaccaaaacagctaagcagatcagtgacaaaaggcgattgctgtccagaaagccagcagaggagccacgtgaggagcctggaacgtgtcatcacaccaggagagcagctgcgagcctgagaacggagcctgagatgagtcatcacgcccaggcagaggacagagataatggacctgggagacgccctctgccaggcagggcagctgccggagggagaacaatggacgagataagacgccaccctgataagggcaacggacagcagagacccaccaagcaaaaatcagaagaacagctgcaggcttactataaaaagacactagaggaacgactttcagctggggcacttaacaccttcccccgagcattcaagcaggtaatggaaggccgggatataaagctagtaatcaatcagacagcgcaggactgcttcggatgcctggaatccataagccaaataagaacggcaacccgagataaaaaggacacggtgacccgggagaaacacccaaagaaaccttttcagaagtggatgaagaagagagcaatcaaaaaaggtaattatcttcggttccagcgtttattttatcttgatagagggaaactggctaaaatcattttagatgatattgaatgcttgtcttgtgacataccactcagtgaaatttattcggtttttaaaacaagatgggaaacaactggtagctttaaaagccttggggactttaaaacttacgggaaggctgacaacactgccttcagagaattaattacggctaaagaaattgagaaaaatgtgcaggaaatgagcaaaggctcggctcccggtccagacgggattactcttggggacgtcgtaaagatggatcccgagttttcccggaccatggagattttcaatttatggttaacaactggtaaaatcccggacatggtgagggggtgcagaaccgttttgattccaaaatcatcaaagccggatcgtttgaaagacattaataactggagacctatcacgatcggttccatcttgctgagactgttctccaggattgtaacagctaggctgagcaaagcgtgccccctgaacccaaggcaaagaggctttatcagagcggcgggatgctctgaaaacttaaaactcctgcaaactataatttggtcggccaaaagagaacacagaccactgggtgttgtattcgtggacatcgccaaggcttttgacaccgtaagccaccagcacatcattcatgctttgcagcaaagagaggtggatccccacatcgtcggtctggtgagcaatatgtacgagaacatcagtacgtatatcaccacaaagaggaacacacacacagacaaaatccagatccgggttggagtaaagcagggtgacccgatgtcgccccttttatttaacctggcaatggaccctctattatgcaagctggaagagagtggcaaaggataccaccgaggacagagcagcatcacagcgatggcatttgcagacgatctggttttgctgagcgactcctgggaaaatatgaatacaaatattagcatactggagaccttctgcaatctgaccggactcaaaacacaggggcaaaagtgccacggcttttacatcaagccgacaaagaagtcttacaccatcaatgactgcgctgcctggactatcaacggcacacccctgaacatgatcgaccccggcgaatctgagaaatacctcggcctgcagtttgacccgtggattggaatagcaaggtccggtctctccacaaaactagatttttggcttcagcggatcgatcaagcaccacttaaacctctgcagaaaactgatattctcaaaacatacaccatccctcggctgatctacatagctgaccactcagaagtgaaaagcgcactactcgaaacccttgaccagaagatccggacagcggtcaaggaatggcttcacctacctccgtgcacctgcgatgccatcctgtactcgagcacgagagacggcggtttgggcatcaccaaattggcaggactgatccccagcgtgcaggcccgtagactgcatcggatcgcacagtcatctgacgatacgatgaaatgcttcatggaaaaagagaaaatggaacagctgcataagaaattgtggattcaagctggaggggacagagagaacataccctcgatttgggaagcaccaccgtcgagtgaaccaccaaacaacgtgagcacaaattcggaatgggaagcaccgacccagaaagataaatttccaaagccttgcaattggaggaaaaacgaattcaaaaaatggaccaaattggcatcccaaggccgcggaattgtaaattttgaaagagacaaaattagtaaccattggatccaatactacagacgcatacctcacaggaaactcctcactgcactaaagctcagggccaacgtttaccccacgagagaatttctagccaggggtagacaagaccaatacatcaaggcgtgtaggcactgcgatgcggacaacgaatcctgcgcccacatcatcggcaactgcccagtgacacaggacgcccgaatcaagaggcacaattacatctgcgaactgcttctcgaggaggcgaagaagaaggactgggtagtgttcaaggaaccgcacataagggattccaacaaggaactgtacaaacctgacctgatatttgtgaaggatgggcgtgcacttgtcgtggatgtgacagtacggtatgaagcagccaaatcatcgctggaggaagccgctgcagagaaagtgagaaagtacaaacacctggaaacggaagtaagacatctcacgaatgcaaaggacgttacttttgtgggctttcccctaggagcgcgggggaaatggcaccaagataactttaaacttttgactgagcttggcctctccaaatcgaggcaagtgaaaatggcagagactttttccacagtagcgctcttttcatctgtggacattgtacatatgtttgccagtagggccagaaaatctatggttatgtgataataggctgccttctgcggggcttgccttctggccatgcccttcttctctcccttgcacctgtacctcttggtctttgaataaagcctgagtaggaaggaccggtaaaaaaaaaaaaaaaaaaaaaaaaaaaaaaacgttgactaaaaaaaaaaaaaaaaaaaaaaaaaaaaaaaaaaaaaaaaaaaaaaaaaaaaaaaaaaaaaaaaaaaaaa

SEQ ID NO: 10950 - DNA, 5264 bp, synthetic construct
  source 1..5264: mol_type = other DNA
gaaataagagagaaaagaagagtaagaagaaatataagagaattcgccaccatggcccctaagaaaaagcggaaggtgaatatcagcggctctagctgcggcagccccaacagcgccgacaccagcagcgacttcaaggacctgtggaccaagctgaaggaatgccacgaccgggaagtgcagggactccaggtgaaggtcaccaaactcaagcaagaaagaatcctggacgcccagagactggaagaattcttcaccaagaaccagcagctgagagagcagcagaaagtgctgcacgagacaatcaaggttctggaagatagactgcgggccggcctgtgcgacagatgcgccgtgaccgaggaacacatgcgcaaaaagcagcaggagttcgagaacattagacagcaaaatctgaaattgatcacagagctgatgaacgagagaaacacactgcaggaggagaacaagaagctgagcgagcagctgcaacagaagatcgagaatgatcagcaacaccaggccgctgagctggaatgtgaagaggacgtgatccccgacagcccaatcacagctttcagcttttctggcgtgaacagactgaggcggaaggaaaacccccacgtgcggtacatcgagcagacccataccaagctggaacacagcgtgtgtgccaacgagatgagaaaggtgtccaagtcctccacccatccccagcacaaccctaacgaaaatgagatcctggtggctgatacctacgaccagtctcagagccctatggccaaggcccacggcaccagctcttatacccctgataagagctccttcaacctggccaccgtggtggccgagacactgggcctgggcgtgcaggaggaaagcgagacacagggcccaatgagccctctgggagatgagctgtaccactgcctggaaggcaaccacaagaaacagccttttgagtccggctccgagactcctggaacaagcgagagcgctacacctgagggcagccctaagagaaaggtgtccagcgccgagggcgctgccaaggaagagcctaaacggagaagcgccagactgagcgccaagccccccgccaaggtggaagccaagcctaagaaggccgccgctaaggacaagagcagcgataagaaagtccagaccaagggcaagcggggcgccaaaggcaaacaggccgaggtggccaaccaggagacaaaggaagatctgcctgctgagaacggcgaaaccaagaccgaggaatctccagcttctgacgaggccggagagaaggaggccaaaagcgacagcggctctgagacacctggaacaagcgagagcgccaccccggaatcctatgaacaacttgcaccacaaccgtgtgtgggagaaactttacattctagcctcccacgagacagtgaactgtttgtgcctgaagaggggagcagcgagaaggagagcgaggacgcgccaaaaacatctcctccgacgcctgggaaacatggtttggaacagactggggaggaaaaagtgatggtgactgttcctgacaaaaatccaccttgtccttgctgtggtacccgggtaaactctgtgttgaatctgattgaacatctgaaagtgtcacacgggaaaaggggggtttgttttcggtgtgcaaaatgtggaaaggaaaatagtaactatcacagtgttgtttgtcattttaagaaatgcaggggtccagagacggagaaagccccagctggggagtggatttgtgaggtatgcaacagagattttacaaccaaaattggcctgggacaacacaagagattggcacacccagcagtgagaaatcaggaaaggatcgttgcttcccaaccgaaagaaacatcaaatagaggtgctcacaaaaggtgctggacaaaggaggaggaagaattactaataagactggaggctcagttcgagggaaacaaaaatattaataagcttattgcagaacacataaccaccaaaacagctaagcagatcagtgacaaaaggcgattgctgtccagaaagccagcagaggagccacgtgaggagcctggaacgtgtcatcacaccaggagagcagctgcgagcctgagaacggagcctgagatgagtcatcacgcccaggcagaggacagagataatggacctgggagacgccctctgccaggcagggcagctgccggagggagaacaatggacgagataagacgccaccctgataagggcaacggacagcagagacccaccaagcaaaaatcagaagaacagctgcaggcttactataaaaagacactagaggaacgactttcagctggggcacttaacaccttcccccgagcattcaagcaggtaatggaaggccgggatataaagctagtaatcaatcagacagcgcaggactgcttcggatgcctggaatccataagccaaataagaacggcaacccgagataaaaaggacacggtgacccgggagaaacacccaaagaaaccttttcagaagtggatgaagaagagagcaatcaaaaaaggtaattatcttcggttccagcgtttattttatcttgatagagggaaactggctaaaatcattttagatgatattgaatgcttgtcttgtgacataccactcagtgaaatttattcggtttttaaaacaagatgggaaacaactggtagctttaaaagccttggggactttaaaacttacgggaaggctgacaacactgccttcagagaattaattacggctaaagaaattgagaaaaatgtgcaggaaatgagcaaaggctcggctcccggtccagacgggattactcttggggacgtcgtaaagatggatcccgagttttcccggaccatggagattttcaatttatggttaacaactggtaaaatcccggacatggtgagggggtgcagaaccgttttgattccaaaatcatcaaagccggatcgtttgaaagacattaataactggagacctatcacgatcggttccatcttgctgagactgttctccaggattgtaacagctaggctgagcaaagcgtgccccctgaacccaaggcaaagaggctttatcagagcggcgggatgctctgaaaacttaaaactcctgcaaactataatttggtcggccaaaagagaacacagaccactgggtgttgtattcgtggacatcgccaaggcttttgacaccgtaagccaccagcacatcattcatgctttgcagcaaagagaggtggatccccacatcgtcggtctggtgagcaatatgtacgagaacatcagtacgtatatcaccacaaagaggaacacacacacagacaaaatccagatccgggttggagtaaagcagggtgacccgatgtcgccccttttatttaacctggcaatggaccctctattatgcaagctggaagagagtggcaaaggataccaccgaggacagagcagcatcacagcgatggcatttgcagacgatctggttttgctgagcgactcctgggaaaatatgaatacaaatattagcatactggagaccttctgcaatctgaccggactcaaaacacaggggcaaaagtgccacggcttttacatcaagccgacaaagaagtcttacaccatcaatgactgcgctgcctggactatcaacggcacacccctgaacatgatcgaccccggcgaatctgagaaatacctcggcctgcagtttgacccgtggattggaatagcaaggtccggtctctccacaaaactagatttttggcttcagcggatcgatcaagcaccacttaaacctctgcagaaaactgatattctcaaaacatacaccatccctcggctgatctacatagctgaccactcagaagtgaaaagcgcactactcgaaacccttgaccagaagatccggacagcggtcaaggaatggcttcacctacctccgtgcacctgcgatgccatcctgtactcgagcacgagagacggcggtttgggcatcaccaaattggcaggactgatccccagcgtgcaggcccgtagactgcatcggatcgcacagtcatctgacgatacgatgaaatgcttcatggaaaaagagaaaatggaacagctgcataagaaattgtggattcaagctggaggggacagagagaacataccctcgatttgggaagcaccaccgtcgagtgaaccaccaaacaacgtgagcacaaattcggaatgggaagcaccgacccagaaagataaatttccaaagccttgcaattggaggaaaaacgaattcaaaaaatggaccaaattggcatcccaaggccgcggaattgtaaattttgaaagagacaaaattagtaaccattggatccaatactacagacgcatacctcacaggaaactcctcactgcactacaactcagggccaacgtttaccccacgagagaatttctagccaggggtagacaagaccaatacatcaaggcgtgtaggcactgcgatgcggacaacgaatcctgcgcccacatcatcggcaactgcccagtgacaaaggacgcccgaatcaagaggcacaattacatctgcgaactgcttctcgaggaggcgaagaagaaggactgggtagtgttcaaggaaccgcacataagggattccaacaaggaactgtacaaacctgacctgatatttgtgaaggatgggcgtgcacttgtcgtggatgtgacagtacggtatgaagcagccaaatcatcgctggaggaagccgctgcagagaaagtgagaaagtacaaacacctggaaacggaagtaagacatctcacgaatgcaaaggacgttacttttgtgggctttcccctaggagcgcgggggaaatggcaccaagataactttaaacttttgactgagcttggcctctccaaatcgaggcaagtgaaaatggcagagactttttccacagtagcgctcttttcatctgtggacattgtacatatgtttgccagtagggccagaaaatctatggttatgtgataataggctgccttctgcggggcttgccttctggccatgcccttcttctctcccttgcacctgtacctcttggtctttgaataaagcctgagtaggaaggaccggtaaaaaaaaaaaaaaaaaaaaaaaaaaaaaaacgttgactaaaaaaaaaaaaaaaaaaaaaaaaaaaaaaaaaaaaaaaaaaaaaaaaaaaaaaaaaaaaaaaaaaaaaa

SEQ ID NO: 10951 - DNA, 5264 bp, synthetic construct
  source 1..5264: mol_type = other DNA
gaaataagagagaaaagaagagtaagaagaaatataagagaattcgccaccatggcccctaagaaaaagcggaaggtgaatatcagcggctctagctgcggcagccccaacagcgccgacaccagcagcgacttcaaggacctgtggaccaagctgaaggaatgccacgaccgggaagtgcagggactccaggtgaaggtcaccaaactcaagcaagaaagaatcctggacgcccagagactggaagaattcttcaccaagaaccagcagctgagagagcagcagaaagtgctgcacgagacaatcaaggttctggaagatagactgcgggccggcctgtgcgacagatgcgccgtgaccgaggaacacatgcgcaaaaagcagcaggagttcgagaacattagacagcaaaatctgaaattgatcacagagctgatgaacgagagaaacacactgcaggaggagaacaagaagctgagcgagcagctgcaacagaagatcgagaatgatcagcaacaccaggccgctgagctggaatgtgaagaggacgtgatccccgacagcccaatcacagctttcagcttttctggcgtgaacagactgaggcggaaggaaaacccccacgtgcggtacatcgagcagacccataccaagctggaacacagcgtgtgtgccaacgagatgagaaaggtgtccaagtcctccacccatccccagcacaaccctaacgaaaatgagatcctggtggctgatacctacgaccagtctcagagccctatggccaaggcccacggcaccagctcttatacccctgataagagctccttcaacctggccaccgtggtggccgagacactgggcctgggcgtgcaggaggaaagcgagacacagggcccaatgagccctctgggagatgagctgtaccactgcctggaaggcaaccacaagaaacagccttttgagtccggctccgagactcctggaacaagcgagagcgctacacctgagggcagccctaagagaaaggtgtccagcgccgagggcgctgccaaggaagagcctaaacggagaagcgccagactgagcgccaagccccccgccaaggtggaagccaagcctaagaaggccgccgctaaggacaagagcagcgataagaaagtccagaccaagggcaagcggggcgccaaaggcaaacaggccgaggtggccaaccaggagacaaaggaagatctgcctgctgagaacggcgaaaccaagaccgaggaatctccagcttctgacgaggccggagagaaggaggccaaaagcgacagcggctctgagacacctggaacaagcgagagcgccaccccggaatcctatgaacaacttgcaccacaaccgtgtgtgggagaaactttacattctagcctcccacgagacagtgaactgtttgtgcctgaagaggggagcagcgagaaggagagcgaggacgcgccaaaaacatctcctccgacgcctgggaaacatggtttggaacagactggggaggaaaaagtgatggtgactgttcctgacaaaaatccaccttgtccttgctgtggtacccgggtaaactctgtgttgaatctgattgaacatctgaaagtgtcacacgggaaaaggggggtttgttttcggtgtgcaaaatgtggaaaggaaaatagtaactatcacagtgttgtttgtcattttaagaaatgcaggggtccagagacggagaaagccccagctggggagtggatttgtgaggtatgcaacagagattttacaaccaaaattggcctgggacaacacaagagattggcacacccagcagtgagaaatcaggaaaggatcgttgcttcccaaccgaaagaaacatcaaatagaggtgctcacaaaaggtgctggacaaaggaggaggaagaattactaataagactggaggctcagttcgagggaaacaaaaatattaataagcttattgcagaacacataaccaccaaaacagctaagcagatcagtgacaaaaggcgattgctgtccagaaagccagcagaggagccacgtgaggagcctggaacgtgtcatcacaccaggagagcagctgcgagcctgagaacggagcctgagatgagtcatcacgcccaggcagaggacagagataatggacctgggagacgccctctgccaggcagggcagctgccggagggagaacaatggacgagataagacgccaccctgataagggcaacggacagcagagacccaccaagcaaaaatcagaagaacagctgcaggcttactataaaaagacactagaggaacgactttcagctggggcacttaacaccttcccccgagcattcaagcaggtaatggaaggccgggatataaagctagtaatcaatcagacagcgcaggactgcttcggatgcctggaatccataagccaaataagaacggcaacccgagataaaaaggacacggtgacccgggagaaacacccaaagaaaccttttcagaagtggatgaagaagagagcaatcaaaaaaggtaattatcttcggttccagcgtttattttatcttgatagagggaaactggctaaaatcattttagatgatattgaatgcttgtcttgtgacataccactcagtgaaatttattcggtttttaaaacaagatgggaaacaactggtagctttaaaagccttggggactttaaaacttacgggaaggctgacaacactgccttcagagaattaattacggctaaagaaattgagaaaaatgtgcaggaaatgagcaaaggctcggctcccggtccagacgggattactcttggggacgtcgtaaagatggatcccgagttttcccggaccatggagattttcaatttatggttaacaactggtaaaatcccggacatggtgagggggtgcagaaccgttttgattccaaaatcatcaaagccggatcgtttgaaagacattaataactggagacctatcacgatcggttccatcttgctgagactgttctccaggattgtaacagctaggctgagcaaagcgtgccccctgaacccaaggcaaagaggctttatcagagcggcgggatgctctgaaaacttaaaactcctgcaaactataatttggtcggccaaaagagaacacagaccactgggtgttgtattcgtggacatcgccaaggcttttgacaccgtaagccaccagcacatcattcatgctttgcagcaaagagaggtggatccccacatcgtcggtctggtgagcaatatgtacgagaacatcagtacgtatatcaccacaaagaggaacacacacacagacaaaatccagatccgggttggagtaaagcagggtgacccgatgtcgccccttttatttaacctggcaatggaccctctattatgcaagctggaagagagtggcaaaggataccaccgaggacagagcagcatcacagcgatggcatttgcagacgatctggttttgctgagcgactcctgggaaaatatgaatacaaatattagcatactggagaccttctgcaatctgaccggactcaaaacacaggggcaaaagtgccacggcttttacatcaagccgacaaagaagtcttacaccatcaatgactgcgctgcctggactatcaacggcacacccctgaacatgatcgaccccggcgaatctgagaaatacctcggcctgcagtttgacccgtggattggaatagcaaggtccggtctctccacaaaactagatttttggcttcagcggatcgatcaagcaccacttaaacctctgcagaaaactgatattctcaaaacatacaccatccctcggctgatctacatagctgaccactcagaagtgaaaagcgcactactcgaaacccttgaccagaagatccggacagcggtcaaggaatggcttcacctacctccgtgcacctgcgatgccatcctgtactcgagcacgagagacggcggtttgggcatcaccaaattggcaggactgatccccagcgtgcaggcccgtagactgcatcggatcgcacagtcatctgacgatacgatgaaatgcttcatggaaaaagagaaaatggaacagctgcataagaaattgtggattcaagctggaggggacagagagaacataccctcgatttgggaagcaccaccgtcgagtgaaccaccaaacaacgtgagcacaaattcggaatgggaagcaccgacccagaaagataaatttccaaagccttgcaattggaggaaaaacgaattcaaaaaatggaccaaattggcatcccaaggccgcggaattgtaaattttgaaagagacaaaattagtaaccattggatccaatactacagacgcatacctcacaggaaactcctcactgcactacaactcagggccaacgtttaccccacgagagaatttctagccaggggtagacaagaccaatacatcaaggcgtgtaggcactgcgatgcggacaacgaatcctgcgcccacatcatcggcaactgcccagtgacacaggacgcccgaatcaagaggcacaattacatctgcgaactgcttctcaaggaggcgaagaagaaggactgggtagtgttcaaggaaccgcacataagggattccaacaaggaactgtacaaacctgacctgatatttgtgaaggatgggcgtgcacttgtcgtggatgtgacagtacggtatgaagcagccaaatcatcgctggaggaagccgctgcagagaaagtgagaaagtacaaacacctggaaacggaagtaagacatctcacgaatgcaaaggacgttacttttgtgggctttcccctaggagcgcgggggaaatggcaccaagataactttaaacttttgactgagcttggcctctccaaatcgaggcaagtgaaaatggcagagactttttccacagtagcgctcttttcatctgtggacattgtacatatgtttgccagtagggccagaaaatctatggttatgtgataataggctgccttctgcggggcttgccttctggccatgcccttcttctctcccttgcacctgtacctcttggtctttgaataaagcctgagtaggaaggaccggtaaaaaaaaaaaaaaaaaaaaaaaaaaaaaaacgttgactaaaaaaaaaaaaaaaaaaaaaaaaaaaaaaaaaaaaaaaaaaaaaaaaaaaaaaaaaaaaaaaaaaaaaa

SEQ ID NO: 10952 - DNA, 5264 bp, synthetic construct
  source 1..5264: mol_type = other DNA
gaaataagagagaaaagaagagtaagaagaaatataagagaattcgccaccatggcccctaagaaaaagcggaaggtgaatatcagcggctctagctgcggcagccccaacagcgccgacaccagcagcgacttcaaggacctgtggaccaagctgaaggaatgccacgaccgggaagtgcagggactccaggtgaaggtcaccaaactcaagcaagaaagaatcctggacgcccagagactggaagaattcttcaccaagaaccagcagctgagagagcagcagaaagtgctgcacgagacaatcaaggttctggaagatagactgcgggccggcctgtgcgacagatgcgccgtgaccgaggaacacatgcgcaaaaagcagcaggagttcgagaacattagacagcaaaatctgaaattgatcacagagctgatgaacgagagaaacacactgcaggaggagaacaagaagctgagcgagcagctgcaacagaagatcgagaatgatcagcaacaccaggccgctgagctggaatgtgaagaggacgtgatccccgacagcccaatcacagctttcagcttttctggcgtgaacagactgaggcggaaggaaaacccccacgtgcggtacatcgagcagacccataccaagctggaacacagcgtgtgtgccaacgagatgagaaaggtgtccaagtcctccacccatccccagcacaaccctaacgaaaatgagatcctggtggctgatacctacgaccagtctcagagccctatggccaaggcccacggcaccagctcttatacccctgataagagctccttcaacctggccaccgtggtggccgagacactgggcctgggcgtgcaggaggaaagcgagacacagggcccaatgagccctctgggagatgagctgtaccactgcctggaaggcaaccacaagaaacagccttttgagtccggctccgagactcctggaacaagcgagagcgctacacctgagggcagccctaagagaaaggtgtccagcgccgagggcgctgccaaggaagagcctaaacggagaagcgccagactgagcgccaagccccccgccaaggtggaagccaagcctaagaaggccgccgctaaggacaagagcagcgataagaaagtccagaccaagggcaagcggggcgccaaaggcaaacaggccgaggtggccaaccaggagacaaaggaagatctgcctgctgagaacggcgaaaccaagaccgaggaatctccagcttctgacgaggccggagagaaggaggccaaaagcgacagcggctctgagacacctggaacaagcgagagcgccaccccggaatcctatgaacaacttgcaccacaaccgtgtgtgggagaaactttacattctagcctcccacgagacagtgaactgtttgtgcctgaagaggggagcagcgagaaggagagcgaggacgcgccaaaaacatctcctccgacgcctgggaaacatggtttggaacagactggggaggaaaaagtgatggtgactgttcctgacaaaaatccaccttgtccttgctgtggtacccgggtaaactctgtgttgaatctgattgaacatctgaaagtgtcacacgggaaaaggggggtttgttttcggtgtgcaaaatgtggaaaggaaaatagtaactatcacagtgttgtttgtcattttaagaaatgcaggggtccagagacggagaaagccccagctggggagtggatttgtgaggtatgcaacagagattttacaaccaaaattggcctgggacaacacaagagattggcacacccagcagtgagaaatcaggaaaggatcgttgcttcccaaccgaaagaaacatcaaatagaggtgctcacaaaaggtgctggacaaaggaggaggaagaattactaataagactggaggctcagttcgagggaaacaaaaatattaataagcttattgcagaacacataaccaccaaaacagctaagcagatcagtgacaaaaggcgattgctgtccagaaagccagcagaggagccacgtgaggagcctggaacgtgtcatcacaccaggagagcagctgcgagcctgagaacggagcctgagatgagtcatcacgcccaggcagaggacagagataatggacctgggagacgccctctgccaggcagggcagctgccggagggagaacaatggacgagataagacgccaccctgataagggcaacggacagcagagacccaccaagcaaaaatcagaagaacagctgcaggcttactataaaaagacactagaggaacgactttcagctggggcacttaacaccttcccccgagcattcaagcaggtaatggaaggccgggatataaagctagtaatcaatcagacagcgcaggactgcttcggatgcctggaatccataagccaaataagaacggcaacccgagataaaaaggacacggtgacccgggagaaacacccaaagaaaccttttcagaagtggatgaagaagagagcaatcaaaaaaggtaattatcttcggttccagcgtttattttatcttgatagagggaaactggctaaaatcattttagatgatattgaatgcttgtcttgtgacataccactcagtgaaatttattcggtttttaaaacaagatgggaaacaactggtagctttaaaagccttggggactttaaaacttacgggaaggctgacaacactgccttcagagaattaattacggctaaagaaattgagaaaaatgtgcaggaaatgagcaaaggctcggctcccggtccagacgggattactcttggggacgtcgtaaagatggatcccgagttttcccggaccatggagattttcaatttatggttaacaactggtaaaatcccggacatggtgagggggtgcagaaccgttttgattccaaaatcatcaaagccggatcgtttgaaagacattaataactggagacctatcacgatcggttccatcttgctgagactgttctccaggattgtaacagctaggctgagcaaagcgtgccccctgaacccaaggcaaagaggctttatcagagcggcgggatgctctgaaaacttaaaactcctgcaaactataatttggtcggccaaaagagaacacagaccactgggtgttgtattcgtggacatcgccaaggcttttgacaccgtaagccaccagcacatcattcatgctttgcagcaaagagaggtggatccccacatcgtcggtctggtgagcaatatgtacgagaacatcagtacgtatatcaccacaaagaggaacacacacacagacaaaatccagatccgggttggagtaaagcagggtgacccgatgtcgccccttttatttaacctggcaatggaccctctattatgcaagctggaagagagtggcaaaggataccaccgaggacagagcagcatcacagcgatggcatttgcagacgatctggttttgctgagcgactcctgggaaaatatgaatacaaatattagcatactggagaccttctgcaatctgaccggactcaaaacacaggggcaaaagtgccacggcttttacatcaagccgacaaagaagtcttacaccatcaatgactgcgctgcctggactatcaacggcacacccctgaacatgatcgaccccggcgaatctgagaaatacctcggcctgcagtttgacccgtggattggaatagcaaggtccggtctctccacaaaactagatttttggcttcagcggatcgatcaagcaccacttaaacctctgcagaaaactgatattctcaaaacatacaccatccctcggctgatctacatagctgaccactcagaagtgaaaagcgcactactcgaaacccttgaccagaagatccggacagcggtcaaggaatggcttcacctacctccgtgcacctgcgatgccatcctgtactcgagcacgagagacggcggtttgggcatcaccaaattggcaggactgatccccagcgtgcaggcccgtagactgcatcggatcgcacagtcatctgacgatacgatgaaatgcttcatggaaaaagagaaaatggaacagctgcataagaaattgtggattcaagctggaggggacagagagaacataccctcgatttgggaagcaccaccgtcgagtgaaccaccaaacaacgtgagcacaaattcggaatgggaagcaccgacccagaaagataaatttccaaagccttgcaattggaggaaaaacgaattcaaaaaatggaccaaattggcatcccaaggccgcggaattgtaaattttgaaagagacaaaattagtaaccattggatccaatactacagacgcatacctcacaggaaactcctcactgcactacaactcagggccaacgtttaccccacgagagaatttctagccaggggtagacaagaccaatacatcaaggcgtgtaggcactgcgatgcggacaacgaatcctgcgcccacatcatcggcaactgcccagtgacacaggacgcccgaatcaagaggcacaattacatctgcgaactgcttctcgaggaggcgaagaagaaggactggaccgtgttcaaggaaccgcacataagggattccaacaaggaactgtacaaacctgacctgatatttgtgaaggatgggcgtgcacttgtcgtggatgtgacagtacggtatgaagcagccaaatcatcgctggaggaagccgctgcagagaaagtgagaaagtacaaacacctggaaacggaagtaagacatctcacgaatgcaaaggacgttacttttgtgggctttcccctaggagcgcgggggaaatggcaccaagataactttaaacttttgactgagcttggcctctccaaatcgaggcaagtgaaaatggcagagactttttccacagtagcgctcttttcatctgtggacattgtacatatgtttgccagtagggccagaaaatctatggttatgtgataataggctgccttctgcggggcttgccttctggccatgcccttcttctctcccttgcacctgtacctcttggtctttgaataaagcctgagtaggaaggaccggtaaaaaaaaaaaaaaaaaaaaaaaaaaaaaaacgttgactaaaaaaaaaaaaaaaaaaaaaaaaaaaaaaaaaaaaaaaaaaaaaaaaaaaaaaaaaaaaaaaaaaaaaa

SEQ ID NO: 10953 - DNA, 5264 bp, synthetic construct
  source 1..5264: mol_type = other DNA
gaaataagagagaaaagaagagtaagaagaaatataagagaattcgccaccatggcccctaagaaaaagcggaaggtgaatatcagcggctctagctgcggcagccccaacagcgccgacaccagcagcgacttcaaggacctgtggaccaagctgaaggaatgccacgaccgggaagtgcagggactccaggtgaaggtcaccaaactcaagcaagaaagaatcctggacgcccagagactggaagaattcttcaccaagaaccagcagctgagagagcagcagaaagtgctgcacgagacaatcaaggttctggaagatagactgcgggccggcctgtgcgacagatgcgccgtgaccgaggaacacatgcgcaaaaagcagcaggagttcgagaacattagacagcaaaatctgaaattgatcacagagctgatgaacgagagaaacacactgcaggaggagaacaagaagctgagcgagcagctgcaacagaagatcgagaatgatcagcaacaccaggccgctgagctggaatgtgaagaggacgtgatccccgacagcccaatcacagctttcagcttttctggcgtgaacagactgaggcggaaggaaaacccccacgtgcggtacatcgagcagacccataccaagctggaacacagcgtgtgtgccaacgagatgagaaaggtgtccaagtcctccacccatccccagcacaaccctaacgaaaatgagatcctggtggctgatacctacgaccagtctcagagccctatggccaaggcccacggcaccagctcttatacccctgataagagctccttcaacctggccaccgtggtggccgagacactgggcctgggcgtgcaggaggaaagcgagacacagggcccaatgagccctctgggagatgagctgtaccactgcctggaaggcaaccacaagaaacagccttttgagtccggctccgagactcctggaacaagcgagagcgctacacctgagggcagccctaagagaaaggtgtccagcgccgagggcgctgccaaggaagagcctaaacggagaagcgccagactgagcgccaagccccccgccaaggtggaagccaagcctaagaaggccgccgctaaggacaagagcagcgataagaaagtccagaccaagggcaagcggggcgccaaaggcaaacaggccgaggtggccaaccaggagacaaaggaagatctgcctgctgagaacggcgaaaccaagaccgaggaatctccagcttctgacgaggccggagagaaggaggccaaaagcgacagcggctctgagacacctggaacaagcgagagcgccaccccggaatcctatgaacaacttgcaccacaaccgtgtgtgggagaaactttacattctagcctcccacgagacagtgaactgtttgtgcctgaagaggggagcagcgagaaggagagcgaggacgcgccaaaaacatctcctccgacgcctgggaaacatggtttggaacagactggggaggaaaaagtgatggtgactgttcctgacaaaaatccaccttgtccttgctgtggtacccgggtaaactctgtgttgaatctgattgaacatctgaaagtgtcacacgggaaaaggggggtttgttttcggtgtgcaaaatgtggaaaggaaaatagtaactatcacagtgttgtttgtcattttaagaaatgcaggggtccagagacggagaaagccccagctggggagtggatttgtgaggtatgcaacagagattttacaaccaaaattggcctgggacaacacaagagattggcacacccagcagtgagaaatcaggaaaggatcgttgcttcccaaccgaaagaaacatcaaatagaggtgctcacaaaaggtgctggacaaaggaggaggaagaattactaataagactggaggctcagttcgagggaaacaaaaatattaataagcttattgcagaacacataaccaccaaaacagctaagcagatcagtgacaaaaggcgattgctgtccagaaagccagcagaggagccacgtgaggagcctggaacgtgtcatcacaccaggagagcagctgcgagcctgagaacggagcctgagatgagtcatcacgcccaggcagaggacagagataatggacctgggagacgccctctgccaggcagggcagctgccggagggagaacaatggacgagataagacgccaccctgataagggcaacggacagcagagacccaccaagcaaaaatcagaagaacagctgcaggcttactataaaaagacactagaggaacgactttcagctggggcacttaacaccttcccccgagcattcaagcaggtaatggaaggccgggatataaagctagtaatcaatcagacagcgcaggactgcttcggatgcctggaatccataagccaaataagaacggcaacccgagataaaaaggacacggtgacccgggagaaacacccaaagaaaccttttcagaagtggatgaagaagagagcaatcaaaaaaggtaattatcttcggttccagcgtttattttatcttgatagagggaaactggctaaaatcattttagatgatattgaatgcttgtcttgtgacataccactcagtgaaatttattcggtttttaaaacaagatgggaaacaactggtagctttaaaagccttggggactttaaaacttacgggaaggctgacaacactgccttcagagaattaattacggctaaagaaattgagaaaaatgtgcaggaaatgagcaaaggctcggctcccggtccagacgggattactcttggggacgtcgtaaagatggatcccgagttttcccggaccatggagattttcaatttatggttaacaactggtaaaatcccggacatggtgagggggtgcagaaccgttttgattccaaaatcatcaaagccggatcgtttgaaagacattaataactggagacctatcacgatcggttccatcttgctgagactgttctccaggattgtaacagctaggctgagcaaagcgtgccccctgaacccaaggcaaagaggctttatcagagcggcgggatgctctgaaaacttaaaactcctgcaaactataatttggtcggccaaaagagaacacagaccactgggtgttgtattcgtggacatcgccaaggcttttgacaccgtaagccaccagcacatcattcatgctttgcagcaaagagaggtggatccccacatcgtcggtctggtgagcaatatgtacgagaacatcagtacgtatatcaccacaaagaggaacacacacacagacaaaatccagatccgggttggagtaaagcagggtgacccgatgtcgccccttttatttaacctggcaatggaccctctattatgcaagctggaagagagtggcaaaggataccaccgaggacagagcagcatcacagcgatggcatttgcagacgatctggttttgctgagcgactcctgggaaaatatgaatacaaatattagcatactggagaccttctgcaatctgaccggactcaaaacacaggggcaaaagtgccacggcttttacatcaagccgacaaagaagtcttacaccatcaatgactgcgctgcctggactatcaacggcacacccctgaacatgatcgaccccggcgaatctgagaaatacctcggcctgcagtttgacccgtggattggaatagcaaggtccggtctctccacaaaactagatttttggcttcagcggatcgatcaagcaccacttaaacctctgcagaaaactgatattctcaaaacatacaccatccctcggctgatctacatagctgaccactcagaagtgaaaagcgcactactcgaaacccttgaccagaagatccggacagcggtcaaggaatggcttcacctacctccgtgcacctgcgatgccatcctgtactcgagcacgagagacggcggtttgggcatcaccaaattggcaggactgatccccagcgtgcaggcccgtagactgcatcggatcgcacagtcatctgacgatacgatgaaatgcttcatggaaaaagagaaaatggaacagctgcataagaaattgtggattcaagctggaggggacagagagaacataccctcgatttgggaagcaccaccgtcgagtgaaccaccaaacaacgtgagcacaaattcggaatgggaagcaccgacccagaaagataaatttccaaagccttgcaattggaggaaaaacgaattcaaaaaatggaccaaattggcatcccaaggccgcggaattgtaaattttgaaagagacaaaattagtaaccattggatccaatactacagacgcatacctcacaggaaactcctcactgcactacaactcagggccaacgtttaccccacgagagaatttctagccaggggtagacaagaccaatacatcaaggcgtgtaggcactgcgatgcggacaacgaatcctgcgcccacatcatcggcaactgcccagtgacacaggacgcccgaatcaagaggcacaattacatctgcgaactgcttctcgaggaggcgaagaagaaggactgggtagtgttcaaggaaccgcacataagggattccaacaaggaactgtacaaacctgacctgatatttgtgaaggatgggcgtgcacttgtcatcgatgtgacagtacggtatgaagcagccaaatcatcgctggaggaagccgctgcagagaaagtgagaaagtacaaacacctggaaacggaagtaagacatctcacgaatgcaaaggacgttacttttgtgggctttcccctaggagcgcgggggaaatggcaccaagataactttaaacttttgactgagcttggcctctccaaatcgaggcaagtgaaaatggcagagactttttccacagtagcgctcttttcatctgtggacattgtacatatgtttgccagtagggccagaaaatctatggttatgtgataataggctgccttctgcggggcttgccttctggccatgcccttcttctctcccttgcacctgtacctcttggtctttgaataaagcctgagtaggaaggaccggtaaaaaaaaaaaaaaaaaaaaaaaaaaaaaaacgttgactaaaaaaaaaaaaaaaaaaaaaaaaaaaaaaaaaaaaaaaaaaaaaaaaaaaaaaaaaaaaaaaaaaaaaa

SEQ ID NO: 10954 - DNA, 5264 bp, synthetic construct
  source 1..5264: mol_type = other DNA
gaaataagagagaaaagaagagtaagaagaaatataagagaattcgccaccatggcccctaagaaaaagcggaaggtgaatatcagcggctctagctgcggcagccccaacagcgccgacaccagcagcgacttcaaggacctgtggaccaagctgaaggaatgccacgaccgggaagtgcagggactccaggtgaaggtcaccaaactcaagcaagaaagaatcctggacgcccagagactggaagaattcttcaccaagaaccagcagctgagagagcagcagaaagtgctgcacgagacaatcaaggttctggaagatagactgcgggccggcctgtgcgacagatgcgccgtgaccgaggaacacatgcgcaaaaagcagcaggagttcgagaacattagacagcaaaatctgaaattgatcacagagctgatgaacgagagaaacacactgcaggaggagaacaagaagctgagcgagcagctgcaacagaagatcgagaatgatcagcaacaccaggccgctgagctggaatgtgaagaggacgtgatccccgacagcccaatcacagctttcagcttttctggcgtgaacagactgaggcggaaggaaaacccccacgtgcggtacatcgagcagacccataccaagctggaacacagcgtgtgtgccaacgagatgagaaaggtgtccaagtcctccacccatccccagcacaaccctaacgaaaatgagatcctggtggctgatacctacgaccagtctcagagccctatggccaaggcccacggcaccagctcttatacccctgataagagctccttcaacctggccaccgtggtggccgagacactgggcctgggcgtgcaggaggaaagcgagacacagggcccaatgagccctctgggagatgagctgtaccactgcctggaaggcaaccacaagaaacagccttttgagtccggctccgagactcctggaacaagcgagagcgctacacctgagggcagccctaagagaaaggtgtccagcgccgagggcgctgccaaggaagagcctaaacggagaagcgccagactgagcgccaagccccccgccaaggtggaagccaagcctaagaaggccgccgctaaggacaagagcagcgataagaaagtccagaccaagggcaagcggggcgccaaaggcaaacaggccgaggtggccaaccaggagacaaaggaagatctgcctgctgagaacggcgaaaccaagaccgaggaatctccagcttctgacgaggccggagagaaggaggccaaaagcgacagcggctctgagacacctggaacaagcgagagcgccaccccggaatcctatgaacaacttgcaccacaaccgtgtgtgggagaaactttacattctagcctcccacgagacagtgaactgtttgtgcctgaagaggggagcagcgagaaggagagcgaggacgcgccaaaaacatctcctccgacgcctgggaaacatggtttggaacagactggggaggaaaaagtgatggtgactgttcctgacaaaaatccaccttgtccttgctgtggtacccgggtaaactctgtgttgaatctgattgaacatctgaaagtgtcacacgggaaaaggggggtttgttttcggtgtgcaaaatgtggaaaggaaaatagtaactatcacagtgttgtttgtcattttaagaaatgcaggggtccagagacggagaaagccccagctggggagtggatttgtgaggtatgcaacagagattttacaaccaaaattggcctgggacaacacaagagattggcacacccagcagtgagaaatcaggaaaggatcgttgcttcccaaccgaaagaaacatcaaatagaggtgctcacaaaaggtgctggacaaaggaggaggaagaattactaataagactggaggctcagttcgagggaaacaaaaatattaataagcttattgcagaacacataaccaccaaaacagctaagcagatcagtgacaaaaggcgattgctgtccagaaagccagcagaggagccacgtgaggagcctggaacgtgtcatcacaccaggagagcagctgcgagcctgagaacggagcctgagatgagtcatcacgcccaggcagaggacagagataatggacctgggagacgccctctgccaggcagggcagctgccggagggagaacaatggacgagataagacgccaccctgataagggcaacggacagcagagacccaccaagcaaaaatcagaagaacagctgcaggcttactataaaaagacactagaggaacgactttcagctggggcacttaacaccttcccccgagcattcaagcaggtaatggaaggccgggatataaagctagtaatcaatcagacagcgcaggactgcttcggatgcctggaatccataagccaaataagaacggcaacccgagataaaaaggacacggtgacccgggagaaacacccaaagaaaccttttcagaagtggatgaagaagagagcaatcaaaaaaggtaattatcttcggttccagcgtttattttatcttgatagagggaaactggctaaaatcattttagatgatattgaatgcttgtcttgtgacataccactcagtgaaatttattcggtttttaaaacaagatgggaaacaactggtagctttaaaagccttggggactttaaaacttacgggaaggctgacaacactgccttcagagaattaattacggctaaagaaattgagaaaaatgtgcaggaaatgagcaaaggctcggctcccggtccagacgggattactcttggggacgtcgtaaagatggatcccgagttttcccggaccatggagattttcaatttatggttaacaactggtaaaatcccggacatggtgagggggtgcagaaccgttttgattccaaaatcatcaaagccggatcgtttgaaagacattaataactggagacctatcacgatcggttccatcttgctgagactgttctccaggattgtaacagctaggctgagcaaagcgtgccccctgaacccaaggcaaagaggctttatcagagcggcgggatgctctgaaaacttaaaactcctgcaaactataatttggtcggccaaaagagaacacagaccactgggtgttgtattcgtggacatcgccaaggcttttgacaccgtaagccaccagcacatcattcatgctttgcagcaaagagaggtggatccccacatcgtcggtctggtgagcaatatgtacgagaacatcagtacgtatatcaccacaaagaggaacacacacacagacaaaatccagatccgggttggagtaaagcagggtgacccgatgtcgccccttttatttaacctggcaatggaccctctattatgcaagctggaagagagtggcaaaggataccaccgaggacagagcagcatcacagcgatggcatttgcagacgatctggttttgctgagcgactcctgggaaaatatgaatacaaatattagcatactggagaccttctgcaatctgaccggactcaaaacacaggggcaaaagtgccacggcttttacatcaagccgacaaagaagtcttacaccatcaatgactgcgctgcctggactatcaacggcacacccctgaacatgatcgaccccggcgaatctgagaaatacctcggcctgcagtttgacccgtggattggaatagcaaggtccggtctctccacaaaactagatttttggcttcagcggatcgatcaagcaccacttaaacctctgcagaaaactgatattctcaaaacatacaccatccctcggctgatctacatagctgaccactcagaagtgaaaagcgcactactcgaaacccttgaccagaagatccggacagcggtcaaggaatggcttcacctacctccgtgcacctgcgatgccatcctgtactcgagcacgagagacggcggtttgggcatcaccaaattggcaggactgatccccagcgtgcaggcccgtagactgcatcggatcgcacagtcatctgacgatacgatgaaatgcttcatggaaaaagagaaaatggaacagctgcataagaaattgtggattcaagctggaggggacagagagaacataccctcgatttgggaagcaccaccgtcgagtgaaccaccaaacaacgtgagcacaaattcggaatgggaagcaccgacccagaaagataaatttccaaagccttgcaattggaggaaaaacgaattcaaaaaatggaccaaattggcatcccaaggccgcggaattgtaaattttgaaagagacaaaattagtaaccattggatccaatactacagacgcatacctcacaggaaactcctcactgcactacaactcagggccaacgtttaccccacgagagaatttctagccaggggtagacaagaccaatacatcaaggcgtgtaggcactgcgatgcggacaacgaatcctgcgcccacatcatcggcaactgcccagtgacacaggacgcccgaatcaagaggcacaattacatctgcgaactgcttctcgaggaggcgaagaagaaggactgggtagtgttcaaggaaccgcacataagggattccaacaaggaactgtacaaacctgacctgatatttgtgaaggatgggcgtgcacttgtcgtggatgtgacaatccggtatgaagcagccaaatcatcgctggaggaagccgctgcagagaaagtgagaaagtacaaacacctggaaacggaagtaagacatctcacgaatgcaaaggacgttacttttgtgggctttcccctaggagcgcgggggaaatggcaccaagataactttaaacttttgactgagcttggcctctccaaatcgaggcaagtgaaaatggcagagactttttccacagtagcgctcttttcatctgtggacattgtacatatgtttgccagtagggccagaaaatctatggttatgtgataataggctgccttctgcggggcttgccttctggccatgcccttcttctctcccttgcacctgtacctcttggtctttgaataaagcctgagtaggaaggaccggtaaaaaaaaaaaaaaaaaaaaaaaaaaaaaaacgttgactaaaaaaaaaaaaaaaaaaaaaaaaaaaaaaaaaaaaaaaaaaaaaaaaaaaaaaaaaaaaaaaaaaaaaa

SEQ ID NO: 10955 - DNA, 5264 bp, synthetic construct
  source 1..5264: mol_type = other DNA
gaaataagagagaaaagaagagtaagaagaaatataagagaattcgccaccatggcccctaagaaaaagcggaaggtgaatatcagcggctctagctgcggcagccccaacagcgccgacaccagcagcgacttcaaggacctgtggaccaagctgaaggaatgccacgaccgggaagtgcagggactccaggtgaaggtcaccaaactcaagcaagaaagaatcctggacgcccagagactggaagaattcttcaccaagaaccagcagctgagagagcagcagaaagtgctgcacgagacaatcaaggttctggaagatagactgcgggccggcctgtgcgacagatgcgccgtgaccgaggaacacatgcgcaaaaagcagcaggagttcgagaacattagacagcaaaatctgaaattgatcacagagctgatgaacgagagaaacacactgcaggaggagaacaagaagctgagcgagcagctgcaacagaagatcgagaatgatcagcaacaccaggccgctgagctggaatgtgaagaggacgtgatccccgacagcccaatcacagctttcagcttttctggcgtgaacagactgaggcggaaggaaaacccccacgtgcggtacatcgagcagacccataccaagctggaacacagcgtgtgtgccaacgagatgagaaaggtgtccaagtcctccacccatccccagcacaaccctaacgaaaatgagatcctggtggctgatacctacgaccagtctcagagccctatggccaaggcccacggcaccagctcttatacccctgataagagctccttcaacctggccaccgtggtggccgagacactgggcctgggcgtgcaggaggaaagcgagacacagggcccaatgagccctctgggagatgagctgtaccactgcctggaaggcaaccacaagaaacagccttttgagtccggctccgagactcctggaacaagcgagagcgctacacctgagggcagccctaagagaaaggtgtccagcgccgagggcgctgccaaggaagagcctaaacggagaagcgccagactgagcgccaagccccccgccaaggtggaagccaagcctaagaaggccgccgctaaggacaagagcagcgataagaaagtccagaccaagggcaagcggggcgccaaaggcaaacaggccgaggtggccaaccaggagacaaaggaagatctgcctgctgagaacggcgaaaccaagaccgaggaatctccagcttctgacgaggccggagagaaggaggccaaaagcgacagcggctctgagacacctggaacaagcgagagcgccaccccggaatcctatgaacaacttgcaccacaaccgtgtgtgggagaaactttacattctagcctcccacgagacagtgaactgtttgtgcctgaagaggggagcagcgagaaggagagcgaggacgcgccaaaaacatctcctccgacgcctgggaaacatggtttggaacagactggggaggaaaaagtgatggtgactgttcctgacaaaaatccaccttgtccttgctgtggtacccgggtaaactctgtgttgaatctgattgaacatctgaaagtgtcacacgggaaaaggggggtttgttttcggtgtgcaaaatgtggaaaggaaaatagtaactatcacagtgttgtttgtcattttaagaaatgcaggggtccagagacggagaaagccccagctggggagtggatttgtgaggtatgcaacagagattttacaaccaaaattggcctgggacaacacaagagattggcacacccagcagtgagaaatcaggaaaggatcgttgcttcccaaccgaaagaaacatcaaatagaggtgctcacaaaaggtgctggacaaaggaggaggaagaattactaataagactggaggctcagttcgagggaaacaaaaatattaataagcttattgcagaacacataaccaccaaaacagctaagcagatcagtgacaaaaggcgattgctgtccagaaagccagcagaggagccacgtgaggagcctggaacgtgtcatcacaccaggagagcagctgcgagcctgagaacggagcctgagatgagtcatcacgcccaggcagaggacagagataatggacctgggagacgccctctgccaggcagggcagctgccggagggagaacaatggacgagataagacgccaccctgataagggcaacggacagcagagacccaccaagcaaaaatcagaagaacagctgcaggcttactataaaaagacactagaggaacgactttcagctggggcacttaacaccttcccccgagcattcaagcaggtaatggaaggccgggatataaagctagtaatcaatcagacagcgcaggactgcttcggatgcctggaatccataagccaaataagaacggcaacccgagataaaaaggacacggtgacccgggagaaacacccaaagaaaccttttcagaagtggatgaagaagagagcaatcaaaaaaggtaattatcttcggttccagcgtttattttatcttgatagagggaaactggctaaaatcattttagatgatattgaatgcttgtcttgtgacataccactcagtgaaatttattcggtttttaaaacaagatgggaaacaactggtagctttaaaagccttggggactttaaaacttacgggaaggctgacaacactgccttcagagaattaattacggctaaagaaattgagaaaaatgtgcaggaaatgagcaaaggctcggctcccggtccagacgggattactcttggggacgtcgtaaagatggatcccgagttttcccggaccatggagattttcaatttatggttaacaactggtaaaatcccggacatggtgagggggtgcagaaccgttttgattccaaaatcatcaaagccggatcgtttgaaagacattaataactggagacctatcacgatcggttccatcttgctgagactgttctccaggattgtaacagctaggctgagcaaagcgtgccccctgaacccaaggcaaagaggctttatcagagcggcgggatgctctgaaaacttaaaactcctgcaaactataatttggtcggccaaaagagaacacagaccactgggtgttgtattcgtggacatcgccaaggcttttgacaccgtaagccaccagcacatcattcatgctttgcagcaaagagaggtggatccccacatcgtcggtctggtgagcaatatgtacgagaacatcagtacgtatatcaccacaaagaggaacacacacacagacaaaatccagatccgggttggagtaaagcagggtgacccgatgtcgccccttttatttaacctggcaatggaccctctattatgcaagctggaagagagtggcaaaggataccaccgaggacagagcagcatcacagcgatggcatttgcagacgatctggttttgctgagcgactcctgggaaaatatgaatacaaatattagcatactggagaccttctgcaatctgaccggactcaaaacacaggggcaaaagtgccacggcttttacatcaagccgacaaagaagtcttacaccatcaatgactgcgctgcctggactatcaacggcacacccctgaacatgatcgaccccggcgaatctgagaaatacctcggcctgcagtttgacccgtggattggaatagcaaggtccggtctctccacaaaactagatttttggcttcagcggatcgatcaagcaccacttaaacctctgcagaaaactgatattctcaaaacatacaccatccctcggctgatctacatagctgaccactcagaagtgaaaagcgcactactcgaaacccttgaccagaagatccggacagcggtcaaggaatggcttcacctacctccgtgcacctgcgatgccatcctgtactcgagcacgagagacggcggtttgggcatcaccaaattggcaggactgatccccagcgtgcaggcccgtagactgcatcggatcgcacagtcatctgacgatacgatgaaatgcttcatggaaaaagagaaaatggaacagctgcataagaaattgtggattcaagctggaggggacagagagaacataccctcgatttgggaagcaccaccgtcgagtgaaccaccaaacaacgtgagcacaaattcggaatgggaagcaccgacccagaaagataaatttccaaagccttgcaattggaggaaaaacgaattcaaaaaatggaccaaattggcatcccaaggccgcggaattgtaaattttgaaagagacaaaattagtaaccattggatccaatactacagacgcatacctcacaggaaactcctcactgcactacaactcagggccaacgtttaccccacgagagaatttctagccaggggtagacaagaccaatacatcaaggcgtgtaggcactgcgatgcggacaacgaatcctgcgcccacatcatcggcaactgcccagtgacacaggacgcccgaatcaagaggcacaattacatctgcgaactgcttctcgaggaggcgaagaagaaggactgggtagtgttcaaggaaccgcacataagggattccaacaaggaactgtacaaacctgacctgatatttgtgaaggatgggcgtgcacttgtcgtggatgtgacagtacggtatgaagcagccaaatcatcgctggaggaagccgctgcagagaaagtgagaaagtacaaacccctggaaacggaagtaagacatctcacgaatgcaaaggacgttacttttgtgggctttcccctaggagcgcgggggaaatggcaccaagataactttaaacttttgactgagcttggcctctccaaatcgaggcaagtgaaaatggcagagactttttccacagtagcgctcttttcatctgtggacattgtacatatgtttgccagtagggccagaaaatctatggttatgtgataataggctgccttctgcggggcttgccttctggccatgcccttcttctctcccttgcacctgtacctcttggtctttgaataaagcctgagtaggaaggaccggtaaaaaaaaaaaaaaaaaaaaaaaaaaaaaaacgttgactaaaaaaaaaaaaaaaaaaaaaaaaaaaaaaaaaaaaaaaaaaaaaaaaaaaaaaaaaaaaaaaaaaaaaa

SEQ ID NO: 10956 - DNA, 5264 bp, synthetic construct
  source 1..5264: mol_type = other DNA
gaaataagagagaaaagaagagtaagaagaaatataagagaattcgccaccatggcccctaagaaaaagcggaaggtgaatatcagcggctctagctgcggcagccccaacagcgccgacaccagcagcgacttcaaggacctgtggaccaagctgaaggaatgccacgaccgggaagtgcagggactccaggtgaaggtcaccaaactcaagcaagaaagaatcctggacgcccagagactggaagaattcttcaccaagaaccagcagctgagagagcagcagaaagtgctgcacgagacaatcaaggttctggaagatagactgcgggccggcctgtgcgacagatgcgccgtgaccgaggaacacatgcgcaaaaagcagcaggagttcgagaacattagacagcaaaatctgaaattgatcacagagctgatgaacgagagaaacacactgcaggaggagaacaagaagctgagcgagcagctgcaacagaagatcgagaatgatcagcaacaccaggccgctgagctggaatgtgaagaggacgtgatccccgacagcccaatcacagctttcagcttttctggcgtgaacagactgaggcggaaggaaaacccccacgtgcggtacatcgagcagacccataccaagctggaacacagcgtgtgtgccaacgagatgagaaaggtgtccaagtcctccacccatccccagcacaaccctaacgaaaatgagatcctggtggctgatacctacgaccagtctcagagccctatggccaaggcccacggcaccagctcttatacccctgataagagctccttcaacctggccaccgtggtggccgagacactgggcctgggcgtgcaggaggaaagcgagacacagggcccaatgagccctctgggagatgagctgtaccactgcctggaaggcaaccacaagaaacagccttttgagtccggctccgagactcctggaacaagcgagagcgctacacctgagggcagccctaagagaaaggtgtccagcgccgagggcgctgccaaggaagagcctaaacggagaagcgccagactgagcgccaagccccccgccaaggtggaagccaagcctaagaaggccgccgctaaggacaagagcagcgataagaaagtccagaccaagggcaagcggggcgccaaaggcaaacaggccgaggtggccaaccaggagacaaaggaagatctgcctgctgagaacggcgaaaccaagaccgaggaatctccagcttctgacgaggccggagagaaggaggccaaaagcgacagcggctctgagacacctggaacaagcgagagcgccaccccggaatcctatgaacaacttgcaccacaaccgtgtgtgggagaaactttacattctagcctcccacgagacagtgaactgtttgtgcctgaagaggggagcagcgagaaggagagcgaggacgcgccaaaaacatctcctccgacgcctgggaaacatggtttggaacagactggggaggaaaaagtgatggtgactgttcctgacaaaaatccaccttgtccttgctgtggtacccgggtaaactctgtgttgaatctgattgaacatctgaaagtgtcacacgggaaaaggggggtttgttttcggtgtgcaaaatgtggaaaggaaaatagtaactatcacagtgttgtttgtcattttaagaaatgcaggggtccagagacggagaaagccccagctggggagtggatttgtgaggtatgcaacagagattttacaaccaaaattggcctgggacaacacaagagattggcacacccagcagtgagaaatcaggaaaggatcgttgcttcccaaccgaaagaaacatcaaatagaggtgctcacaaaaggtgctggacaaaggaggaggaagaattactaataagactggaggctcagttcgagggaaacaaaaatattaataagcttattgcagaacacataaccaccaaaacagctaagcagatcagtgacaaaaggcgattgctgtccagaaagccagcagaggagccacgtgaggagcctggaacgtgtcatcacaccaggagagcagctgcgagcctgagaacggagcctgagatgagtcatcacgcccaggcagaggacagagataatggacctgggagacgccctctgccaggcagggcagctgccggagggagaacaatggacgagataagacgccaccctgataagggcaacggacagcagagacccaccaagcaaaaatcagaagaacagctgcaggcttactataaaaagacactagaggaacgactttcagctggggcacttaacaccttcccccgagcattcaagcaggtaatggaaggccgggatataaagctagtaatcaatcagacagcgcaggactgcttcggatgcctggaatccataagccaaataagaacggcaacccgagataaaaaggacacggtgacccgggagaaacacccaaagaaaccttttcagaagtggatgaagaagagagcaatcaaaaaaggtaattatcttcggttccagcgtttattttatcttgatagagggaaactggctaaaatcattttagatgatattgaatgcttgtcttgtgacataccactcagtgaaatttattcggtttttaaaacaagatgggaaacaactggtagctttaaaagccttggggactttaaaacttacgggaaggctgacaacactgccttcagagaattaattacggctaaagaaattgagaaaaatgtgcaggaaatgagcaaaggctcggctcccggtccagacgggattactcttggggacgtcgtaaagatggatcccgagttttcccggaccatggagattttcaatttatggttaacaactggtaaaatcccggacatggtgagggggtgcagaaccgttttgattccaaaatcatcaaagccggatcgtttgaaagacattaataactggagacctatcacgatcggttccatcttgctgagactgttctccaggattgtaacagctaggctgagcaaagcgtgccccctgaacccaaggcaaagaggctttatcagagcggcgggatgctctgaaaacttaaaactcctgcaaactataatttggtcggccaaaagagaacacagaccactgggtgttgtattcgtggacatcgccaaggcttttgacaccgtaagccaccagcacatcattcatgctttgcagcaaagagaggtggatccccacatcgtcggtctggtgagcaatatgtacgagaacatcagtacgtatatcaccacaaagaggaacacacacacagacaaaatccagatccgggttggagtaaagcagggtgacccgatgtcgccccttttatttaacctggcaatggaccctctattatgcaagctggaagagagtggcaaaggataccaccgaggacagagcagcatcacagcgatggcatttgcagacgatctggttttgctgagcgactcctgggaaaatatgaatacaaatattagcatactggagaccttctgcaatctgaccggactcaaaacacaggggcaaaagtgccacggcttttacatcaagccgacaaagaagtcttacaccatcaatgactgcgctgcctggactatcaacggcacacccctgaacatgatcgaccccggcgaatctgagaaatacctcggcctgcagtttgacccgtggattggaatagcaaggtccggtctctccacaaaactagatttttggcttcagcggatcgatcaagcaccacttaaacctctgcagaaaactgatattctcaaaacatacaccatccctcggctgatctacatagctgaccactcagaagtgaaaagcgcactactcgaaacccttgaccagaagatccggacagcggtcaaggaatggcttcacctacctccgtgcacctgcgatgccatcctgtactcgagcacgagagacggcggtttgggcatcaccaaattggcaggactgatccccagcgtgcaggcccgtagactgcatcggatcgcacagtcatctgacgatacgatgaaatgcttcatggaaaaagagaaaatggaacagctgcataagaaattgtggattcaagctggaggggacagagagaacataccctcgatttgggaagcaccaccgtcgagtgaaccaccaaacaacgtgagcacaaattcggaatgggaagcaccgacccagaaagataaatttccaaagccttgcaattggaggaaaaacgaattcaaaaaatggaccaaattggcatcccaaggccgcggaattgtaaattttgaaagagacaaaattagtaaccattggatccaatactacagacgcatacctcacaggaaactcctcactgcactacaactcagggccaacgtttaccccacgagagaatttctagccaggggtagacaagaccaatacatcaaggcgtgtaggcactgcgatgcggacaacgaatcctgcgcccacatcatcggcaactgcccagtgacacaggacgcccgaatcaagaggcacaattacatctgcgaactgcttctcgaggaggcgaagaagaaggactgggtagtgttcaaggaaccgcacataagggattccaacaaggaactgtacaaacctgacctgatatttgtgaaggatgggcgtgcacttgtcgtggatgtgacagtacggtatgaagcagccaaatcatcgctggaggaagccgctgcagagaaagtgagaaagtacaaacacctggaaacggaaatcagacatctcacgaatgcaaaggacgttacttttgtgggctttcccctaggagcgcgggggaaatggcaccaagataactttaaacttttgactgagcttggcctctccaaatcgaggcaagtgaaaatggcagagactttttccacagtagcgctcttttcatctgtggacattgtacatatgtttgccagtagggccagaaaatctatggttatgtgataataggctgccttctgcggggcttgccttctggccatgcccttcttctctcccttgcacctgtacctcttggtctttgaataaagcctgagtaggaaggaccggtaaaaaaaaaaaaaaaaaaaaaaaaaaaaaaacgttgactaaaaaaaaaaaaaaaaaaaaaaaaaaaaaaaaaaaaaaaaaaaaaaaaaaaaaaaaaaaaaaaaaaaaaa

SEQ ID NO: 10957 - DNA, 5264 bp, synthetic construct
  source 1..5264: mol_type = other DNA
gaaataagagagaaaagaagagtaagaagaaatataagagaattcgccaccatggcccctaagaaaaagcggaaggtgaatatcagcggctctagctgcggcagccccaacagcgccgacaccagcagcgacttcaaggacctgtggaccaagctgaaggaatgccacgaccgggaagtgcagggactccaggtgaaggtcaccaaactcaagcaagaaagaatcctggacgcccagagactggaagaattcttcaccaagaaccagcagctgagagagcagcagaaagtgctgcacgagacaatcaaggttctggaagatagactgcgggccggcctgtgcgacagatgcgccgtgaccgaggaacacatgcgcaaaaagcagcaggagttcgagaacattagacagcaaaatctgaaattgatcacagagctgatgaacgagagaaacacactgcaggaggagaacaagaagctgagcgagcagctgcaacagaagatcgagaatgatcagcaacaccaggccgctgagctggaatgtgaagaggacgtgatccccgacagcccaatcacagctttcagcttttctggcgtgaacagactgaggcggaaggaaaacccccacgtgcggtacatcgagcagacccataccaagctggaacacagcgtgtgtgccaacgagatgagaaaggtgtccaagtcctccacccatccccagcacaaccctaacgaaaatgagatcctggtggctgatacctacgaccagtctcagagccctatggccaaggcccacggcaccagctcttatacccctgataagagctccttcaacctggccaccgtggtggccgagacactgggcctgggcgtgcaggaggaaagcgagacacagggcccaatgagccctctgggagatgagctgtaccactgcctggaaggcaaccacaagaaacagccttttgagtccggctccgagactcctggaacaagcgagagcgctacacctgagggcagccctaagagaaaggtgtccagcgccgagggcgctgccaaggaagagcctaaacggagaagcgccagactgagcgccaagccccccgccaaggtggaagccaagcctaagaaggccgccgctaaggacaagagcagcgataagaaagtccagaccaagggcaagcggggcgccaaaggcaaacaggccgaggtggccaaccaggagacaaaggaagatctgcctgctgagaacggcgaaaccaagaccgaggaatctccagcttctgacgaggccggagagaaggaggccaaaagcgacagcggctctgagacacctggaacaagcgagagcgccaccccggaatcctatgaacaacttgcaccacaaccgtgtgtgggagaaactttacattctagcctcccacgagacagtgaactgtttgtgcctgaagaggggagcagcgagaaggagagcgaggacgcgccaaaaacatctcctccgacgcctgggaaacatggtttggaacagactggggaggaaaaagtgatggtgactgttcctgacaaaaatccaccttgtccttgctgtggtacccgggtaaactctgtgttgaatctgattgaacatctgaaagtgtcacacgggaaaaggggggtttgttttcggtgtgcaaaatgtggaaaggaaaatagtaactatcacagtgttgtttgtcattttaagaaatgcaggggtccagagacggagaaagccccagctggggagtggatttgtgaggtatgcaacagagattttacaaccaaaattggcctgggacaacacaagagattggcacacccagcagtgagaaatcaggaaaggatcgttgcttcccaaccgaaagaaacatcaaatagaggtgctcacaaaaggtgctggacaaaggaggaggaagaattactaataagactggaggctcagttcgagggaaacaaaaatattaataagcttattgcagaacacataaccaccaaaacagctaagcagatcagtgacaaaaggcgattgctgtccagaaagccagcagaggagccacgtgaggagcctggaacgtgtcatcacaccaggagagcagctgcgagcctgagaacggagcctgagatgagtcatcacgcccaggcagaggacagagataatggacctgggagacgccctctgccaggcagggcagctgccggagggagaacaatggacgagataagacgccaccctgataagggcaacggacagcagagacccaccaagcaaaaatcagaagaacagctgcaggcttactataaaaagacactagaggaacgactttcagctggggcacttaacaccttcccccgagcattcaagcaggtaatggaaggccgggatataaagctagtaatcaatcagacagcgcaggactgcttcggatgcctggaatccataagccaaataagaacggcaacccgagataaaaaggacacggtgacccgggagaaacacccaaagaaaccttttcagaagtggatgaagaagagagcaatcaaaaaaggtaattatcttcggttccagcgtttattttatcttgatagagggaaactggctaaaatcattttagatgatattgaatgcttgtcttgtgacataccactcagtgaaatttattcggtttttaaaacaagatgggaaacaactggtagctttaaaagccttggggactttaaaacttacgggaaggctgacaacactgccttcagagaattaattacggctaaagaaattgagaaaaatgtgcaggaaatgagcaaaggctcggctcccggtccagacgggattactcttggggacgtcgtaaagatggatcccgagttttcccggaccatggagattttcaatttatggttaacaactggtaaaatcccggacatggtgagggggtgcagaaccgttttgattccaaaatcatcaaagccggatcgtttgaaagacattaataactggagacctatcacgatcggttccatcttgctgagactgttctccaggattgtaacagctaggctgagcaaagcgtgccccctgaacccaaggcaaagaggctttatcagagcggcgggatgctctgaaaacttaaaactcctgcaaactataatttggtcggccaaaagagaacacagaccactgggtgttgtattcgtggacatcgccaaggcttttgacaccgtaagccaccagcacatcattcatgctttgcagcaaagagaggtggatccccacatcgtcggtctggtgagcaatatgtacgagaacatcagtacgtatatcaccacaaagaggaacacacacacagacaaaatccagatccgggttggagtaaagcagggtgacccgatgtcgccccttttatttaacctggcaatggaccctctattatgcaagctggaagagagtggcaaaggataccaccgaggacagagcagcatcacagcgatggcatttgcagacgatctggttttgctgagcgactcctgggaaaatatgaatacaaatattagcatactggagaccttctgcaatctgaccggactcaaaacacaggggcaaaagtgccacggcttttacatcaagccgacaaagaagtcttacaccatcaatgactgcgctgcctggactatcaacggcacacccctgaacatgatcgaccccggcgaatctgagaaatacctcggcctgcagtttgacccgtggattggaatagcaaggtccggtctctccacaaaactagatttttggcttcagcggatcgatcaagcaccacttaaacctctgcagaaaactgatattctcaaaacatacaccatccctcggctgatctacatagctgaccactcagaagtgaaaagcgcactactcgaaacccttgaccagaagatccggacagcggtcaaggaatggcttcacctacctccgtgcacctgcgatgccatcctgtactcgagcacgagagacggcggtttgggcatcaccaaattggcaggactgatccccagcgtgcaggcccgtagactgcatcggatcgcacagtcatctgacgatacgatgaaatgcttcatggaaaaagagaaaatggaacagctgcataagaaattgtggattcaagctggaggggacagagagaacataccctcgatttgggaagcaccaccgtcgagtgaaccaccaaacaacgtgagcacaaattcggaatgggaagcaccgacccagaaagataaatttccaaagccttgcaattggaggaaaaacgaattcaaaaaatggaccaaattggcatcccaaggccgcggaattgtaaattttgaaagagacaaaattagtaaccattggatccaatactacagacgcatacctcacaggaaactcctcactgcactacaactcagggccaacgtttaccccacgagagaatttctagccaggggtagacaagaccaatacatcaaggcgtgtaggcactgcgatgcggacaacgaatcctgcgcccacatcatcggcaactgcccagtgacacaggacgcccgaatcaagaggcacaattacatctgcgaactgcttctcgaggaggcgaagaagaaggactgggtagtgttcaaggaaccgcacataagggattccaacaaggaactgtacaaacctgacctgatatttgtgaaggatgggcgtgcacttgtcgtggatgtgacagtacggtatgaagcagccaaatcatcgctggaggaagccgctgcagagaaagtgagaaagtacaaacacctggaaacggaagtaagacatctcacgaatgcaaaggacgttacttttgtgggctttcccctaggagcgcgggggaaatggcaccaagataactttaaacttttgactgagcttggcctctccagatcgaggcaagtgaaaatggcagagactttttccacagtagcgctcttttcatctgtggacattgtacatatgtttgccagtagggccagaaaatctatggttatgtgataataggctgccttctgcggggcttgccttctggccatgcccttcttctctcccttgcacctgtacctcttggtctttgaataaagcctgagtaggaaggaccggtaaaaaaaaaaaaaaaaaaaaaaaaaaaaaaacgttgactaaaaaaaaaaaaaaaaaaaaaaaaaaaaaaaaaaaaaaaaaaaaaaaaaaaaaaaaaaaaaaaaaaaaaa

SEQ ID NO: 10958 - DNA, 5264 bp, synthetic construct; identical to SEQ ID NO: 10746
  source 1..5264: mol_type = other DNA

SEQ ID NO: 10959 - DNA, 5264 bp, synthetic construct
  source 1..5264: mol_type = other DNA
gaaataagagagaaaagaagagtaagaagaaatataagagaattcgccaccatggcccctaagaaaaagcggaaggtgaatatcagcggctctagctgcggcagccccaacagcgccgacaccagcagcgacttcaaggacctgtggaccaagctgaaggaatgccacgaccgggaagtgcagggactccaggtgaaggtcaccaaactcaagcaagaaagaatcctggacgcccagagactggaagaattcttcaccaagaaccagcagctgagagagcagcagaaagtgctgcacgagacaatcaaggttctggaagatagactgcgggccggcctgtgcgacagatgcgccgtgaccgaggaacacatgcgcaaaaagcagcaggagttcgagaacattagacagcaaaatctgaaattgatcacagagctgatgaacgagagaaacacactgcaggaggagaacaagaagctgagcgagcagctgcaacagaagatcgagaatgatcagcaacaccaggccgctgagctggaatgtgaagaggacgtgatccccgacagcccaatcacagctttcagcttttctggcgtgaacagactgaggcggaaggaaaacccccacgtgcggtacatcgagcagacccataccaagctggaacacagcgtgtgtgccaacgagatgagaaaggtgtccaagtcctccacccatccccagcacaaccctaacgaaaatgagatcctggtggctgatacctacgaccagtctcagagccctatggccaaggcccacggcaccagctcttatacccctgataagagctccttcaacctggccaccgtggtggccgagacactgggcctgggcgtgcaggaggaaagcgagacacagggcccaatgagccctctgggagatgagctgtaccactgcctggaaggcaaccacaagaaacagccttttgagtccggctccgagactcctggaacaagcgagagcgctacacctgagggcagccctaagagaaaggtgtccagcgccgagggcgctgccaaggaagagcctaaacggagaagcgccagactgagcgccaagccccccgccaaggtggaagccaagcctaagaaggccgccgctaaggacaagagcagcgataagaaagtccagaccaagggcaagcggggcgccaaaggcaaacaggccgaggtggccaaccaggagacaaaggaagatctgcctgctgagaacggcgaaaccaagaccgaggaatctccagcttctgacgaggccggagagaaggaggccaaaagcgacagcggctctgagacacctggaacaagcgagagcgccaccccggaatcctatgaacaacttgcaccacaaccgtgtgtgggagaaactttacattctagcctcccacgagacagtgaactgtttgtgcctgaagaggggagcagcgagaaggagagcgaggacgcgccaaaaacatctcctccgacgcctgggaaacatggtttggaacagactggggaggaaaaagtgatggtgactgttcctgacaaaaatccaccttgtccttgctgtggtacccgggtaaactctgtgttgaatctgattgaacatctgaaagtgtcacacgggaaaaggggggtttgttttcggtgtgcaaaatgtggaaaggaaaatagtaactatcacagtgttgtttgtcattttaagaaatgcaggggtccagagacggagaaagccccagctggggagtggatttgtgaggtatgcaacagagattttacaaccaaaattggcctgggacaacacaagagattggcacacccagcagtgagaaatcaggaaaggatcgttgcttcccaaccgaaagaaacatcaaatagaggtgctcacaaaaggtgctggacaaaggaggaggaagaattactaataagactggaggctcagttcgagggaaacaaaaatattaataagcttattgcagaacacataaccaccaaaacagctaagcagatcagtgacaaaaggcgattgctgtccagaaagccagcagaggagccacgtgaggagcctggaacgtgtcatcacaccaggagagcagctgcgagcctgagaacggagcctgagatgagtcatcacgcccaggcagaggacagagataatggacctgggagacgccctctgccaggcagggcagctgccggagggagaacaatggacgagataagacgccaccctgataagggcaacggacagcagagacccaccaagcaaaaatcagaagaacagctgcaggcttactataaaaagacactagaggaacgactttcagctggggcacttaacaccttcccccgagcattcaagcaggtaatggaaggccgggatataaagctagtaatcaatcagacagcgcaggactgcttcggatgcctggaatccataagccaaataagaacggcaacccgagataaaaaggacacggtgacccgggagaaacacccaaagaaaccttttcagaagtggatgaagaagagagcaatcaaaaaaggtaattatcttcggttccagcgtttattttatcttgatagagggaaactggctaaaatcattttagatgatattgaatgcttgtcttgtgacataccactcagtgaaatttattcggtttttaaaacaagatgggaaacaactggtagctttaaaagccttggggactttaaaacttacgggaaggctgacaacactgccttcagagaattaattacggctaaagaaattgagaaaaatgtgcaggaaatgagcaaaggctcggctcccggtccagacgggattactcttggggacgtcgtaaagatggatcccgagttttcccggaccatggagattttcaatttatggttaacaactggtaaaatcccggacatggtgagggggtgcagaaccgttttgattccaaaatcatcaaagccggatcgtttgaaagacattaataactggagacctatcacgatcggttccatcttgctgagactgttctccaggattgtaacagctaggctgagcaaagcgtgccccctgaacccaaggcaaagaggctttatcagagcggcgggatgctctgaaaacttaaaactcctgcaaactataatttggtcggccaaaagagaacacagaccactgggtgttgtattcgtggacatcgccaaggcttttgacaccgtaagccaccagcacatcattcatgctttgcagcaaagagaggtggatccccacatcgtcggtctggtgagcaatatgtacgagaacatcagtacgtatatcaccacaaagaggaacacacacacagacaaaatccagatccgggttggagtaaagcagggtgacccgatgtcgccccttttatttaacctggcaatggaccctctattatgcaagctggaagagagtggcaaaggataccaccgaggacagagcagcatcacagcgatggcatttgcagacgatctggttttgctgagcgactcctgggaaaatatgaatacaaatattagcatactggagaccttctgcaatctgaccggactcaaaacacaggggcaaaagtgccacggcttttacatcaagccgacaaagaagtcttacaccatcaatgactgcgctgcctggactatcaacggcacacccctgaacatgatcgaccccggcgaatctgagaaatacctcggcctgcagtttgacccgtggattggaatagcaaggtccggtctctccacaaaactagatttttggcttcagcggatcgatcaagcaccacttaaacctctgcagaaaactgatattctcaaaacatacaccatccctcggctgatctacatagctgaccactcagaagtgaaaagcgcactactcgaaacccttgaccagaagatccggacagcggtcaaggaatggcttcacctacctccgtgcacctgcgatgccatcctgtactcgagcacgagagacggcggtttgggcatcaccaaattggcaggactgatccccagcgtgcaggcccgtagactgcatcggatcgcacagtcatctgacgatacgatgaaatgcttcatggaaaaagagaaaatggaacagctgcataagaaattgtggattcaagctggaggggacagagagaacataccctcgatttgggaagcaccaccgtcgagtgaaccaccaaacaacgtgagcacaaattcggaatgggaagcaccgacccagaaagataaatttccaaagccttgcaattggaggaaaaacgaattcaaaaaatggaccaaattggcatcccaaggccgcggaattgtaaattttgaaagagacaaaattagtaaccattggatccaatactacagacgcatacctcacaggaaactcctcactgcactacaactcagggccaacgtttaccccacgagagaatttctagccaggggtagacaagaccaatacatcaaggcgtgtaggcactgcgatgcggacaacgaatcctgcgcccacatcatcggcaactgcccagtgacacaggacgcccgaatcaagaggcacaattacatctgcgaactgcttctcgaggaggcgaagaagaaggactgggtagtgttcaaggaaccgcacataagggattccaacaaggaactgtacaaacctgacctgatatttgtgaaggatgggcgtgcacttgtcgtggatgtgacagtacggtatgaagcagccaaatcatcgctggaggaagccgctgcagagaaagtgagaaagtacaaacacctggaaacggaagtaagacatctcacgaatgcaaaggacgttacttttgtgggctttcccctaggagcgcgggggaaatggcaccaagataactttaaacttttgactgagcttggcctctccaaatcgaggcaagtgaaaatggcagagactttttccagagtagcgctcttttcatctgtggacattgtacatatgtttgccagtagggccagaaaatctatggttatgtgataataggctgccttctgcggggcttgccttctggccatgcccttcttctctcccttgcacctgtacctcttggtctttgaataaagcctgagtaggaaggaccggtaaaaaaaaaaaaaaaaaaaaaaaaaaaaaaacgttgactaaaaaaaaaaaaaaaaaaaaaaaaaaaaaaaaaaaaaaaaaaaaaaaaaaaaaaaaaaaaaaaaaaaaaa

SEQ ID NO: 10960 - DNA, 5264 bp, synthetic construct
  source 1..5264: mol_type = other DNA
gaaataagagagaaaagaagagtaagaagaaatataagagaattcgccaccatggcccctaagaaaaagcggaaggtgaatatcagcggctctagctgcggcagccccaacagcgccgacaccagcagcgacttcaaggacctgtggaccaagctgaaggaatgccacgaccgggaagtgcagggactccaggtgaaggtcaccaaactcaagcaagaaagaatcctggacgcccagagactggaagaattcttcaccaagaaccagcagctgagagagcagcagaaagtgctgcacgagacaatcaaggttctggaagatagactgcgggccggcctgtgcgacagatgcgccgtgaccgaggaacacatgcgcaaaaagcagcaggagttcgagaacattagacagcaaaatctgaaattgatcacagagctgatgaacgagagaaacacactgcaggaggagaacaagaagctgagcgagcagctgcaacagaagatcgagaatgatcagcaacaccaggccgctgagctggaatgtgaagaggacgtgatccccgacagcccaatcacagctttcagcttttctggcgtgaacagactgaggcggaaggaaaacccccacgtgcggtacatcgagcagacccataccaagctggaacacagcgtgtgtgccaacgagatgagaaaggtgtccaagtcctccacccatccccagcacaaccctaacgaaaatgagatcctggtggctgatacctacgaccagtctcagagccctatggccaaggcccacggcaccagctcttatacccctgataagagctccttcaacctggccaccgtggtggccgagacactgggcctgggcgtgcaggaggaaagcgagacacagggcccaatgagccctctgggagatgagctgtaccactgcctggaaggcaaccacaagaaacagccttttgagtccggctccgagactcctggaacaagcgagagcgctacacctgagggcagccctaagagaaaggtgtccagcgccgagggcgctgccaaggaagagcctaaacggagaagcgccagactgagcgccaagccccccgccaaggtggaagccaagcctaagaaggccgccgctaaggacaagagcagcgataagaaagtccagaccaagggcaagcggggcgccaaaggcaaacaggccgaggtggccaaccaggagacaaaggaagatctgcctgctgagaacggcgaaaccaagaccgaggaatctccagcttctgacgaggccggagagaaggaggccaaaagcgacagcggctctgagacacctggaacaagcgagagcgccaccccggaatcctatgaacaacttgcaccacaaccgtgtgtgggagaaactttacattctagcctcccacgagacagtgaactgtttgtgcctgaagaggggagcagcgagaaggagagcgaggacgcgccaaaaacatctcctccgacgcctgggaaacatggtttggaacagactggggaggaaaaagtgatggtgactgttcctgacaaaaatccaccttgtccttgctgtggtacccgggtaaactctgtgttgaatctgattgaacatctgaaagtgtcacacgggaaaaggggggtttgttttcggtgtgcaaaatgtggaaaggaaaatagtaactatcacagtgttgtttgtcattttaagaaatgcaggggtccagagacggagaaagccccagctggggagtggatttgtgaggtatgcaacagagattttacaaccaaaattggcctgggacaacacaagagattggcacacccagcagtgagaaatcaggaaaggatcgttgcttcccaaccgaaagaaacatcaaatagaggtgctcacaaaaggtgctggacaaaggaggaggaagaattactaataagactggaggctcagttcgagggaaacaaaaatattaataagcttattgcagaacacataaccaccaaaacagctaagcagatcagtgacaaaaggcgattgctgtccagaaagccagcagaggagccacgtgaggagcctggaacgtgtcatcacaccaggagagcagctgcgagcctgagaacggagcctgagatgagtcatcacgcccaggcagaggacagagataatggacctgggagacgccctctgccaggcagggcagctgccggagggagaacaatggacgagataagacgccaccctgataagggcaacggacagcagagacccaccaagcaaaaatcagaagaacagctgcaggcttactataaaaagacactagaggaacgactttcagctggggcacttaacaccttcccccgagcattcaagcaggtaatggaaggccgggatataaagctagtaatcaatcagacagcgcaggactgcttcggatgcctggaatccataagccaaataagaacggcaacccgagataaaaaggacacggtgacccgggagaaacacccaaagaaaccttttcagaagtggatgaagaagagagcaatcaaaaaaggtaattatcttcggttccagcgtttattttatcttgatagagggaaactggctaaaatcattttagatgatattgaatgcttgtcttgtgacataccactcagtgaaatttattcggtttttaaaacaagatgggaaacaactggtagctttaaaagccttggggactttaaaacttacgggaaggctgacaacactgccttcagagaattaattacggctaaagaaattgagaaaaatgtgcaggaaatgagcaaaggctcggctcccggtccagacgggattactcttggggacgtcgtaaagatggatcccgagttttcccggaccatggagattttcaatttatggttaacaactggtaaaatcccggacatggtgagggggtgcagaaccgttttgattccaaaatcatcaaagccggatcgtttgaaagacattaataactggagacctatcacgatcggttccatcttgctgagactgttctccaggattgtaacagctaggctgagcaaagcgtgccccctgaacccaaggcaaagaggctttatcagagcggcgggatgctctgaaaacttaaaactcctgcaaactataatttggtcggccaaaagagaacacagaccactgggtgttgtattcgtggacatcgccaaggcttttgacaccgtaagccaccagcacatcattcatgctttgcagcaaagagaggtggatccccacatcgtcggtctggtgagcaatatgtacgagaacatcagtacgtatatcaccacaaagaggaacacacacacagacaaaatccagatccgggttggagtaaagcagggtgacccgatgtcgccccttttatttaacctggcaatggaccctctattatgcaagctggaagagagtggcaaaggataccaccgaggacagagcagcatcacagcgatggcatttgcagacgatctggttttgctgagcgactcctgggaaaatatgaatacaaatattagcatactggagaccttctgcaatctgaccggactcaaaacacaggggcaaaagtgccacggcttttacatcaagccgacaaagaagtcttacaccatcaatgactgcgctgcctggactatcaacggcacacccctgaacatgatcgaccccggcgaatctgagaaatacctcggcctgcagtttgacccgtggattggaatagcaaggtccggtctctccacaaaactagatttttggcttcagcggatcgatcaagcaccacttaaacctctgcagaaaactgatattctcaaaacatacaccatccctcggctgatctacatagctgaccactcagaagtgaaaagcgcactactcgaaacccttgaccagaagatccggacagcggtcaaggaatggcttcacctacctccgtgcacctgcgatgccatcctgtactcgagcacgagagacggcggtttgggcatcaccaaattggcaggactgatccccagcgtgcaggcccgtagactgcatcggatcgcacagtcatctgacgatacgatgaaatgcttcatggaaaaagagaaaatggaacagctgcataagaaattgtggattcaagctggaggggacagagagaacataccctcgatttgggaagcaccaccgtcgagtgaaccaccaaacaacgtgagcacaaattcggaatgggaagcaccgacccagaaagataaatttccaaagccttgcaattggaggaaaaacgaattcaaaaaatggaccaaattggcatcccaaggccgcggaattgtaaattttgaaagagacaaaattagtaaccattggatccaatactacagacgcatacctcacaggaaactcctcactgcactacaactcagggccaacgtttaccccacgagagaatttctagccaggggtagacaagaccaatacatcaaggcgtgtaggcactgcgatgcggacaacgaatcctgcgcccacatcatcggcaactgcccagtgacacaggacgcccgaatcaagaggcacaattacatctgcgaactgcttctcgaggaggcgaagaagaaggactgggtagtgttcaaggaaccgcacataagggattccaacaaggaactgtacaaacctgacctgatatttgtgaaggatgggcgtgcacttgtcgtggatgtgacagtacggtatgaagcagccaaatcatcgctggaggaagccgctgcagagaaagtgagaaagtacaaacacctggaaacggaagtaagacatctcacgaatgcaaaggacgttacttttgtgggctttcccctaggagcgcgggggaaatggcaccaagataactttaaacttttgactgagcttggcctctccaaatcgaggcaagtgaaaatggcagagactttttccacagtagcgctcttttcatctgtggacattgtaagaatgtttgccagtagggccagaaaatctatggttatgtgataataggctgccttctgcggggcttgccttctggccatgcccttcttctctcccttgcacctgtacctcttggtctttgaataaagcctgagtaggaaggaccggtaaaaaaaaaaaaaaaaaaaaaaaaaaaaaaacgttgactaaaaaaaaaaaaaaaaaaaaaaaaaaaaaaaaaaaaaaaaaaaaaaaaaaaaaaaaaaaaaaaaaaaaaa

SEQ ID NO: 10961 - DNA, 5264 bp, synthetic construct
  source 1..5264: mol_type = other DNA
gaaataagagagaaaagaagagtaagaagaaatataagagaattcgccaccatggcccctaagaaaaagcggaaggtgaatatcagcggctctagctgcggcagccccaacagcgccgacaccagcagcgacttcaaggacctgtggaccaagctgaaggaatgccacgaccgggaagtgcagggactccaggtgaaggtcaccaaactcaagcaagaaagaatcctggacgcccagagactggaagaattcttcaccaagaaccagcagctgagagagcagcagaaagtgctgcacgagacaatcaaggttctggaagatagactgcgggccggcctgtgcgacagatgcgccgtgaccgaggaacacatgcgcaaaaagcagcaggagttcgagaacattagacagcaaaatctgaaattgatcacagagctgatgaacgagagaaacacactgcaggaggagaacaagaagctgagcgagcagctgcaacagaagatcgagaatgatcagcaacaccaggccgctgagctggaatgtgaagaggacgtgatccccgacagcccaatcacagctttcagcttttctggcgtgaacagactgaggcggaaggaaaacccccacgtgcggtacatcgagcagacccataccaagctggaacacagcgtgtgtgccaacgagatgagaaaggtgtccaagtcctccacccatccccagcacaaccctaacgaaaatgagatcctggtggctgatacctacgaccagtctcagagccctatggccaaggcccacggcaccagctcttatacccctgataagagctccttcaacctggccaccgtggtggccgagacactgggcctgggcgtgcaggaggaaagcgagacacagggcccaatgagccctctgggagatgagctgtaccactgcctggaaggcaaccacaagaaacagccttttgagtccggctccgagactcctggaacaagcgagagcgctacacctgagggcagccctaagagaaaggtgtccagcgccgagggcgctgccaaggaagagcctaaacggagaagcgccagactgagcgccaagccccccgccaaggtggaagccaagcctaagaaggccgccgctaaggacaagagcagcgataagaaagtccagaccaagggcaagcggggcgccaaaggcaaacaggccgaggtggccaaccaggagacaaaggaagatctgcctgctgagaacggcgaaaccaagaccgaggaatctccagcttctgacgaggccggagagaaggaggccaaaagcgacagcggctctgagacacctggaacaagcgagagcgccaccccggaatcctatgaacaacttgcaccacaaccgtgtgtgggagaaactttacattctagcctcccacgagacagtgaactgtttgtgcctgaagaggggagcagcgagaaggagagcgaggacgcgccaaaaacatctcctccgacgcctgggaaacatggtttggaacagactggggaggaaaaagtgatggtgactgttcctgacaaaaatccaccttgtccttgctgtggtacccgggtaaactctgtgttgaatctgattgaacatctgaaagtgtcacacgggaaaaggggggtttgttttcggtgtgcaaaatgtggaaaggaaaatagtaactatcacagtgttgtttgtcattttaagaaatgcaggggtccagagacggagaaagccccagctggggagtggatttgtgaggtatgcaacagagattttacaaccaaaattggcctgggacaacacaagagattggcacacccagcagtgagaaatcaggaaaggatcgttgcttcccaaccgaaagaaacatcaaatagaggtgctcacaaaaggtgctggacaaaggaggaggaagaattactaataagactggaggctcagttcgagggaaacaaaaatattaataagcttattgcagaacacataaccaccaaaacagctaagcagatcagtgacaaaaggcgattgctgtccagaaagccagcagaggagccacgtgaggagcctggaacgtgtcatcacaccaggagagcagctgcgagcctgagaacggagcctgagatgagtcatcacgcccaggcagaggacagagataatggacctgggagacgccctctgccaggcagggcagctgccggagggagaacaatggacgagataagacgccaccctgataagggcaacggacagcagagacccaccaagcaaaaatcagaagaacagctgcaggcttactataaaaagacactagaggaacgactttcagctggggcacttaacaccttcccccgagcattcaagcaggtaatggaaggccgggatataaagctagtaatcaatcagacagcgcaggactgcttcggatgcctggaatccataagccaaataagaacggcaacccgagataaaaaggacacggtgacccgggagaaacacccaaagaaaccttttcagaagtggatgaagaagagagcaatcaaaaaaggtaattatcttcggttccagcgtttattttatcttgatagagggaaactggctaaaatcattttagatgatattgaatgcttgtcttgtgacataccactcagtgaaatttattcggtttttaaaacaagatgggaaacaactggtagctttaaaagccttggggactttaaaacttacgggaaggctgacaacactgccttcagagaattaattacggctaaagaaattgagaaaaatgtgcaggaaatgagcaaaggctcggctcccggtccagacgggattactcttggggacgtcgtaaagatggatcccgagttttcccggaccatggagattttcaatttatggttaacaactggtaaaatcccggacatggtgagggggtgcagaaccgttttgattccaaaatcatcaaagccggatcgtttgaaagacattaataactggagacctatcacgatcggttccatcttgctgagactgttctccaggattgtaacagctaggctgagcaaagcgtgccccctgaacccaaggcaaagaggctttatcagagcggcgggatgctctgaaaacttaaaactcctgcaaactataatttggtcggccaaaagagaacacagaccactgggtgttgtattcgtggacatcgccaaggcttttgacaccgtaagccaccagcacatcattcatgctttgcagcaaagagaggtggatccccacatcgtcggtctggtgagcaatatgtacgagaacatcagtacgtatatcaccacaaagaggaacacacacacagacaaaatccagatccgggttggagtaaagcagggtgacccgatgtcgccccttttatttaacctggcaatggaccctctattatgcaagctggaagagagtggcaaaggataccaccgaggacagagcagcatcacagcgatggcatttgcagacgatctggttttgctgagcgactcctgggaaaatatgaatacaaatattagcatactggagaccttctgcaatctgaccggactcaaaacacaggggcaaaagtgccacggcttttacatcaagccgacaaagaagtcttacaccatcaatgactgcgctgcctggactatcaacggcacacccctgaacatgatcgaccccggcgaatctgagaaatacctcggcctgcagtttgacccgtggattggaatagcaaggtccggtctctccacaaaactagatttttggcttcagcggatcgatcaagcaccacttaaacctctgcagaaaactgatattctcaaaacatacaccatccctcggctgatctacatagctgaccactcagaagtgaaaagcgcactactcgaaacccttgaccagaagatccggacagcggtcaaggaatggcttcacctacctccgtgcacctgcgatgccatcctgtactcgagcacgagagacggcggtttgggcatcaccaaattggcaggactgatccccagcgtgcaggcccgtagactgcatcggatcgcacagtcatctgacgatacgatgaaatgcttcatggaaaaagagaaaatggaacagctgcataagaaattgtggattcaagctggaggggacagagagaacataccctcgatttgggaagcaccaccgtcgagtgaaccaccaaacaacgtgagcacaaattcggaatgggaagcaccgacccagaaagataaatttccaaagccttgcaattggaggaaaaacgaattcaaaaaatggaccaaattggcatcccaaggccgcggaattgtaaattttgaaagagacaaaattagtaaccattggatccaatactacagacgcatacctcacaggaaactcctcactgcactacaactcagggccaacgtttaccccacgagagaatttctagccaggggtagacaagaccaatacatcaaggcgtgtaggcactgcgatgcggacaacgaatcctgcgcccacatcatcggcaactgcccagtgacacaggacgcccgaatcaagaggcacaattacatctgcgaactgcttctcgaggaggcgaagaagaaggactgggtagtgttcaaggaaccgcacataagggattccaacaaggaactgtacaaacctgacctgatatttgtgaaggatgggcgtgcacttgtcgtggatgtgacagtacggtatgaagcagccaaatcatcgctggaggaagccgctgcagagaaagtgagaaagtacaaacacctggaaacggaagtaagacatctcacgaatgcaaaggacgttacttttgtgggctttcccctaggagcgcgggggaaatggcaccaagataactttaaacttttgactgagcttggcctctccaaatcgaggcaagtgaaaatggcagagactttttccacagtagcgctcttttcatctgtggacattgtacatatgtacgccagtagggccagaaaatctatggttatgtgataataggctgccttctgcggggcttgccttctggccatgcccttcttctctcccttgcacctgtacctcttggtctttgaataaagcctgagtaggaaggaccggtaaaaaaaaaaaaaaaaaaaaaaaaaaaaaaacgttgactaaaaaaaaaaaaaaaaaaaaaaaaaaaaaaaaaaaaaaaaaaaaaaaaaaaaaaaaaaaaaaaaaaaaaa

SEQ ID NO: 10962 - DNA, 5264 bp, synthetic construct
  source 1..5264: mol_type = other DNA
gaaataagagagaaaagaagagtaagaagaaatataagagaattcgccaccatggcccctaagaaaaagcggaaggtgaatatcagcggctctagctgcggcagccccaacagcgccgacaccagcagcgacttcaaggacctgtggaccaagctgaaggaatgccacgaccgggaagtgcagggactccaggtgaaggtcaccaaactcaagcaagaaagaatcctggacgcccagagactggaagaattcttcaccaagaaccagcagctgagagagcagcagaaagtgctgcacgagacaatcaaggttctggaagatagactgcgggccggcctgtgcgacagatgcgccgtgaccgaggaacacatgcgcaaaaagcagcaggagttcgagaacattagacagcaaaatctgaaattgatcacagagctgatgaacgagagaaacacactgcaggaggagaacaagaagctgagcgagcagctgcaacagaagatcgagaatgatcagcaacaccaggccgctgagctggaatgtgaagaggacgtgatccccgacagcccaatcacagctttcagcttttctggcgtgaacagactgaggcggaaggaaaacccccacgtgcggtacatcgagcagacccataccaagctggaacacagcgtgtgtgccaacgagatgagaaaggtgtccaagtcctccacccatccccagcacaaccctaacgaaaatgagatcctggtggctgatacctacgaccagtctcagagccctatggccaaggcccacggcaccagctcttatacccctgataagagctccttcaacctggccaccgtggtggccgagacactgggcctgggcgtgcaggaggaaagcgagacacagggcccaatgagccctctgggagatgagctgtaccactgcctggaaggcaaccacaagaaacagccttttgagtccggctccgagactcctggaacaagcgagagcgctacacctgagggcagccctaagagaaaggtgtccagcgccgagggcgctgccaaggaagagcctaaacggagaagcgccagactgagcgccaagccccccgccaaggtggaagccaagcctaagaaggccgccgctaaggacaagagcagcgataagaaagtccagaccaagggcaagcggggcgccaaaggcaaacaggccgaggtggccaaccaggagacaaaggaagatctgcctgctgagaacggcgaaaccaagaccgaggaatctccagcttctgacgaggccggagagaaggaggccaaaagcgacagcggctctgagacacctggaacaagcgagagcgccaccccggaatcctatgaacaacttgcaccacaaccgtgtgtgggagaaactttacattctagcctcccacgagacagtgaactgtttgtgcctgaagaggggagcagcgagaaggagagcgaggacgcgccaaaaacatctcctccgacgcctgggaaacatggtttggaacagactggggaggaaaaagtgatggtgactgttcctgacaaaaatccaccttgtccttgctgtggtacccgggtaaactctgtgttgaatctgattgaacatctgaaagtgtcacacgggaaaaggggggtttgttttcggtgtgcaaaatgtggaaaggaaaatagtaactatcacagtgttgtttgtcattttaagaaatgcaggggtccagagacggagaaagccccagctggggagtggatttgtgaggtatgcaacagagattttacaaccaaaattggcctgggacaacacaagagattggcacacccagcagtgagaaatcaggaaaggatcgttgcttcccaaccgaaagaaacatcaaatagaggtgctcacaaaaggtgctggacaaaggaggaggaagaattactaataagactggaggctcagttcgagggaaacaaaaatattaataagcttattgcagaacacataaccaccaaaacagctaagcagatcagtgacaaaaggcgattgctgtccagaaagccagcagaggagccacgtgaggagcctggaacgtgtcatcacaccaggagagcagctgcgagcctgagaacggagcctgagatgagtcatcacgcccaggcagaggacagagataatggacctgggagacgccctctgccaggcagggcagctgccggagggagaacaatggacgagataagacgccaccctgataagggcaacggacagcagagacccaccaagcaaaaatcagaagaacagctgcaggcttactataaaaagacactagaggaacgactttcagctggggcacttaacaccttcccccgagcattcaagcaggtaatggaaggccgggatataaagctagtaatcaatcagacagcgcaggactgcttcggatgcctggaatccataagccaaataagaacggcaacccgagataaaaaggacacggtgacccgggagaaacacccaaagaaaccttttcagaagtggatgaagaagagagcaatcaaaaaaggtaattatcttcggttccagcgtttattttatcttgatagagggaaactggctaaaatcattttagatgatattgaatgcttgtcttgtgacataccactcagtgaaatttattcggtttttaaaacaagatgggaaacaactggtagctttaaaagccttggggactttaaaacttacgggaaggctgacaacactgccttcagagaattaattacggctaaagaaattgagaaaaatgtgcaggaaatgagcaaaggctcggctcccggtccagacgggattactcttggggacgtcgtaaagatggatcccgagttttcccggaccatggagattttcaatttatggttaacaactggtaaaatcccggacatggtgagggggtgcagaaccgttttgattccaaaatcatcaaagccggatcgtttgaaagacattaataactggagacctatcacgatcggttccatcttgctgagactgttctccaggattgtaacagctaggctgagcaaagcgtgccccctgaacccaaggcaaagaggctttatcagagcggcgggatgctctgaaaacttaaaactcctgcaaactataatttggtcggccaaaagagaacacagaccactgggtgttgtattcgtggacatcgccaaggcttttgacaccgtaagccaccagcacatcattcatgctttgcagcaaagagaggtggatccccacatcgtcggtctggtgagcaatatgtacgagaacatcagtacgtatatcaccacaaagaggaacacacacacagacaaaatccagatccgggttggagtaaagcagggtgacccgatgtcgccccttttatttaacctggcaatggaccctctattatgcaagctggaagagagtggcaaaggataccaccgaggacagagcagcatcacagcgatggcatttgcagacgatctggttttgctgagcgactcctgggaaaatatgaatacaaatattagcatactggagaccttctgcaatctgaccggactcaaaacacaggggcaaaagtgccacggcttttacatcaagccgacaaagaagtcttacaccatcaatgactgcgctgcctggactatcaacggcacacccctgaacatgatcgaccccggcgaatctgagaaatacctcggcctgcagtttgacccgtggattggaatagcaaggtccggtctctccacaaaactagatttttggcttcagcggatcgatcaagcaccacttaaacctctgcagaaaactgatattctcaaaacatacaccatccctcggctgatctacatagctgaccactcagaagtgaaaagcgcactactcgaaacccttgaccagaagatccggacagcggtcaaggaatggcttcacctacctccgtgcacctgcgatgccatcctgtactcgagcacgagagacggcggtttgggcatcaccaaattggcaggactgatccccagcgtgcaggcccgtagactgcatcggatcgcacagtcatctgacgagacgatgaaatgcttcatggaaaaagagaaaatggaacagctgcataagaaattgtggattcaagctggaggggacagagagaacataccctcgatttgggaagcaccaccgtcgagtgaaccaccaaacaacgtgagcacaaattcggaatgggaagcaccgacccagaaagataaatttccaaagccttgcaattggaggaaaaacgaattcaaaaaatggaccaaattggcatcccaaggccgcggaattgtaaattttgaaagagacaaaattagtaaccattggatccaatactacagacgcatacctcacaggaaactcctcactgcactacaactcagggccaacgtttaccccacgagagaatttctagccaggggtagacaagaccaatacatcaaggcgtgtaggcactgcgatgcggacaacgaatcctgcgcccacatcatcggcaactgcccagtgacacaggacgcccgaatcaagaggcacaattacatctgcgaactgcttctcgaggaggcgaagaagaaggactgggtagtgttcaaggaaccgcacataagggattccaacaaggaactgtacaaacctgacctgatatttgtgaaggatgggcgtgcacttgtcgtggatgtgacagtacggtatgaagcagccaaatcatcgctggaggaagccgctgcagagaaagtgagaaagtacaaacacctggaaacggaagtaagacatctcacgaatgcaaaggacgttacttttgtgggctttcccctaggagcgcgggggaaatggcaccaagataactttaaacttttgactgagcttggcctctccaaatcgaggcaagtgaaaatggcagagactttttccacagtagcgctcttttcatctgtggacattgtacatatgtttgccagtagggccagaaaatctatggttatgtgataataggctgccttctgcggggcttgccttctggccatgcccttcttctctcccttgcacctgtacctcttggtctttgaataaagcctgagtaggaaggaccggtaaaaaaaaaaaaaaaaaaaaaaaaaaaaaaacgttgactaaaaaaaaaaaaaaaaaaaaaaaaaaaaaaaaaaaaaaaaaaaaaaaaaaaaaaaaaaaaaaaaaaaaaa

SEQ ID NO: 10963 - DNA, 5264 bp, synthetic construct
  source 1..5264: mol_type = other DNA
gaaataagagagaaaagaagagtaagaagaaatataagagaattcgccaccatggcccctaagaaaaagcggaaggtgaatatcagcggctctagctgcggcagccccaacagcgccgacaccagcagcgacttcaaggacctgtggaccaagctgaaggaatgccacgaccgggaagtgcagggactccaggtgaaggtcaccaaactcaagcaagaaagaatcctggacgcccagagactggaagaattcttcaccaagaaccagcagctgagagagcagcagaaagtgctgcacgagacaatcaaggttctggaagatagactgcgggccggcctgtgcgacagatgcgccgtgaccgaggaacacatgcgcaaaaagcagcaggagttcgagaacattagacagcaaaatctgaaattgatcacagagctgatgaacgagagaaacacactgcaggaggagaacaagaagctgagcgagcagctgcaacagaagatcgagaatgatcagcaacaccaggccgctgagctggaatgtgaagaggacgtgatccccgacagcccaatcacagctttcagcttttctggcgtgaacagactgaggcggaaggaaaacccccacgtgcggtacatcgagcagacccataccaagctggaacacagcgtgtgtgccaacgagatgagaaaggtgtccaagtcctccacccatccccagcacaaccctaacgaaaatgagatcctggtggctgatacctacgaccagtctcagagccctatggccaaggcccacggcaccagctcttatacccctgataagagctccttcaacctggccaccgtggtggccgagacactgggcctgggcgtgcaggaggaaagcgagacacagggcccaatgagccctctgggagatgagctgtaccactgcctggaaggcaaccacaagaaacagccttttgagtccggctccgagactcctggaacaagcgagagcgctacacctgagggcagccctaagagaaaggtgtccagcgccgagggcgctgccaaggaagagcctaaacggagaagcgccagactgagcgccaagccccccgccaaggtggaagccaagcctaagaaggccgccgctaaggacaagagcagcgataagaaagtccagaccaagggcaagcggggcgccaaaggcaaacaggccgaggtggccaaccaggagacaaaggaagatctgcctgctgagaacggcgaaaccaagaccgaggaatctccagcttctgacgaggccggagagaaggaggccaaaagcgacagcggctctgagacacctggaacaagcgagagcgccaccccggaatcctatgaacaacttgcaccacaaccgtgtgtgggagaaactttacattctagcctcccacgagacagtgaactgtttgtgcctgaagaggggagcagcgagaaggagagcgaggacgcgccaaaaacatctcctccgacgcctgggaaacatggtttggaacagactggggaggaaaaagtgatggtgactgttcctgacaaaaatccaccttgtccttgctgtggtacccgggtaaactctgtgttgaatctgattgaacatctgaaagtgtcacacgggaaaaggggggtttgttttcggtgtgcaaaatgtggaaaggaaaatagtaactatcacagtgttgtttgtcattttaagaaatgcaggggtccagagacggagaaagccccagctggggagtggatttgtgaggtatgcaacagagattttacaaccaaaattggcctgggacaacacaagagattggcacacccagcagtgagaaatcaggaaaggatcgttgcttcccaaccgaaagaaacatcaaatagaggtgctcacaaaaggtgctggacaaaggaggaggaagaattactaataagactggaggctcagttcgagggaaacaaaaatattaataagcttattgcagaacacataaccaccaaaacagctaagcagatcagtgacaaaaggcgattgctgtccagaaagccagcagaggagccacgtgaggagcctggaacgtgtcatcacaccaggagagcagctgcgagcctgagaacggagcctgagatgagtcatcacgcccaggcagaggacagagataatggacctgggagacgccctctgccaggcagggcagctgccggagggagaacaatggacgagataagacgccaccctgataagggcaacggacagcagagacccaccaagcaaaaatcagaagaacagctgcaggcttactataaaaagacactagaggaacgactttcagctggggcacttaacaccttcccccgagcattcaagcaggtaatggaaggccgggatataaagctagtaatcaatcagacagcgcaggactgcttcggatgcctggaatccataagccaaataagaacggcaacccgagataaaaaggacacggtgacccgggagaaacacccaaagaaaccttttcagaagtggatgaagaagagagcaatcaaaaaaggtaattatcttcggttccagcgtttattttatcttgatagagggaaactggctaaaatcattttagatgatattgaatgcttgtcttgtgacataccactcagtgaaatttattcggtttttaaaacaagatgggaaacaactggtagctttaaaagccttggggactttaaaacttacgggaaggctgacaacactgccttcagagaattaattacggctaaagaaattgagaaaaatgtgcaggaaatgagcaaaggctcggctcccggtccagacgggattactcttggggacgtcgtaaagatggatcccgagttttcccggctgatggagattttcaatttatggttaacaactggtaaaatcccggacatggtgagggggtgcagaaccgttttgattccaaaatcatcaaagccggatcgtttgaaagacattaataactggagacctatcacgatcggttccatcttgctgagactgttctccaggattgtaacagctaggctgagcaaagcgtgccccctgaacccaaggcaaagaggctttatcagagcggcgggatgctctgaaaacttaaaactcctgcaaactataatttggtcggccaaaagagaacacagaccactgggtgttgtattcgtggacatcgccaaggcttttgacaccgtaagccaccagcacatcattcatgctttgcagcaaagagaggtggatccccacatcgtcggtctggtgagcaatatgtacgagaacatcagtacgtatatcaccacaaagaggaacacacacacagacaaaatccagatccgggttggagtaaagcagggtgacccgatgtcgccccttttatttaacctggcaatggaccctctattatgcaagctggaagagagtggcaaaggataccaccgaggacagagcagcatcacagcgatggcatttgcagacgatctggttttgctgagcgactcctgggaaaatatgaatacaaatattagcatactggagaccttctgcaatctgaccggactcaaaacacaggggcaaaagtgccacggcttttacatcaagccgacaaagaagtcttacaccatcaatgactgcgctgcctggactatcaacggcacacccctgaacatgatcgaccccggcgaatctgagaaatacctcggcctgcagtttgacccgtggattggaatagcaaggtccggtctctccacaaaactagatttttggcttcagcggatcgatcaagcaccacttaaacctctgcagaaaactgatattctcaaaacatacaccatccctcggctgatctacatagctgaccactcagaagtgaaaagcgcactactcgaaacccttgaccagaagatccggacagcggtcaaggaatggcttcacctacctccgtgcacctgcgatgccatcctgtactcgagcacgagagacggcggtttgggcatcaccaaattggcaggactgatccccagcgtgcaggcccgtagactgcatcggatcgcacagtcatctgacgatacgatgaaatgcttcatggaaaaagagaaaatggaacagctgcataagaaattgtggattcaagctggaggggacagagagaacataccctcgatttgggaagcaccaccgtcgagtgaaccaccaaacaacgtgagcacaaattcggaatgggaagcaccgacccagaaagataaatttccaaagccttgcaattggaggaaaaacgaattcaaaaaatggaccaaattggcatcccaaggccgcggaattgtaaattttgaaagagacaaaattagtaaccattggatccaatactacagacgcatacctcacaggaaactcctcactgcactacaactcagggccaacgtttaccccacgagagaatttctagccaggggtagacaagaccaatacatcaaggcgtgtaggcactgcgatgcggacaacgaatcctgcgcccacatcatcggcaactgcccagtgacacaggacgcccgaatcaagaggcacaattacatctgcgaactgcttctcgaggaggcgaagaagaaggactgggtagtgttcaaggaaccgcacataagggattccaacaaggaactgtacaaacctgacctgatatttgtgaaggatgggcgtgcacttgtcgtggatgtgacagtacggtatgaagcagccaaatcatcgctggaggaagccgctgcagagaaagtgagaaagtacaaacacctggaaacggaagtaagacatctcacgaatgcaaaggacgttacttttgtgggctttcccctaggagcgcgggggaaatggcaccaagataactttaaacttttgactgagcttggcctctccaaatcgaggcaagtgaaaatggcagagactttttccacagtagcgctcttttcatctgtggacattgtacatatgtttgccagtagggccagaaaatctatggttatgtgataataggctgccttctgcggggcttgccttctggccatgcccttcttctctcccttgcacctgtacctcttggtctttgaataaagcctgagtaggaaggaccggtaaaaaaaaaaaaaaaaaaaaaaaaaaaaaaacgttgactaaaaaaaaaaaaaaaaaaaaaaaaaaaaaaaaaaaaaaaaaaaaaaaaaaaaaaaaaaaaaaaaaaaaaa

SEQ ID NO: 10964 - DNA, 5264 bp, synthetic construct
  source 1..5264: mol_type = other DNA
gaaataagagagaaaagaagagtaagaagaaatataagagaattcgccaccatggcccctaagaaaaagcggaaggtgaatatcagcggctctagctgcggcagccccaacagcgccgacaccagcagcgacttcaaggacctgtggaccaagctgaaggaatgccacgaccgggaagtgcagggactccaggtgaaggtcaccaaactcaagcaagaaagaatcctggacgcccagagactggaagaattcttcaccaagaaccagcagctgagagagcagcagaaagtgctgcacgagacaatcaaggttctggaagatagactgcgggccggcctgtgcgacagatgcgccgtgaccgaggaacacatgcgcaaaaagcagcaggagttcgagaacattagacagcaaaatctgaaattgatcacagagctgatgaacgagagaaacacactgcaggaggagaacaagaagctgagcgagcagctgcaacagaagatcgagaatgatcagcaacaccaggccgctgagctggaatgtgaagaggacgtgatccccgacagcccaatcacagctttcagcttttctggcgtgaacagactgaggcggaaggaaaacccccacgtgcggtacatcgagcagacccataccaagctggaacacagcgtgtgtgccaacgagatgagaaaggtgtccaagtcctccacccatccccagcacaaccctaacgaaaatgagatcctggtggctgatacctacgaccagtctcagagccctatggccaaggcccacggcaccagctcttatacccctgataagagctccttcaacctggccaccgtggtggccgagacactgggcctgggcgtgcaggaggaaagcgagacacagggcccaatgagccctctgggagatgagctgtaccactgcctggaaggcaaccacaagaaacagccttttgagtccggctccgagactcctggaacaagcgagagcgctacacctgagggcagccctaagagaaaggtgtccagcgccgagggcgctgccaaggaagagcctaaacggagaagcgccagactgagcgccaagccccccgccaaggtggaagccaagcctaagaaggccgccgctaaggacaagagcagcgataagaaagtccagaccaagggcaagcggggcgccaaaggcaaacaggccgaggtggccaaccaggagacaaaggaagatctgcctgctgagaacggcgaaaccaagaccgaggaatctccagcttctgacgaggccggagagaaggaggccaaaagcgacagcggctctgagacacctggaacaagcgagagcgccaccccggaatcctatgaacaacttgcaccacaaccgtgtgtgggagaaactttacattctagcctcccacgagacagtgaactgtttgtgcctgaagaggggagcagcgagaaggagagcgaggacgcgccaaaaacatctcctccgacgcctgggaaacatggtttggaacagactggggaggaaaaagtgatggtgactgttcctgacaaaaatccaccttgtccttgctgtggtacccgggtaaactctgtgttgaatctgattgaacatctgaaagtgtcacacgggaaaaggggggtttgttttcggtgtgcaaaatgtggaaaggaaaatagtaactatcacagtgttgtttgtcattttaagaaatgcaggggtccagagacggagaaagccccagctggggagtggatttgtgaggtatgcaacagagattttacaaccaaaattggcctgggacaacacaagagattggcacacccagcagtgagaaatcaggaaaggatcgttgcttcccaaccgaaagaaacatcaaatagaggtgctcacaaaaggtgctggacaaaggaggaggaagaattactaataagactggaggctcagttcgagggaaacaaaaatattaataagcttattgcagaacacataaccaccaaaacagctaagcagatcagtgacaaaaggcgattgctgtccagaaagccagcagaggagccacgtgaggagcctggaacgtgtcatcacaccaggagagcagctgcgagcctgagaacggagcctgagatgagtcatcacgcccaggcagaggacagagataatggacctgggagacgccctctgccaggcagggcagctgccggagggagaacaatggacgagataagacgccaccctgataagggcaacggacagcagagacccaccaagcaaaaatcagaagaacagctgcaggcttactataaaaagacactagaggaacgactttcagctggggcacttaacaccttcccccgagcattcaagcaggtaatggaaggccgggatataaagctagtaatcaatcagacagcgcaggactgcttcggatgcctggaatccataagccaaataagaacggcaacccgagataaaaaggacacggtgacccgggagaaacacccaaagaaaccttttcagaagtggatgaagaagagagcaatcaaaaaaggtaattatcttcggttccagcgtttattttatcttgatagagggaaactggctaaaatcattttagatgatattgaatgcttgtcttgtgacataccactcagtgaaatttattcggtttttaaaacaagatgggaaacaactggtagctttaaaagccttggggactttaaaacttacgggaaggctgacaacactgccttcagagaattaattacggctaaagaaattgagaaaaatgtgcaggaaatgagcaaaggctcggctcccggtccagacgggattactcttggggacgtcgtaaagatggatcccgagttttcccggaccatggagattttcaatttatggttaacaactggtaaaatcccggacatggtgagggggtgcagaaccgttttgattccaaaatcatcaaagccggatcgtttgaaagacattaataactggagacctatcacgatcggttccatcttgctgagactgttctccaggattgtaacagctaggctgagcaaagcgtgccccctgaacccaaggcaaagaggctttatcagagcggcgggatgctctgaaaacttaaaactcctgcaaactataatttggtcggccaaaagagaacacagaccactgggtgttgtattcgtggacatcgccaaggcttttgacaccgtaagccaccagcacatcattcatgctttgcagcaaagagaggtggatccccacatcgtcggtctggtgagcaatatgtacgagaacatcagtacgtatatcaccacaaagaggaacacacacacagacaaaatccagatccgggttggagtaaagcagggtgacccgatgtcgccccttttatttaacctggcaatggaccctctattatgcaagctggaagagagtggcaaaggataccaccgaggacagagcagcatcacagcgatggcatttgcagacgatctggttttgctgagcgactcctgggaaaatatgaatacaaatattagcatactggagaccttctgcaatctgaccggactcaaaacacaggggcaaaagtgccacggcttttacatcaagccgacaaagaagtcttacaccatcaatgactgcgctgcctggactatcaacggcacacccctgaacatgatcgaccccggcgaatctgagaaatacctcggcctgcagtttgacccgtggattggaatagcaaggtccggtctctccacaaaactaagattttggcttcagcggatcgatcaagcaccacttaaacctctgcagaaaactgatattctcaaaacatacaccatccctcggctgatctacatagctgaccactcagaagtgaaaagcgcactactcgaaacccttgaccagaagatccggacagcggtcaaggaatggcttcacctacctccgtgcacctgcgatgccatcctgtactcgagcacgagagacggcggtttgggcatcaccaaattggcaggactgatccccagcgtgcaggcccgtagactgcatcggatcgcacagtcatctgacgatacgatgaaatgcttcatggaaaaagagaaaatggaacagctgcataagaaattgtggattcaagctggaggggacagagagaacataccctcgatttgggaagcaccaccgtcgagtgaaccaccaaacaacgtgagcacaaattcggaatgggaagcaccgacccagaaagataaatttccaaagccttgcaattggaggaaaaacgaattcaaaaaatggaccaaattggcatcccaaggccgcggaattgtaaattttgaaagagacaaaattagtaaccattggatccaatactacagacgcatacctcacaggaaactcctcactgcactacaactcagggccaacgtttaccccacgagagaatttctagccaggggtagacaagaccaatacatcaaggcgtgtaggcactgcgatgcggacaacgaatcctgcgcccacatcatcggcaactgcccagtgacacaggacgcccgaatcaagaggcacaattacatctgcgaactgcttctcgaggaggcgaagaagaaggactgggtagtgttcaaggaaccgcacataagggattccaacaaggaactgtacaaacctgacctgatatttgtgaaggatgggcgtgcacttgtcgtggatgtgacagtacggtatgaagcagccaaatcatcgctggaggaagccgctgcagagaaagtgagaaagtacaaacacctggaaacggaagtaagacatctcacgaatgcaaaggacgttacttttgtgggctttcccctaggagcgcgggggaaatggcaccaagataactttaaacttttgactgagcttggcctctccaaatcgaggcaagtgaaaatggcagagactttttccacagtagcgctcttttcatctgtggacattgtacatatgtttgccagtagggccagaaaatctatggttatgtgataataggctgccttctgcggggcttgccttctggccatgcccttcttctctcccttgcacctgtacctcttggtctttgaataaagcctgagtaggaaggaccggtaaaaaaaaaaaaaaaaaaaaaaaaaaaaaaacgttgactaaaaaaaaaaaaaaaaaaaaaaaaaaaaaaaaaaaaaaaaaaaaaaaaaaaaaaaaaaaaaaaaaaaaaa

SEQ ID NO: 10965 - DNA, 5264 bp, synthetic construct
  source 1..5264: mol_type = other DNA
gaaataagagagaaaagaagagtaagaagaaatataagagaattcgccaccatggcccctaagaaaaagcggaaggtgaatatcagcggctctagctgcggcagccccaacagcgccgacaccagcagcgacttcaaggacctgtggaccaagctgaaggaatgccacgaccgggaagtgcagggactccaggtgaaggtcaccaaactcaagcaagaaagaatcctggacgcccagagactggaagaattcttcaccaagaaccagcagctgagagagcagcagaaagtgctgcacgagacaatcaaggttctggaagatagactgcgggccggcctgtgcgacagatgcgccgtgaccgaggaacacatgcgcaaaaagcagcaggagttcgagaacattagacagcaaaatctgaaattgatcacagagctgatgaacgagagaaacacactgcaggaggagaacaagaagctgagcgagcagctgcaacagaagatcgagaatgatcagcaacaccaggccgctgagctggaatgtgaagaggacgtgatccccgacagcccaatcacagctttcagcttttctggcgtgaacagactgaggcggaaggaaaacccccacgtgcggtacatcgagcagacccataccaagctggaacacagcgtgtgtgccaacgagatgagaaaggtgtccaagtcctccacccatccccagcacaaccctaacgaaaatgagatcctggtggctgatacctacgaccagtctcagagccctatggccaaggcccacggcaccagctcttatacccctgataagagctccttcaacctggccaccgtggtggccgagacactgggcctgggcgtgcaggaggaaagcgagacacagggcccaatgagccctctgggagatgagctgtaccactgcctggaaggcaaccacaagaaacagccttttgagtccggctccgagactcctggaacaagcgagagcgctacacctgagggcagccctaagagaaaggtgtccagcgccgagggcgctgccaaggaagagcctaaacggagaagcgccagactgagcgccaagccccccgccaaggtggaagccaagcctaagaaggccgccgctaaggacaagagcagcgataagaaagtccagaccaagggcaagcggggcgccaaaggcaaacaggccgaggtggccaaccaggagacaaaggaagatctgcctgctgagaacggcgaaaccaagaccgaggaatctccagcttctgacgaggccggagagaaggaggccaaaagcgacagcggctctgagacacctggaacaagcgagagcgccaccccggaatcctatgaacaacttgcaccacaaccgtgtgtgggagaaactttacattctagcctcccacgagacagtgaactgtttgtgcctgaagaggggagcagcgagaaggagagcgaggacgcgccaaaaacatctcctccgacgcctgggaaacatggtttggaacagactggggaggaaaaagtgatggtgactgttcctgacaaaaatccaccttgtccttgctgtggtacccgggtaaactctgtgttgaatctgattgaacatctgaaagtgtcacacgggaaaaggggggtttgttttcggtgtgcaaaatgtggaaaggaaaatagtaactatcacagtgttgtttgtcattttaagaaatgcaggggtccagagacggagaaagccccagctggggagtggatttgtgaggtatgcaacagagattttacaaccaaaattggcctgggacaacacaagagattggcacacccagcagtgagaaatcaggaaaggatcgttgcttcccaaccgaaagaaacatcaaatagaggtgctcacaaaaggtgctggacaaaggaggaggaagaattactaataagactggaggctcagttcgagggaaacaaaaatattaataagcttattgcagaacacataaccaccaaaacagctaagcagatcagtgacaaaaggcgattgctgtccagaaagccagcagaggagccacgtgaggagcctggaacgtgtcatcacaccaggagagcagctgcgagcctgagaacggagcctgagatgagtcatcacgcccaggcagaggacagagataatggacctgggagacgccctctgccaggcagggcagctgccggagggagaacaatggacgagataagacgccaccctgataagggcaacggacagcagagacccaccaagcaaaaatcagaagaacagctgcaggcttactataaaaagacactagaggaacgactttcagctggggcacttaacaccttcccccgagcattcaagcaggtaatggaaggccgggatataaagctagtaatcaatcagacagcgcaggactgcttcggatgcctggaatccataagccaaataagaacggcaacccgagataaaaaggacacggtgacccgggagaaacacccaaagaaaccttttcagaagtggatgaagaagagagcaatcaaaaaaggtaattatcttcggttccagcgtttattttatcttgatagagggaaactggctaaaatcattttagatgatattgaatgcttgtcttgtgacataccactcagtgaaatttattcggtttttaaaacaagatgggaaacaactggtagctttaaaagccttggggactttaaaacttacgggaaggctgacaacactgccttcagagaattaattacggctaaagaaattgagaaaaatgtgcaggaaatgagcaaaggctcggctcccggtccagacgggattactcttggggacgtcgtaaagatggatcccgagttttcccggaccatggagattttcaatttatggttaacaactggtaaaatcccggacatggtgagggggtgcagaaccgttttgattccaaaatcatcaaagccggatcgtttgaaagacattaataactggagacctatcacgatcggttccatcttgctgagactgttctccaggattgtaacagctaggctgagcaaagcgtgccccctgaacccaaggcaaagaggctttatcagagcggcgggatgctctgaaaacttaaaactcctgcaaactataatttggtcggccaaaagagaacacagaccactgggtgttgtattcgtggacatcgccaaggcttttgacaccgtaagccaccagcacatcattcatgctttgcagcaaagagaggtggatccccacatcgtcggtctggtgagcaatatgtacgagaacatcagtacgtatatcaccacaaagaggaacacacacacagacaaaatccagatccgggttggagtaaagcagggtgacccgatgtcgccccttttatttaacctggcaatggaccctctattatgcaagctggaagagagtggcaaaggataccaccgaggacagagcagcatcacagcgatggcatttgcagacgatctggttttgctgagcgactcctgggaaaatatgaatacaaatattagcatactggagaccttctgcaatctgaccggactcaaaacacaggggcaaaagtgccacggcttttacatcaagccgacaaagaagtcttacaccatcaatgactgcgctgcctggactatcaacggcacacccctgaacatgatcgaccccggcgaatctgagaaatacctcggcctgcagtttgacccgtggattggaatagcaaggtccggtctctccacaaaactagatttttggcttcagcggatcgatcaagcaccacttaaacctctgcagaaaactgatattctcaaaacatacaccatccctcggctgatctacatagctgaccactcagaagtgaaaagcgcactactcgaaacccttgaccagaagatccggacagcggtcaaggaataccttcacctacctccgtgcacctgcgatgccatcctgtactcgagcacgagagacggcggtttgggcatcaccaaattggcaggactgatccccagcgtgcaggcccgtagactgcatcggatcgcacagtcatctgacgatacgatgaaatgcttcatggaaaaagagaaaatggaacagctgcataagaaattgtggattcaagctggaggggacagagagaacataccctcgatttgggaagcaccaccgtcgagtgaaccaccaaacaacgtgagcacaaattcggaatgggaagcaccgacccagaaagataaatttccaaagccttgcaattggaggaaaaacgaattcaaaaaatggaccaaattggcatcccaaggccgcggaattgtaaattttgaaagagacaaaattagtaaccattggatccaatactacagacgcatacctcacaggaaactcctcactgcactacaactcagggccaacgtttaccccacgagagaatttctagccaggggtagacaagaccaatacatcaaggcgtgtaggcactgcgatgcggacaacgaatcctgcgcccacatcatcggcaactgcccagtgacacaggacgcccgaatcaagaggcacaattacatctgcgaactgcttctcgaggaggcgaagaagaaggactgggtagtgttcaaggaaccgcacataagggattccaacaaggaactgtacaaacctgacctgatatttgtgaaggatgggcgtgcacttgtcgtggatgtgacagtacggtatgaagcagccaaatcatcgctggaggaagccgctgcagagaaagtgagaaagtacaaacacctggaaacggaagtaagacatctcacgaatgcaaaggacgttacttttgtgggctttcccctaggagcgcgggggaaatggcaccaagataactttaaacttttgactgagcttggcctctccaaatcgaggcaagtgaaaatggcagagactttttccacagtagcgctcttttcatctgtggacattgtacatatgtttgccagtagggccagaaaatctatggttatgtgataataggctgccttctgcggggcttgccttctggccatgcccttcttctctcccttgcacctgtacctcttggtctttgaataaagcctgagtaggaaggaccggtaaaaaaaaaaaaaaaaaaaaaaaaaaaaaaacgttgactaaaaaaaaaaaaaaaaaaaaaaaaaaaaaaaaaaaaaaaaaaaaaaaaaaaaaaaaaaaaaaaaaaaaaa

SEQ ID NO: 10966 - DNA, 5264 bp, synthetic construct
  source 1..5264: mol_type = other DNA
gaaataagagagaaaagaagagtaagaagaaatataagagaattcgccaccatggcccctaagaaaaagcggaaggtgaatatcagcggctctagctgcggcagccccaacagcgccgacaccagcagcgacttcaaggacctgtggaccaagctgaaggaatgccacgaccgggaagtgcagggactccaggtgaaggtcaccaaactcaagcaagaaagaatcctggacgcccagagactggaagaattcttcaccaagaaccagcagctgagagagcagcagaaagtgctgcacgagacaatcaaggttctggaagatagactgcgggccggcctgtgcgacagatgcgccgtgaccgaggaacacatgcgcaaaaagcagcaggagttcgagaacattagacagcaaaatctgaaattgatcacagagctgatgaacgagagaaacacactgcaggaggagaacaagaagctgagcgagcagctgcaacagaagatcgagaatgatcagcaacaccaggccgctgagctggaatgtgaagaggacgtgatccccgacagcccaatcacagctttcagcttttctggcgtgaacagactgaggcggaaggaaaacccccacgtgcggtacatcgagcagacccataccaagctggaacacagcgtgtgtgccaacgagatgagaaaggtgtccaagtcctccacccatccccagcacaaccctaacgaaaatgagatcctggtggctgatacctacgaccagtctcagagccctatggccaaggcccacggcaccagctcttatacccctgataagagctccttcaacctggccaccgtggtggccgagacactgggcctgggcgtgcaggaggaaagcgagacacagggcccaatgagccctctgggagatgagctgtaccactgcctggaaggcaaccacaagaaacagccttttgagtccggctccgagactcctggaacaagcgagagcgctacacctgagggcagccctaagagaaaggtgtccagcgccgagggcgctgccaaggaagagcctaaacggagaagcgccagactgagcgccaagccccccgccaaggtggaagccaagcctaagaaggccgccgctaaggacaagagcagcgataagaaagtccagaccaagggcaagcggggcgccaaaggcaaacaggccgaggtggccaaccaggagacaaaggaagatctgcctgctgagaacggcgaaaccaagaccgaggaatctccagcttctgacgaggccggagagaaggaggccaaaagcgacagcggctctgagacacctggaacaagcgagagcgccaccccggaatcctatgaacaacttgcaccacaaccgtgtgtgggagaaactttacattctagcctcccacgagacagtgaactgtttgtgcctgaagaggggagcagcgagaaggagagcgaggacgcgccaaaaacatctcctccgacgcctgggaaacatggtttggaacagactggggaggaaaaagtgatggtgactgttcctgacaaaaatccaccttgtccttgctgtggtacccgggtaaactctgtgttgaatctgattgaacatctgaaagtgtcacacgggaaaaggggggtttgttttcggtgtgcaaaatgtggaaaggaaaatagtaactatcacagtgttgtttgtcattttaagaaatgcaggggtccagagacggagaaagccccagctggggagtggatttgtgaggtatgcaacagagattttacaaccaaaattggcctgggacaacacaagagattggcacacccagcagtgagaaatcaggaaaggatcgttgcttcccaaccgaaagaaacatcaaatagaggtgctcacaaaaggtgctggacaaaggaggaggaagaattactaataagactggaggctcagttcgagggaaacaaaaatattaataagcttattgcagaacacataaccaccaaaacagctaagcagatcagtgacaaaaggcgattgctgtccagaaagccagcagaggagccacgtgaggagcctggaacgtgtcatcacaccaggagagcagctgcgagcctgagaacggagcctgagatgagtcatcacgcccaggcagaggacagagataatggacctgggagacgccctctgccaggcagggcagctgccggagggagaacaatggacgagataagacgccaccctgataagggcaacggacagcagagacccaccaagcaaaaatcagaagaacagctgcaggcttactataaaaagacactagaggaacgactttcagctggggcacttaacaccttcccccgagcattcaagcaggtaatggaaggccgggatataaagctagtaatcaatcagacagcgcaggactgcttcggatgcctggaatccataagccaaataagaacggcaacccgagataaaaaggacacggtgacccgggagaaacacccaaagaaaccttttcagaagtggatgaagaagagagcaatcaaaaaaggtaattatcttcggttccagcgtttattttatcttgatagagggaaactggctaaaatcattttagatgatattgaatgcttgtcttgtgacataccactcagtgaaatttattcggtttttaaaacaagatgggaaacaactggtagctttaaaagccttggggactttaaaacttacgggaaggctgacaacactgccttcagagaattaattacggctaaagaaattgagaaaaatgtgcagagaatgagcaaaggctcggctcccggtccagacgggattactcttggggacgtcgtaaagatggatcccgagttttcccggaccatggagattttcaatttatggttaacaactggtaaaatcccggacatggtgagggggtgcagaaccgttttgattccaaaatcatcaaagccggatcgtttgaaagacattaataactggagacctatcacgatcggttccatcttgctgagactgttctccaggattgtaacagctaggctgagcaaagcgtgccccctgaacccaaggcaaagaggctttatcagagcggcgggatgctctgaaaacttaaaactcctgcaaactataatttggtcggccaaaagagaacacagaccactgggtgttgtattcgtggacatcgccaaggcttttgacaccgtaagccaccagcacatcattcatgctttgcagcaaagagaggtggatccccacatcgtcggtctggtgagcaatatgtacgagaacatcagtacgtatatcaccacaaagaggaacacacacacagacaaaatccagatccgggttggagtaaagcagggtgacccgatgtcgccccttttatttaacctggcaatggaccctctattatgcaagctggaagagagtggcaaaggataccaccgaggacagagcagcatcacagcgatggcatttgcagacgatctggttttgctgagcgactcctgggaaaatatgaatacaaatattagcatactggagaccttctgcaatctgaccggactcaaaacacaggggcaaaagtgccacggcttttacatcaagccgacaaagaagtcttacaccatcaatgactgcgctgcctggactatcaacggcacacccctgaacatgatcgaccccggcgaatctgagaaatacctcggcctgcagtttgacccgtggattggaatagcaaggtccggtctctccacaaaactagatttttggcttcagcggatcgatcaagcaccacttaaacctctgcagaaaactgatattctcaaaacatacaccatccctcggctgatctacatagctgaccactcagaagtgaaaagcgcactactcgaaacccttgaccagaagatccggacagcggtcaaggaatggcttcacctacctccgtgcacctgcgatgccatcctgtactcgagcacgagagacggcggtttgggcatcaccaaattggcaggactgatccccagcgtgcaggcccgtagactgcatcggatcgcacagtcatctgacgatacgatgaaatgcttcatggaaaaagagaaaatggaacagctgcataagaaattgtggattcaagctggaggggacagagagaacataccctcgatttgggaagcaccaccgtcgagtgaaccaccaaacaacgtgagcacaaattcggaatgggaagcaccgacccagaaagataaatttccaaagccttgcaattggaggaaaaacgaattcaaaaaatggaccaaattggcatcccaaggccgcggaattgtaaattttgaaagagacaaaattagtaaccattggatccaatactacagacgcatacctcacaggaaactcctcactgcactacaactcagggccaacgtttaccccacgagagaatttctagccaggggtagacaagaccaatacatcaaggcgtgtaggcactgcgatgcggacaacgaatcctgcgcccacatcatcggcaactgcccagtgacacaggacgcccgaatcaagaggcacaattacatctgcgaactgcttctcgaggaggcgaagaagaaggactgggtagtgttcaaggaaccgcacataagggattccaacaaggaactgtacaaacctgacctgatatttgtgaaggatgggcgtgcacttgtcgtggatgtgacagtacggtatgaagcagccaaatcatcgctggaggaagccgctgcagagaaagtgagaaagtacaaacacctggaaacggaagtaagacatctcacgaatgcaaaggacgttacttttgtgggctttcccctaggagcgcgggggaaatggcaccaagataactttaaacttttgactgagcttggcctctccaaatcgaggcaagtgaaaatggcagagactttttccacagtagcgctcttttcatctgtggacattgtacatatgtttgccagtagggccagaaaatctatggttatgtgataataggctgccttctgcggggcttgccttctggccatgcccttcttctctcccttgcacctgtacctcttggtctttgaataaagcctgagtaggaaggaccggtaaaaaaaaaaaaaaaaaaaaaaaaaaaaaaacgttgactaaaaaaaaaaaaaaaaaaaaaaaaaaaaaaaaaaaaaaaaaaaaaaaaaaaaaaaaaaaaaaaaaaaaaa

SEQ ID NO: 10967 - DNA, 5264 bp, synthetic construct
  source 1..5264: mol_type = other DNA
gaaataagagagaaaagaagagtaagaagaaatataagagaattcgccaccatggcccctaagaaaaagcggaaggtgaatatcagcggctctagctgcggcagccccaacagcgccgacaccagcagcgacttcaaggacctgtggaccaagctgaaggaatgccacgaccgggaagtgcagggactccaggtgaaggtcaccaaactcaagcaagaaagaatcctggacgcccagagactggaagaattcttcaccaagaaccagcagctgagagagcagcagaaagtgctgcacgagacaatcaaggttctggaagatagactgcgggccggcctgtgcgacagatgcgccgtgaccgaggaacacatgcgcaaaaagcagcaggagttcgagaacattagacagcaaaatctgaaattgatcacagagctgatgaacgagagaaacacactgcaggaggagaacaagaagctgagcgagcagctgcaacagaagatcgagaatgatcagcaacaccaggccgctgagctggaatgtgaagaggacgtgatccccgacagcccaatcacagctttcagcttttctggcgtgaacagactgaggcggaaggaaaacccccacgtgcggtacatcgagcagacccataccaagctggaacacagcgtgtgtgccaacgagatgagaaaggtgtccaagtcctccacccatccccagcacaaccctaacgaaaatgagatcctggtggctgatacctacgaccagtctcagagccctatggccaaggcccacggcaccagctcttatacccctgataagagctccttcaacctggccaccgtggtggccgagacactgggcctgggcgtgcaggaggaaagcgagacacagggcccaatgagccctctgggagatgagctgtaccactgcctggaaggcaaccacaagaaacagccttttgagtccggctccgagactcctggaacaagcgagagcgctacacctgagggcagccctaagagaaaggtgtccagcgccgagggcgctgccaaggaagagcctaaacggagaagcgccagactgagcgccaagccccccgccaaggtggaagccaagcctaagaaggccgccgctaaggacaagagcagcgataagaaagtccagaccaagggcaagcggggcgccaaaggcaaacaggccgaggtggccaaccaggagacaaaggaagatctgcctgctgagaacggcgaaaccaagaccgaggaatctccagcttctgacgaggccggagagaaggaggccaaaagcgacagcggctctgagacacctggaacaagcgagagcgccaccccggaatcctatgaacaacttgcaccacaaccgtgtgtgggagaaactttacattctagcctcccacgagacagtgaactgtttgtgcctgaagaggggagcagcgagaaggagagcgaggacgcgccaaaaacatctcctccgacgcctgggaaacatggtttggaacagactggggaggaaaaagtgatggtgactgttcctgacaaaaatccaccttgtccttgctgtggtacccgggtaaactctgtgttgaatctgattgaacatctgaaagtgtcacacgggaaaaggggggtttgttttcggtgtgcaaaatgtggaaaggaaaatagtaactatcacagtgttgtttgtcattttaagaaatgcaggggtccagagacggagaaagccccagctggggagtggatttgtgaggtatgcaacagagattttacaaccaaaattggcctgggacaacacaagagattggcacacccagcagtgagaaatcaggaaaggatcgttgcttcccaaccgaaagaaacatcaaatagaggtgctcacaaaaggtgctggacaaaggaggaggaagaattactaataagactggaggctcagttcgagggaaacaaaaatattaataagcttattgcagaacacataaccaccaaaacagctaagcagatcagtgacaaaaggcgattgctgtccagaaagccagcagaggagccacgtgaggagcctggaacgtgtcatcacaccaggagagcagctgcgagcctgagaacggagcctgagatgagtcatcacgcccaggcagaggacagagataatggacctgggagacgccctctgccaggcagggcagctgccggagggagaacaatggacgagataagacgccaccctgataagggcaacggacagcagagacccaccaagcaaaaatcagaagaacagctgcaggcttactataaaaagacactagaggaacgactttcagctggggcacttaacaccttcccccgagcattcaagcaggtaatggaaggccgggatataaagctagtaatcaatcagacagcgcaggactgcttcggatgcctggaatccataagccaaataagaacggcaacccgagataaaaaggacacggtgacccgggagaaacacccaaagaaaccttttcagaagtggatgaagaagagagcaatcaaaaaaggtaattatcttcggttccagcgtttattttatcttgatagagggaaactggctaaaatcattttagatgatattgaatgcttgtcttgtgacataccactcagtgaaatttattcggtttttaaaacaagatgggaaacaactggtagctttaaaagccttggggactttaaaacttacgggaaggctgacaacactgccttcagagaattaattacggctaaagaaattgagaaaaatgtgcaggaaatgagcaaaggctcggctcccggtccagacgggattactcttggggacgtcgtaaagatggatcccgagttttcccggaccatggagattttcaatttatggttaacaactggtaaaatcccggacatggtgagggggtgcagaaccgttttgattccaaaatcatcaaagccggatcgtttgaaagacattaataactggagacctatcacgatcggttccatcttgctgagactgttctccaggattgtaacagctaggctgagcaaagcgtgccccctgaacccaaggcaaagaggctttatcagagcggcgggatgctctgaaaacttaaaactcctgcaaactataatttggtcggccaaaagagaacacagaccactgggtgttgtattcgtggacatcgccaaggcttttgacaccgtaagccaccagcacatcattcatgctttgcagcaaagagaggtggatccccacatcgtcggtctggtgagcaatatgtacgagaacatcagtacgtatatcaccacaaagaggaacacacacacagacaaaatccagatccgggttggagtaaagcagggtgacccgatgtcgccccttttatttaacctggcaatggaccctctattatgcaagctggaagagagtggcaaaggataccaccgaggacagagcagcatcacagcgatggcatttgcagacgatctggttttgctgagcgactcctgggaaaatatgaatacaaatattagcatactggagaccttctgcaatctgaccggactcaaaacacaggggcaaaagtgccacggcttttacatcaagccgacaaagaagtcttacaccatcaatgactgcgctgcctggactatcaacggcacacccctgaacatgatcgaccccggcgaatctgagaaatacctcggcctgcagtttgacccgtggattggaatagcaaggtccggtctctccacaaaactagatttttggcttcagcggatcgatcaagcaccacttaaacctctgcagaaaactgatattctcaaatggtacaccatccctcggctgatctacatagctgaccactcagaagtgaaaagcgcactactcgaaacccttgaccagaagatccggacagcggtcaaggaatggcttcacctacctccgtgcacctgcgatgccatcctgtactcgagcacgagagacggcggtttgggcatcaccaaattggcaggactgatccccagcgtgcaggcccgtagactgcatcggatcgcacagtcatctgacgatacgatgaaatgcttcatggaaaaagagaaaatggaacagctgcataagaaattgtggattcaagctggaggggacagagagaacataccctcgatttgggaagcaccaccgtcgagtgaaccaccaaacaacgtgagcacaaattcggaatgggaagcaccgacccagaaagataaatttccaaagccttgcaattggaggaaaaacgaattcaaaaaatggaccaaattggcatcccaaggccgcggaattgtaaattttgaaagagacaaaattagtaaccattggatccaatactacagacgcatacctcacaggaaactcctcactgcactacaactcagggccaacgtttaccccacgagagaatttctagccaggggtagacaagaccaatacatcaaggcgtgtaggcactgcgatgcggacaacgaatcctgcgcccacatcatcggcaactgcccagtgacacaggacgcccgaatcaagaggcacaattacatctgcgaactgcttctcgaggaggcgaagaagaaggactgggtagtgttcaaggaaccgcacataagggattccaacaaggaactgtacaaacctgacctgatatttgtgaaggatgggcgtgcacttgtcgtggatgtgacagtacggtatgaagcagccaaatcatcgctggaggaagccgctgcagagaaagtgagaaagtacaaacacctggaaacggaagtaagacatctcacgaatgcaaaggacgttacttttgtgggctttcccctaggagcgcgggggaaatggcaccaagataactttaaacttttgactgagcttggcctctccaaatcgaggcaagtgaaaatggcagagactttttccacagtagcgctcttttcatctgtggacattgtacatatgtttgccagtagggccagaaaatctatggttatgtgataataggctgccttctgcggggcttgccttctggccatgcccttcttctctcccttgcacctgtacctcttggtctttgaataaagcctgagtaggaaggaccggtaaaaaaaaaaaaaaaaaaaaaaaaaaaaaaacgttgactaaaaaaaaaaaaaaaaaaaaaaaaaaaaaaaaaaaaaaaaaaaaaaaaaaaaaaaaaaaaaaaaaaaaaa

SEQ ID NO: 10968 - DNA, 5264 bp, synthetic construct
  source 1..5264: mol_type = other DNA
gaaataagagagaaaagaagagtaagaagaaatataagagaattcgccaccatggcccctaagaaaaagcggaaggtgaatatcagcggctctagctgcggcagccccaacagcgccgacaccagcagcgacttcaaggacctgtggaccaagctgaaggaatgccacgaccgggaagtgcagggactccaggtgaaggtcaccaaactcaagcaagaaagaatcctggacgcccagagactggaagaattcttcaccaagaaccagcagctgagagagcagcagaaagtgctgcacgagacaatcaaggttctggaagatagactgcgggccggcctgtgcgacagatgcgccgtgaccgaggaacacatgcgcaaaaagcagcaggagttcgagaacattagacagcaaaatctgaaattgatcacagagctgatgaacgagagaaacacactgcaggaggagaacaagaagctgagcgagcagctgcaacagaagatcgagaatgatcagcaacaccaggccgctgagctggaatgtgaagaggacgtgatccccgacagcccaatcacagctttcagcttttctggcgtgaacagactgaggcggaaggaaaacccccacgtgcggtacatcgagcagacccataccaagctggaacacagcgtgtgtgccaacgagatgagaaaggtgtccaagtcctccacccatccccagcacaaccctaacgaaaatgagatcctggtggctgatacctacgaccagtctcagagccctatggccaaggcccacggcaccagctcttatacccctgataagagctccttcaacctggccaccgtggtggccgagacactgggcctgggcgtgcaggaggaaagcgagacacagggcccaatgagccctctgggagatgagctgtaccactgcctggaaggcaaccacaagaaacagccttttgagtccggctccgagactcctggaacaagcgagagcgctacacctgagggcagccctaagagaaaggtgtccagcgccgagggcgctgccaaggaagagcctaaacggagaagcgccagactgagcgccaagccccccgccaaggtggaagccaagcctaagaaggccgccgctaaggacaagagcagcgataagaaagtccagaccaagggcaagcggggcgccaaaggcaaacaggccgaggtggccaaccaggagacaaaggaagatctgcctgctgagaacggcgaaaccaagaccgaggaatctccagcttctgacgaggccggagagaaggaggccaaaagcgacagcggctctgagacacctggaacaagcgagagcgccaccccggaatcctatgaacaacttgcaccacaaccgtgtgtgggagaaactttacattctagcctcccacgagacagtgaactgtttgtgcctgaagaggggagcagcgagaaggagagcgaggacgcgccaaaaacatctcctccgacgcctgggaaacatggtttggaacagactggggaggaaaaagtgatggtgactgttcctgacaaaaatccaccttgtccttgctgtggtacccgggtaaactctgtgttgaatctgattgaacatctgaaagtgtcacacgggaaaaggggggtttgttttcggtgtgcaaaatgtggaaaggaaaatagtaactatcacagtgttgtttgtcattttaagaaatgcaggggtccagagacggagaaagccccagctggggagtggatttgtgaggtatgcaacagagattttacaaccaaaattggcctgggacaacacaagagattggcacacccagcagtgagaaatcaggaaaggatcgttgcttcccaaccgaaagaaacatcaaatagaggtgctcacaaaaggtgctggacaaaggaggaggaagaattactaataagactggaggctcagttcgagggaaacaaaaatattaataagcttattgcagaacacataaccaccaaaacagctaagcagatcagtgacaaaaggcgattgctgtccagaaagccagcagaggagccacgtgaggagcctggaacgtgtcatcacaccaggagagcagctgcgagcctgagaacggagcctgagatgagtcatcacgcccaggcagaggacagagataatggacctgggagacgccctctgccaggcagggcagctgccggagggagaacaatggacgagataagacgccaccctgataagggcaacggacagcagagacccaccaagcaaaaatcagaagaacagctgcaggcttactataaaaagacactagaggaacgactttcagctggggcacttaacaccttcccccgagcattcaagcaggtaatggaaggccgggatataaagctagtaatcaatcagacagcgcaggactgcttcggatgcctggaatccataagccaaataagaacggcaacccgagataaaaaggacacggtgacccgggagaaacacccaaagaaaccttttcagaagtggatgaagaagagagcaatcaaaaaaggtaattatcttcggttccagcgtttattttatcttgatagagggaaactggctaaaatcattttagatgatattgaatgcttgtcttgtgacataccactcagtgaaatttattcggtttttaaaacaagatgggaaacaactggtagctttaaaagccttggggactttaaaacttacgggaaggctgacaacactgccttcagagaattaattacggctaaagaaattgagaaaaatgtgcaggaaatgagcaaaggctcggctcccggtccagacgggattactcttggggacgtcgtaaagatggatcccgagttttcccggaccatggagattttcaatttatggttaacaactggtaaaatcccggacatggtgagggggtgcagaaccgttttgattccaaaatcatcaaagccggatcgtttgaaagacattaataactggagacctatcacgatcggttccatcttgctgagactgttctccaggattgtaacagctaggctgagcaaagcgtgccccctgaacccaaggcaaagaggctttatcagagcggcgggatgctctgaaaacttaaaactcctgcaaactataatttggtcggccaaaagagaacacagaccactgggtgttgtattcgtggacatcgccaaggcttttgacaccgtaagccaccagcacatcattcatgctttgcagcaaagagaggtggatccccacatcgtcggtctggtgagcaatatgtacgagaacatcagtacgtatatcaccacaaagaggaacacacacacagacaaaatccagatccgggttggagtaaagcagggtgacccgatgtcgccccttttatttaacctggcaatggaccctctattatgcaagctggaagagagtggcaaaggataccaccgaggacagagcagcatcacagcgatggcatttgcaagagatctggttttgctgagcgactcctgggaaaatatgaatacaaatattagcatactggagaccttctgcaatctgaccggactcaaaacacaggggcaaaagtgccacggcttttacatcaagccgacaaagaagtcttacaccatcaatgactgcgctgcctggactatcaacggcacacccctgaacatgatcgaccccggcgaatctgagaaatacctcggcctgcagtttgacccgtggattggaatagcaaggtccggtctctccacaaaactagatttttggcttcagcggatcgatcaagcaccacttaaacctctgcagaaaactgatattctcaaaacatacaccatccctcggctgatctacatagctgaccactcagaagtgaaaagcgcactactcgaaacccttgaccagaagatccggacagcggtcaaggaatggcttcacctacctccgtgcacctgcgatgccatcctgtactcgagcacgagagacggcggtttgggcatcaccaaattggcaggactgatccccagcgtgcaggcccgtagactgcatcggatcgcacagtcatctgacgatacgatgaaatgcttcatggaaaaagagaaaatggaacagctgcataagaaattgtggattcaagctggaggggacagagagaacataccctcgatttgggaagcaccaccgtcgagtgaaccaccaaacaacgtgagcacaaattcggaatgggaagcaccgacccagaaagataaatttccaaagccttgcaattggaggaaaaacgaattcaaaaaatggaccaaattggcatcccaaggccgcggaattgtaaattttgaaagagacaaaattagtaaccattggatccaatactacagacgcatacctcacaggaaactcctcactgcactacaactcagggccaacgtttaccccacgagagaatttctagccaggggtagacaagaccaatacatcaaggcgtgtaggcactgcgatgcggacaacgaatcctgcgcccacatcatcggcaactgcccagtgacacaggacgcccgaatcaagaggcacaattacatctgcgaactgcttctcgaggaggcgaagaagaaggactgggtagtgttcaaggaaccgcacataagggattccaacaaggaactgtacaaacctgacctgatatttgtgaaggatgggcgtgcacttgtcgtggatgtgacagtacggtatgaagcagccaaatcatcgctggaggaagccgctgcagagaaagtgagaaagtacaaacacctggaaacggaagtaagacatctcacgaatgcaaaggacgttacttttgtgggctttcccctaggagcgcgggggaaatggcaccaagataactttaaacttttgactgagcttggcctctccaaatcgaggcaagtgaaaatggcagagactttttccacagtagcgctcttttcatctgtggacattgtacatatgtttgccagtagggccagaaaatctatggttatgtgataataggctgccttctgcggggcttgccttctggccatgcccttcttctctcccttgcacctgtacctcttggtctttgaataaagcctgagtaggaaggaccggtaaaaaaaaaaaaaaaaaaaaaaaaaaaaaaacgttgactaaaaaaaaaaaaaaaaaaaaaaaaaaaaaaaaaaaaaaaaaaaaaaaaaaaaaaaaaaaaaaaaaaaaaa

SEQ ID NO: 10969 - DNA, 5264 bp, synthetic construct
  source 1..5264: mol_type = other DNA
gaaataagagagaaaagaagagtaagaagaaatataagagaattcgccaccatggcccctaagaaaaagcggaaggtgaatatcagcggctctagctgcggcagccccaacagcgccgacaccagcagcgacttcaaggacctgtggaccaagctgaaggaatgccacgaccgggaagtgcagggactccaggtgaaggtcaccaaactcaagcaagaaagaatcctggacgcccagagactggaagaattcttcaccaagaaccagcagctgagagagcagcagaaagtgctgcacgagacaatcaaggttctggaagatagactgcgggccggcctgtgcgacagatgcgccgtgaccgaggaacacatgcgcaaaaagcagcaggagttcgagaacattagacagcaaaatctgaaattgatcacagagctgatgaacgagagaaacacactgcaggaggagaacaagaagctgagcgagcagctgcaacagaagatcgagaatgatcagcaacaccaggccgctgagctggaatgtgaagaggacgtgatccccgacagcccaatcacagctttcagcttttctggcgtgaacagactgaggcggaaggaaaacccccacgtgcggtacatcgagcagacccataccaagctggaacacagcgtgtgtgccaacgagatgagaaaggtgtccaagtcctccacccatccccagcacaaccctaacgaaaatgagatcctggtggctgatacctacgaccagtctcagagccctatggccaaggcccacggcaccagctcttatacccctgataagagctccttcaacctggccaccgtggtggccgagacactgggcctgggcgtgcaggaggaaagcgagacacagggcccaatgagccctctgggagatgagctgtaccactgcctggaaggcaaccacaagaaacagccttttgagtccggctccgagactcctggaacaagcgagagcgctacacctgagggcagccctaagagaaaggtgtccagcgccgagggcgctgccaaggaagagcctaaacggagaagcgccagactgagcgccaagccccccgccaaggtggaagccaagcctaagaaggccgccgctaaggacaagagcagcgataagaaagtccagaccaagggcaagcggggcgccaaaggcaaacaggccgaggtggccaaccaggagacaaaggaagatctgcctgctgagaacggcgaaaccaagaccgaggaatctccagcttctgacgaggccggagagaaggaggccaaaagcgacagcggctctgagacacctggaacaagcgagagcgccaccccggaatcctatgaacaacttgcaccacaaccgtgtgtgggagaaactttacattctagcctcccacgagacagtgaactgtttgtgcctgaagaggggagcagcgagaaggagagcgaggacgcgccaaaaacatctcctccgacgcctgggaaacatggtttggaacagactggggaggaaaaagtgatggtgactgttcctgacaaaaatccaccttgtccttgctgtggtacccgggtaaactctgtgttgaatctgattgaacatctgaaagtgtcacacgggaaaaggggggtttgttttcggtgtgcaaaatgtggaaaggaaaatagtaactatcacagtgttgtttgtcattttaagaaatgcaggggtccagagacggagaaagccccagctggggagtggatttgtgaggtatgcaacagagattttacaaccaaaattggcctgggacaacacaagagattggcacacccagcagtgagaaatcaggaaaggatcgttgcttcccaaccgaaagaaacatcaaatagaggtgctcacaaaaggtgctggacaaaggaggaggaagaattactaataagactggaggctcagttcgagggaaacaaaaatattaataagcttattgcagaacacataaccaccaaaacagctaagcagatcagtgacaaaaggcgattgctgtccagaaagccagcagaggagccacgtgaggagcctggaacgtgtcatcacaccaggagagcagctgcgagcctgagaacggagcctgagatgagtcatcacgcccaggcagaggacagagataatggacctgggagacgccctctgccaggcagggcagctgccggagggagaacaatggacgagataagacgccaccctgataagggcaacggacagcagagacccaccaagcaaaaatcagaagaacagctgcaggcttactataaaaagacactagaggaacgactttcagctggggcacttaacaccttcccccgagcattcaagcaggtaatggaaggccgggatataaagctagtaatcaatcagacagcgcaggactgcttcggatgcctggaatccataagccaaataagaacggcaacccgagataaaaaggacacggtgacccgggagaaacacccaaagaaaccttttcagaagtggatgaagaagagagcaatcaaaaaaggtaattatcttcggttccagcgtttattttatcttgatagagggaaactgaagaaaatcattttagatgatattgaatgcttgtcttgtgacataccactcagtgaaatttattcggtttttaaaacaagatgggaaacaactggtagctttaaaagccttggggactttaaaacttacgggaaggctgacaacactgccttcagagaattaattacggctaaagaaattgagaaaaatgtgcaggaaatgagcaaaggctcggctcccggtccagacgggattactcttggggacgtcgtaaagatggatcccgagttttcccggaccatggagattttcaatttatggttaacaactggtaaaatcccggacatggtgagggggtgcagaaccgttttgattccaaaatcatcaaagccggatcgtttgaaagacattaataactggagacctatcacgatcggttccatcttgctgagactgttctccaggattgtaacagctaggctgagcaaagcgtgccccctgaacccaaggcaaagaggctttatcagagcggcgggatgctctgaaaacttaaaactcctgcaaactataatttggtcggccaaaagagaacacagaccactgggtgttgtattcgtggacatcgccaaggcttttgacaccgtaagccaccagcacatcattcatgctttgcagcaaagagaggtggatccccacatcgtcggtctggtgagcaatatgtacgagaacatcagtacgtatatcaccacaaagaggaacacacacacagacaaaatccagatccgggttggagtaaagcagggtgacccgatgtcgccccttttatttaacctggcaatggaccctctattatgcaagctggaagagagtggcaaaggataccaccgaggacagagcagcatcacagcgatggcatttgcagacgatctggttttgctgagcgactcctgggaaaatatgaatacaaatattagcatactggagaccttctgcaatctgaccggactcaaaacacaggggcaaaagtgccacggcttttacatcaagccgacaaagaagtcttacaccatcaatgactgcgctgcctggactatcaacggcacacccctgaacatgatcgaccccggcgaatctgagaaatacctcggcctgcagtttgacccgtggattggaatagcaaggtccggtctctccacaaaactagatttttggcttcagcggatcgatcaagcaccacttaaacctctgcagaaaactgatattctcaaaacatacaccatccctcggctgatctacatagctgaccactcagaagtgaaaagcgcactactcgaaacccttgaccagaagatccggacagcggtcaaggaatggcttcacctacctccgtgcacctgcgatgccatcctgtactcgagcacgagagacggcggtttgggcatcaccaaattggcaggactgatccccagcgtgcaggcccgtagactgcatcggatcgcacagtcatctgacgatacgatgaaatgcttcatggaaaaagagaaaatggaacagctgcataagaaattgtggattcaagctggaggggacagagagaacataccctcgatttgggaagcaccaccgtcgagtgaaccaccaaacaacgtgagcacaaattcggaatgggaagcaccgacccagaaagataaatttccaaagccttgcaattggaggaaaaacgaattcaaaaaatggaccaaattggcatcccaaggccgcggaattgtaaattttgaaagagacaaaattagtaaccattggatccaatactacagacgcatacctcacaggaaactcctcactgcactacaactcagggccaacgtttaccccacgagagaatttctagccaggggtagacaagaccaatacatcaaggcgtgtaggcactgcgatgcggacaacgaatcctgcgcccacatcatcggcaactgcccagtgacacaggacgcccgaatcaagaggcacaattacatctgcgaactgcttctcgaggaggcgaagaagaaggactgggtagtgttcaaggaaccgcacataagggattccaacaaggaactgtacaaacctgacctgatatttgtgaaggatgggcgtgcacttgtcgtggatgtgacagtacggtatgaagcagccaaatcatcgctggaggaagccgctgcagagaaagtgagaaagtacaaacacctggaaacggaagtaagacatctcacgaatgcaaaggacgttacttttgtgggctttcccctaggagcgcgggggaaatggcaccaagataactttaaacttttgactgagcttggcctctccaaatcgaggcaagtgaaaatggcagagactttttccacagtagcgctcttttcatctgtggacattgtacatatgtttgccagtagggccagaaaatctatggttatgtgataataggctgccttctgcggggcttgccttctggccatgcccttcttctctcccttgcacctgtacctcttggtctttgaataaagcctgagtaggaaggaccggtaaaaaaaaaaaaaaaaaaaaaaaaaaaaaaacgttgactaaaaaaaaaaaaaaaaaaaaaaaaaaaaaaaaaaaaaaaaaaaaaaaaaaaaaaaaaaaaaaaaaaaaaa

SEQ ID NO: 10970 - DNA, 5264 bp, synthetic construct
  source 1..5264: mol_type = other DNA
gaaataagagagaaaagaagagtaagaagaaatataagagaattcgccaccatggcccctaagaaaaagcggaaggtgaatatcagcggctctagctgcggcagccccaacagcgccgacaccagcagcgacttcaaggacctgtggaccaagctgaaggaatgccacgaccgggaagtgcagggactccaggtgaaggtcaccaaactcaagcaagaaagaatcctggacgcccagagactggaagaattcttcaccaagaaccagcagctgagagagcagcagaaagtgctgcacgagacaatcaaggttctggaagatagactgcgggccggcctgtgcgacagatgcgccgtgaccgaggaacacatgcgcaaaaagcagcaggagttcgagaacattagacagcaaaatctgaaattgatcacagagctgatgaacgagagaaacacactgcaggaggagaacaagaagctgagcgagcagctgcaacagaagatcgagaatgatcagcaacaccaggccgctgagctggaatgtgaagaggacgtgatccccgacagcccaatcacagctttcagcttttctggcgtgaacagactgaggcggaaggaaaacccccacgtgcggtacatcgagcagacccataccaagctggaacacagcgtgtgtgccaacgagatgagaaaggtgtccaagtcctccacccatccccagcacaaccctaacgaaaatgagatcctggtggctgatacctacgaccagtctcagagccctatggccaaggcccacggcaccagctcttatacccctgataagagctccttcaacctggccaccgtggtggccgagacactgggcctgggcgtgcaggaggaaagcgagacacagggcccaatgagccctctgggagatgagctgtaccactgcctggaaggcaaccacaagaaacagccttttgagtccggctccgagactcctggaacaagcgagagcgctacacctgagggcagccctaagagaaaggtgtccagcgccgagggcgctgccaaggaagagcctaaacggagaagcgccagactgagcgccaagccccccgccaaggtggaagccaagcctaagaaggccgccgctaaggacaagagcagcgataagaaagtccagaccaagggcaagcggggcgccaaaggcaaacaggccgaggtggccaaccaggagacaaaggaagatctgcctgctgagaacggcgaaaccaagaccgaggaatctccagcttctgacgaggccggagagaaggaggccaaaagcgacagcggctctgagacacctggaacaagcgagagcgccaccccggaatcctatgaacaacttgcaccacaaccgtgtgtgggagaaactttacattctagcctcccacgagacagtgaactgtttgtgcctgaagaggggagcagcgagaaggagagcgaggacgcgccaaaaacatctcctccgacgcctgggaaacatggtttggaacagactggggaggaaaaagtgatggtgactgttcctgacaaaaatccaccttgtccttgctgtggtacccgggtaaactctgtgttgaatctgattgaacatctgaaagtgtcacacgggaaaaggggggtttgttttcggtgtgcaaaatgtggaaaggaaaatagtaactatcacagtgttgtttgtcattttaagaaatgcaggggtccagagacggagaaagccccagctggggagtggatttgtgaggtatgcaacagagattttacaaccaaaattggcctgggacaacacaagagattggcacacccagcagtgagaaatcaggaaaggatcgttgcttcccaaccgaaagaaacatcaaatagaggtgctcacaaaaggtgctggacaaaggaggaggaagaattactaataagactggaggctcagttcgagggaaacaaaaatattaataagcttctggcagaacacataaccaccaaaacagctaagcagatcagtgacaaaaggcgattgctgtccagaaagccagcagaggagccacgtgaggagcctggaacgtgtcatcacaccaggagagcagctgcgagcctgagaacggagcctgagatgagtcatcacgcccaggcagaggacagagataatggacctgggagacgccctctgccaggcagggcagctgccggagggagaacaatggacgagataagacgccaccctgataagggcaacggacagcagagacccaccaagcaaaaatcagaagaacagctgcaggcttactataaaaagacactagaggaacgactttcagctggggcacttaacaccttcccccgagcattcaagcaggtaatggaaggccgggatataaagctagtaatcaatcagacagcgcaggactgcttcggatgcctggaatccataagccaaataagaacggcaacccgagataaaaaggacacggtgacccgggagaaacacccaaagaaaccttttcagaagtggatgaagaagagagcaatcaaaaaaggtaattatcttcggttccagcgtttattttatcttgatagagggaaactggctaaaatcattttagatgatattgaatgcttgtcttgtgacataccactcagtgaaatttattcggtttttaaaacaagatgggaaacaactggtagctttaaaagccttggggactttaaaacttacgggaaggctgacaacactgccttcagagaattaattacggctaaagaaattgagaaaaatgtgcaggaaatgagcaaaggctcggctcccggtccagacgggattactcttggggacgtcgtaaagatggatcccgagttttcccggaccatggagattttcaatttatggttaacaactggtaaaatcccggacatggtgagggggtgcagaaccgttttgattccaaaatcatcaaagccggatcgtttgaaagacattaataactggagacctatcacgatcggttccatcttgctgagactgttctccaggattgtaacagctaggctgagcaaagcgtgccccctgaacccaaggcaaagaggctttatcagagcggcgggatgctctgaaaacttaaaactcctgcaaactataatttggtcggccaaaagagaacacagaccactgggtgttgtattcgtggacatcgccaaggcttttgacaccgtaagccaccagcacatcattcatgctttgcagcaaagagaggtggatccccacatcgtcggtctggtgagcaatatgtacgagaacatcagtacgtatatcaccacaaagaggaacacacacacagacaaaatccagatccgggttggagtaaagcagggtgacccgatgtcgccccttttatttaacctggcaatggaccctctattatgcaagctggaagagagtggcaaaggataccaccgaggacagagcagcatcacagcgatggcatttgcagacgatctggttttgctgagcgactcctgggaaaatatgaatacaaatattagcatactggagaccttctgcaatctgaccggactcaaaacacaggggcaaaagtgccacggcttttacatcaagccgacaaagaagtcttacaccatcaatgactgcgctgcctggactatcaacggcacacccctgaacatgatcgaccccggcgaatctgagaaatacctcggcctgcagtttgacccgtggattggaatagcaaggtccggtctctccacaaaactagatttttggcttcagcggatcgatcaagcaccacttaaacctctgcagaaaactgatattctcaaaacatacaccatccctcggctgatctacatagctgaccactcagaagtgaaaagcgcactactcgaaacccttgaccagaagatccggacagcggtcaaggaatggcttcacctacctccgtgcacctgcgatgccatcctgtactcgagcacgagagacggcggtttgggcatcaccaaattggcaggactgatccccagcgtgcaggcccgtagactgcatcggatcgcacagtcatctgacgatacgatgaaatgcttcatggaaaaagagaaaatggaacagctgcataagaaattgtggattcaagctggaggggacagagagaacataccctcgatttgggaagcaccaccgtcgagtgaaccaccaaacaacgtgagcacaaattcggaatgggaagcaccgacccagaaagataaatttccaaagccttgcaattggaggaaaaacgaattcaaaaaatggaccaaattggcatcccaaggccgcggaattgtaaattttgaaagagacaaaattagtaaccattggatccaatactacagacgcatacctcacaggaaactcctcactgcactacaactcagggccaacgtttaccccacgagagaatttctagccaggggtagacaagaccaatacatcaaggcgtgtaggcactgcgatgcggacaacgaatcctgcgcccacatcatcggcaactgcccagtgacacaggacgcccgaatcaagaggcacaattacatctgcgaactgcttctcgaggaggcgaagaagaaggactgggtagtgttcaaggaaccgcacataagggattccaacaaggaactgtacaaacctgacctgatatttgtgaaggatgggcgtgcacttgtcgtggatgtgacagtacggtatgaagcagccaaatcatcgctggaggaagccgctgcagagaaagtgagaaagtacaaacacctggaaacggaagtaagacatctcacgaatgcaaaggacgttacttttgtgggctttcccctaggagcgcgggggaaatggcaccaagataactttaaacttttgactgagcttggcctctccaaatcgaggcaagtgaaaatggcagagactttttccacagtagcgctcttttcatctgtggacattgtacatatgtttgccagtagggccagaaaatctatggttatgtgataataggctgccttctgcggggcttgccttctggccatgcccttcttctctcccttgcacctgtacctcttggtctttgaataaagcctgagtaggaaggaccggtaaaaaaaaaaaaaaaaaaaaaaaaaaaaaaacgttgactaaaaaaaaaaaaaaaaaaaaaaaaaaaaaaaaaaaaaaaaaaaaaaaaaaaaaaaaaaaaaaaaaaaaaa

SEQ ID NO: 10971 - DNA, 5264 bp, synthetic construct
  source 1..5264: mol_type = other DNA
gaaataagagagaaaagaagagtaagaagaaatataagagaattcgccaccatggcccctaagaaaaagcggaaggtgaatatcagcggctctagctgcggcagccccaacagcgccgacaccagcagcgacttcaaggacctgtggaccaagctgaaggaatgccacgaccgggaagtgcagggactccaggtgaaggtcaccaaactcaagcaagaaagaatcctggacgcccagagactggaagaattcttcaccaagaaccagcagctgagagagcagcagaaagtgctgcacgagacaatcaaggttctggaagatagactgcgggccggcctgtgcgacagatgcgccgtgaccgaggaacacatgcgcaaaaagcagcaggagttcgagaacattagacagcaaaatctgaaattgatcacagagctgatgaacgagagaaacacactgcaggaggagaacaagaagctgagcgagcagctgcaacagaagatcgagaatgatcagcaacaccaggccgctgagctggaatgtgaagaggacgtgatccccgacagcccaatcacagctttcagcttttctggcgtgaacagactgaggcggaaggaaaacccccacgtgcggtacatcgagcagacccataccaagctggaacacagcgtgtgtgccaacgagatgagaaaggtgtccaagtcctccacccatccccagcacaaccctaacgaaaatgagatcctggtggctgatacctacgaccagtctcagagccctatggccaaggcccacggcaccagctcttatacccctgataagagctccttcaacctggccaccgtggtggccgagacactgggcctgggcgtgcaggaggaaagcgagacacagggcccaatgagccctctgggagatgagctgtaccactgcctggaaggcaaccacaagaaacagccttttgagtccggctccgagactcctggaacaagcgagagcgctacacctgagggcagccctaagagaaaggtgtccagcgccgagggcgctgccaaggaagagcctaaacggagaagcgccagactgagcgccaagccccccgccaaggtggaagccaagcctaagaaggccgccgctaaggacaagagcagcgataagaaagtccagaccaagggcaagcggggcgccaaaggcaaacaggccgaggtggccaaccaggagacaaaggaagatctgcctgctgagaacggcgaaaccaagaccgaggaatctccagcttctgacgaggccggagagaaggaggccaaaagcgacagcggctctgagacacctggaacaagcgagagcgccaccccggaatcctatgaacaacttgcaccacaaccgtgtgtgggagaaactttacattctagcctcccacgagacagtgaactgtttgtgcctgaagaggggagcagcgagaaggagagcgaggacgcgccaaaaacatctcctccgacgcctgggaaacatggtttggaacagactggggaggaaaaagtgatggtgactgttcctgacaaaaatccaccttgtccttgctgtggtacccgggtaaactctgtgttgaatctgattgaacatctgaaagtgtcacacgggaaaaggggggtttgttttcggtgtgcaaaatgtggaaaggaaaatagtaactatcacagtgttgtttgtcattttaagaaatgcaggggtccagagacggagaaagccccagctggggagtggatttgtgaggtatgcaacagagattttacaaccaaaattggcctgggacaacacaagagattggcacacccagcagtgagaaatcaggaaaggatcgttgcttcccaaccgaaagaaacatcaaatagaggtgctcacaaaaggtgctggacaaaggaggaggaagaattactaataagactggaggctcagttcgagggaaacaaaaatattaataagcttattgcagaacacctgaccaccaaaacagctaagcagatcagtgacaaaaggcgattgctgtccagaaagccagcagaggagccacgtgaggagcctggaacgtgtcatcacaccaggagagcagctgcgagcctgagaacggagcctgagatgagtcatcacgcccaggcagaggacagagataatggacctgggagacgccctctgccaggcagggcagctgccggagggagaacaatggacgagataagacgccaccctgataagggcaacggacagcagagacccaccaagcaaaaatcagaagaacagctgcaggcttactataaaaagacactagaggaacgactttcagctggggcacttaacaccttcccccgagcattcaagcaggtaatggaaggccgggatataaagctagtaatcaatcagacagcgcaggactgcttcggatgcctggaatccataagccaaataagaacggcaacccgagataaaaaggacacggtgacccgggagaaacacccaaagaaaccttttcagaagtggatgaagaagagagcaatcaaaaaaggtaattatcttcggttccagcgtttattttatcttgatagagggaaactggctaaaatcattttagatgatattgaatgcttgtcttgtgacataccactcagtgaaatttattcggtttttaaaacaagatgggaaacaactggtagctttaaaagccttggggactttaaaacttacgggaaggctgacaacactgccttcagagaattaattacggctaaagaaattgagaaaaatgtgcaggaaatgagcaaaggctcggctcccggtccagacgggattactcttggggacgtcgtaaagatggatcccgagttttcccggaccatggagattttcaatttatggttaacaactggtaaaatcccggacatggtgagggggtgcagaaccgttttgattccaaaatcatcaaagccggatcgtttgaaagacattaataactggagacctatcacgatcggttccatcttgctgagactgttctccaggattgtaacagctaggctgagcaaagcgtgccccctgaacccaaggcaaagaggctttatcagagcggcgggatgctctgaaaacttaaaactcctgcaaactataatttggtcggccaaaagagaacacagaccactgggtgttgtattcgtggacatcgccaaggcttttgacaccgtaagccaccagcacatcattcatgctttgcagcaaagagaggtggatccccacatcgtcggtctggtgagcaatatgtacgagaacatcagtacgtatatcaccacaaagaggaacacacacacagacaaaatccagatccgggttggagtaaagcagggtgacccgatgtcgccccttttatttaacctggcaatggaccctctattatgcaagctggaagagagtggcaaaggataccaccgaggacagagcagcatcacagcgatggcatttgcagacgatctggttttgctgagcgactcctgggaaaatatgaatacaaatattagcatactggagaccttctgcaatctgaccggactcaaaacacaggggcaaaagtgccacggcttttacatcaagccgacaaagaagtcttacaccatcaatgactgcgctgcctggactatcaacggcacacccctgaacatgatcgaccccggcgaatctgagaaatacctcggcctgcagtttgacccgtggattggaatagcaaggtccggtctctccacaaaactagatttttggcttcagcggatcgatcaagcaccacttaaacctctgcagaaaactgatattctcaaaacatacaccatccctcggctgatctacatagctgaccactcagaagtgaaaagcgcactactcgaaacccttgaccagaagatccggacagcggtcaaggaatggcttcacctacctccgtgcacctgcgatgccatcctgtactcgagcacgagagacggcggtttgggcatcaccaaattggcaggactgatccccagcgtgcaggcccgtagactgcatcggatcgcacagtcatctgacgatacgatgaaatgcttcatggaaaaagagaaaatggaacagctgcataagaaattgtggattcaagctggaggggacagagagaacataccctcgatttgggaagcaccaccgtcgagtgaaccaccaaacaacgtgagcacaaattcggaatgggaagcaccgacccagaaagataaatttccaaagccttgcaattggaggaaaaacgaattcaaaaaatggaccaaattggcatcccaaggccgcggaattgtaaattttgaaagagacaaaattagtaaccattggatccaatactacagacgcatacctcacaggaaactcctcactgcactacaactcagggccaacgtttaccccacgagagaatttctagccaggggtagacaagaccaatacatcaaggcgtgtaggcactgcgatgcggacaacgaatcctgcgcccacatcatcggcaactgcccagtgacacaggacgcccgaatcaagaggcacaattacatctgcgaactgcttctcgaggaggcgaagaagaaggactgggtagtgttcaaggaaccgcacataagggattccaacaaggaactgtacaaacctgacctgatatttgtgaaggatgggcgtgcacttgtcgtggatgtgacagtacggtatgaagcagccaaatcatcgctggaggaagccgctgcagagaaagtgagaaagtacaaacacctggaaacggaagtaagacatctcacgaatgcaaaggacgttacttttgtgggctttcccctaggagcgcgggggaaatggcaccaagataactttaaacttttgactgagcttggcctctccaaatcgaggcaagtgaaaatggcagagactttttccacagtagcgctcttttcatctgtggacattgtacatatgtttgccagtagggccagaaaatctatggttatgtgataataggctgccttctgcggggcttgccttctggccatgcccttcttctctcccttgcacctgtacctcttggtctttgaataaagcctgagtaggaaggaccggtaaaaaaaaaaaaaaaaaaaaaaaaaaaaaaacgttgactaaaaaaaaaaaaaaaaaaaaaaaaaaaaaaaaaaaaaaaaaaaaaaaaaaaaaaaaaaaaaaaaaaaaaa

SEQ ID NO: 10972 - DNA, 5264 bp, synthetic construct
  source 1..5264: mol_type = other DNA
gaaataagagagaaaagaagagtaagaagaaatataagagaattcgccaccatggcccctaagaaaaagcggaaggtgaatatcagcggctctagctgcggcagccccaacagcgccgacaccagcagcgacttcaaggacctgtggaccaagctgaaggaatgccacgaccgggaagtgcagggactccaggtgaaggtcaccaaactcaagcaagaaagaatcctggacgcccagagactggaagaattcttcaccaagaaccagcagctgagagagcagcagaaagtgctgcacgagacaatcaaggttctggaagatagactgcgggccggcctgtgcgacagatgcgccgtgaccgaggaacacatgcgcaaaaagcagcaggagttcgagaacattagacagcaaaatctgaaattgatcacagagctgatgaacgagagaaacacactgcaggaggagaacaagaagctgagcgagcagctgcaacagaagatcgagaatgatcagcaacaccaggccgctgagctggaatgtgaagaggacgtgatccccgacagcccaatcacagctttcagcttttctggcgtgaacagactgaggcggaaggaaaacccccacgtgcggtacatcgagcagacccataccaagctggaacacagcgtgtgtgccaacgagatgagaaaggtgtccaagtcctccacccatccccagcacaaccctaacgaaaatgagatcctggtggctgatacctacgaccagtctcagagccctatggccaaggcccacggcaccagctcttatacccctgataagagctccttcaacctggccaccgtggtggccgagacactgggcctgggcgtgcaggaggaaagcgagacacagggcccaatgagccctctgggagatgagctgtaccactgcctggaaggcaaccacaagaaacagccttttgagtccggctccgagactcctggaacaagcgagagcgctacacctgagggcagccctaagagaaaggtgtccagcgccgagggcgctgccaaggaagagcctaaacggagaagcgccagactgagcgccaagccccccgccaaggtggaagccaagcctaagaaggccgccgctaaggacaagagcagcgataagaaagtccagaccaagggcaagcggggcgccaaaggcaaacaggccgaggtggccaaccaggagacaaaggaagatctgcctgctgagaacggcgaaaccaagaccgaggaatctccagcttctgacgaggccggagagaaggaggccaaaagcgacagcggctctgagacacctggaacaagcgagagcgccaccccggaatcctatgaacaacttgcaccacaaccgtgtgtgggagaaactttacattctagcctcccacgagacagtgaactgtttgtgcctgaagaggggagcagcgagaaggagagcgaggacgcgccaaaaacatctcctccgacgcctgggaaacatggtttggaacagactggggaggaaaaagtgatggtgactgttcctgacaaaaatccaccttgtccttgctgtggtacccgggtaaactctgtgttgaatctgattgaacatctgaaagtgtcacacgggaaaaggggggtttgttttcggtgtgcaaaatgtggaaaggaaaatagtaactatcacagtgttgtttgtcattttaagaaatgcaggggtccagagacggagaaagccccagctggggagtggatttgtgaggtatgcaacagagattttacaaccaaaattggcctgggacaacacaagagattggcacacccagcagtgagaaatcaggaaaggatcgttgcttcccaaccgaaagaaacatcaaatagaggtgctcacaaaaggtgctggacaaaggaggaggaagaattactaataagactggaggctcagttcgagggaaacaaaaatattaataagcttattgcagaacacataaccaccaaaacagctaagcagatcagtgacaaaaggcgattgctgtccagaaagccagcagaggagccacgtgaggagcctggaacgtgtcatcacaccaggagagcagctgcgagcctgagaacggagcctgagatgagtcatcacgcccaggcagaggacagagataatggacctgggagacgccctctgccaggcagggcagctgccggagggagaacaatggacgagataagacgccaccctgataagggcaacggacagcagagacccaccaagcaaaaatcagaagaacagctgcaggcttactataaaaagacactagaggaacgactttcagctggggcacttaacaccttcccccgagcattcaagcaggtaatggaaggccgggatataaagctagtaatcaatcagacagcgcaggactgcttcggatgcctggaatccataagccaaataagaacggcaacccgagataaaaaggacacggtgacccgggagaaacacccaaagaaaccttttcagaagtggatgaagaagagagcaatcaaaaaaggtaattatcttcggttccagcgtttatactatcttgatagagggaaactggctaaaatcattttagatgatattgaatgcttgtcttgtgacataccactcagtgaaatttattcggtttttaaaacaagatgggaaacaactggtagctttaaaagccttggggactttaaaacttacgggaaggctgacaacactgccttcagagaattaattacggctaaagaaattgagaaaaatgtgcaggaaatgagcaaaggctcggctcccggtccagacgggattactcttggggacgtcgtaaagatggatcccgagttttcccggaccatggagattttcaatttatggttaacaactggtaaaatcccggacatggtgagggggtgcagaaccgttttgattccaaaatcatcaaagccggatcgtttgaaagacattaataactggagacctatcacgatcggttccatcttgctgagactgttctccaggattgtaacagctaggctgagcaaagcgtgccccctgaacccaaggcaaagaggctttatcagagcggcgggatgctctgaaaacttaaaactcctgcaaactataatttggtcggccaaaagagaacacagaccactgggtgttgtattcgtggacatcgccaaggcttttgacaccgtaagccaccagcacatcattcatgctttgcagcaaagagaggtggatccccacatcgtcggtctggtgagcaatatgtacgagaacatcagtacgtatatcaccacaaagaggaacacacacacagacaaaatccagatccgggttggagtaaagcagggtgacccgatgtcgccccttttatttaacctggcaatggaccctctattatgcaagctggaagagagtggcaaaggataccaccgaggacagagcagcatcacagcgatggcatttgcagacgatctggttttgctgagcgactcctgggaaaatatgaatacaaatattagcatactggagaccttctgcaatctgaccggactcaaaacacaggggcaaaagtgccacggcttttacatcaagccgacaaagaagtcttacaccatcaatgactgcgctgcctggactatcaacggcacacccctgaacatgatcgaccccggcgaatctgagaaatacctcggcctgcagtttgacccgtggattggaatagcaaggtccggtctctccacaaaactagatttttggcttcagcggatcgatcaagcaccacttaaacctctgcagaaaactgatattctcaaaacatacaccatccctcggctgatctacatagctgaccactcagaagtgaaaagcgcactactcgaaacccttgaccagaagatccggacagcggtcaaggaatggcttcacctacctccgtgcacctgcgatgccatcctgtactcgagcacgagagacggcggtttgggcatcaccaaattggcaggactgatccccagcgtgcaggcccgtagactgcatcggatcgcacagtcatctgacgatacgatgaaatgcttcatggaaaaagagaaaatggaacagctgcataagaaattgtggattcaagctggaggggacagagagaacataccctcgatttgggaagcaccaccgtcgagtgaaccaccaaacaacgtgagcacaaattcggaatgggaagcaccgacccagaaagataaatttccaaagccttgcaattggaggaaaaacgaattcaaaaaatggaccaaattggcatcccaaggccgcggaattgtaaattttgaaagagacaaaattagtaaccattggatccaatactacagacgcatacctcacaggaaactcctcactgcactacaactcagggccaacgtttaccccacgagagaatttctagccaggggtagacaagaccaatacatcaaggcgtgtaggcactgcgatgcggacaacgaatcctgcgcccacatcatcggcaactgcccagtgacacaggacgcccgaatcaagaggcacaattacatctgcgaactgcttctcgaggaggcgaagaagaaggactgggtagtgttcaaggaaccgcacataagggattccaacaaggaactgtacaaacctgacctgatatttgtgaaggatgggcgtgcacttgtcgtggatgtgacagtacggtatgaagcagccaaatcatcgctggaggaagccgctgcagagaaagtgagaaagtacaaacacctggaaacggaagtaagacatctcacgaatgcaaaggacgttacttttgtgggctttcccctaggagcgcgggggaaatggcaccaagataactttaaacttttgactgagcttggcctctccaaatcgaggcaagtgaaaatggcagagactttttccacagtagcgctcttttcatctgtggacattgtacatatgtttgccagtagggccagaaaatctatggttatgtgataataggctgccttctgcggggcttgccttctggccatgcccttcttctctcccttgcacctgtacctcttggtctttgaataaagcctgagtaggaaggaccggtaaaaaaaaaaaaaaaaaaaaaaaaaaaaaaacgttgactaaaaaaaaaaaaaaaaaaaaaaaaaaaaaaaaaaaaaaaaaaaaaaaaaaaaaaaaaaaaaaaaaaaaaa

SEQ ID NO: 10973 - skipped

SEQ ID NO: 10974 - DNA, 5264 bp, synthetic construct
  source 1..5264: mol_type = other DNA
gaaataagagagaaaagaagagtaagaagaaatataagagaattcgccaccatggcccctaagaaaaagcggaaggtgaatatcagcggctctagctgcggcagccccaacagcgccgacaccagcagcgacttcaaggacctgtggaccaagctgaaggaatgccacgaccgggaagtgcagggactccaggtgaaggtcaccaaactcaagcaagaaagaatcctggacgcccagagactggaagaattcttcaccaagaaccagcagctgagagagcagcagaaagtgctgcacgagacaatcaaggttctggaagatagactgcgggccggcctgtgcgacagatgcgccgtgaccgaggaacacatgcgcaaaaagcagcaggagttcgagaacattagacagcaaaatctgaaattgatcacagagctgatgaacgagagaaacacactgcaggaggagaacaagaagctgagcgagcagctgcaacagaagatcgagaatgatcagcaacaccaggccgctgagctggaatgtgaagaggacgtgatccccgacagcccaatcacagctttcagcttttctggcgtgaacagactgaggcggaaggaaaacccccacgtgcggtacatcgagcagacccataccaagctggaacacagcgtgtgtgccaacgagatgagaaaggtgtccaagtcctccacccatccccagcacaaccctaacgaaaatgagatcctggtggctgatacctacgaccagtctcagagccctatggccaaggcccacggcaccagctcttatacccctgataagagctccttcaacctggccaccgtggtggccgagacactgggcctgggcgtgcaggaggaaagcgagacacagggcccaatgagccctctgggagatgagctgtaccactgcctggaaggcaaccacaagaaacagccttttgagtccggctccgagactcctggaacaagcgagagcgctacacctgagggcagccctaagagaaaggtgtccagcgccgagggcgctgccaaggaagagcctaaacggagaagcgccagactgagcgccaagccccccgccaaggtggaagccaagcctaagaaggccgccgctaaggacaagagcagcgataagaaagtccagaccaagggcaagcggggcgccaaaggcaaacaggccgaggtggccaaccaggagacaaaggaagatctgcctgctgagaacggcgaaaccaagaccgaggaatctccagcttctgacgaggccggagagaaggaggccaaaagcgacagcggctctgagacacctggaacaagcgagagcgccaccccggaatcctatgaacaacttgcaccacaaccgtgtgtgggagaaactttacattctagcctcccacgagacagtgaactgtttgtgcctgaagaggggagcagcgagaaggagagcgaggacgcgccaaaaacatctcctccgacgcctgggaaacatggtttggaacagactggggaggaaaaagtgatggtgactgttcctgacaaaaatccaccttgtccttgctgtggtacccgggtaaactctgtgttgaatctgattgaacatctgaaagtgtcacacgggaaaaggggggtttgttttcggtgtgcaaaatgtggaaaggaaaatagtaactatcacagtgttgtttgtcattttaagaaatgcaggggtccagagacggagaaagccccagctggggagtggatttgtgaggtatgcaacagagattttacaaccaaaattggcctgggacaacacaagagattggcacacccagcagtgagaaatcaggaaaggatcgttgcttcccaaccgaaagaaacatcaaatagaggtgctcacaaaaggtgctggacaaaggaggaggaagaattactaataagactggaggctcagttcgagggaaacaaaaatattaataagcttattgcagaacacataaccaccaaaacagctaagcagatcagtgacaaaaggcgattgctgtccagaaagccagcagaggagccacgtgaggagcctggaacgtgtcatcacaccaggagagcagctgcgagcctgagaacggagcctgagatgagtcatcacgcccaggcagaggacagagataatggacctgggagacgccctctgccaggcagggcagctgccggagggagaacaatggacgagataagacgccaccctgataagggcaacggacagcagagacccaccaagcaaaaatcagaagaacagctgcaggcttactataaaaagacactagaggaacgactttcagctggggcacttaacaccttcccccgagcattcaagcaggtaatggaaggccgggatataaagctagtaatcaatcagacagcgcaggactgcttcggatgcctggaatccataagccaaataagaacggcaacccgagataaaaaggacacggtgacccgggagaaacacccaaagaaaccttttcagaagtggatgaagaagagagcaatcaaaaaaggtaattatcttcggttccagcgtttattttatcttgatagagggaaactggctaaaatcattttagatgatattgaatgcttgtcttgtgacataccactcagtgaaatttattcggtttttaaaacaagatgggaaacaactggtagctttaaaagccttggggactttaaaacttacgggaaggctgacaacactgccttcagagaattaattacggctaaagaaattgagaaaaatgtgcaggaaatgagcaaaggctcggctcccggtccagacgggattactcttggggacgtcgtaaagatggatcccgagttttcccggaccatggagattttcaatttatggttaacaactggtaaaatcccggacatgctgagggggtgcagaaccgttttgattccaaaatcatcaaagccggatcgtttgaaagacattaataactggagacctatcacgatcggttccatcttgctgagactgttctccaggattgtaacagctaggctgagcaaagcgtgccccctgaacccaaggcaaagaggctttatcagagcggcgggatgctctgaaaacttaaaactcctgcaaactataatttggtcggccaaaagagaacacagaccactgggtgttgtattcgtggacatcgccaaggcttttgacaccgtaagccaccagcacatcattcatgctttgcagcaaagagaggtggatccccacatcgtcggtctggtgagcaatatgtacgagaacatcagtacgtatatcaccacaaagaggaacacacacacagacaaaatccagatccgggttggagtaaagcagggtgacccgatgtcgccccttttatttaacctggcaatggaccctctattatgcaagctggaagagagtggcaaaggataccaccgaggacagagcagcatcacagcgatggcatttgcagacgatctggttttgctgagcgactcctgggaaaatatgaatacaaatattagcatactggagaccttctgcaatctgaccggactcaaaacacaggggcaaaagtgccacggcttttacatcaagccgacaaagaagtcttacaccatcaatgactgcgctgcctggactatcaacggcacacccctgaacatgatcgaccccggcgaatctgagaaatacctcggcctgcagtttgacccgtggattggaatagcaaggtccggtctctccacaaaactagatttttggcttcagcggatcgatcaagcaccacttaaacctctgcagaaaactgatattctcaaaacatacaccatccctcggctgatctacatagctgaccactcagaagtgaaaagcgcactactcgaaacccttgaccagaagatccggacagcggtcaaggaatggcttcacctacctccgtgcacctgcgatgccatcctgtactcgagcacgagagacggcggtttgggcatcaccaaattggcaggactgatccccagcgtgcaggcccgtagactgcatcggatcgcacagtcatctgacgatacgatgaaatgcttcatggaaaaagagaaaatggaacagctgcataagaaattgtggattcaagctggaggggacagagagaacataccctcgatttgggaagcaccaccgtcgagtgaaccaccaaacaacgtgagcacaaattcggaatgggaagcaccgacccagaaagataaatttccaaagccttgcaattggaggaaaaacgaattcaaaaaatggaccaaattggcatcccaaggccgcggaattgtaaattttgaaagagacaaaattagtaaccattggatccaatactacagacgcatacctcacaggaaactcctcactgcactacaactcagggccaacgtttaccccacgagagaatttctagccaggggtagacaagaccaatacatcaaggcgtgtaggcactgcgatgcggacaacgaatcctgcgcccacatcatcggcaactgcccagtgacacaggacgcccgaatcaagaggcacaattacatctgcgaactgcttctcgaggaggcgaagaagaaggactgggtagtgttcaaggaaccgcacataagggattccaacaaggaactgtacaaacctgacctgatatttgtgaaggatgggcgtgcacttgtcgtggatgtgacagtacggtatgaagcagccaaatcatcgctggaggaagccgctgcagagaaagtgagaaagtacaaacacctggaaacggaagtaagacatctcacgaatgcaaaggacgttacttttgtgggctttcccctaggagcgcgggggaaatggcaccaagataactttaaacttttgactgagcttggcctctccaaatcgaggcaagtgaaaatggcagagactttttccacagtagcgctcttttcatctgtggacattgtacatatgtttgccagtagggccagaaaatctatggttatgtgataataggctgccttctgcggggcttgccttctggccatgcccttcttctctcccttgcacctgtacctcttggtctttgaataaagcctgagtaggaaggaccggtaaaaaaaaaaaaaaaaaaaaaaaaaaaaaaacgttgactaaaaaaaaaaaaaaaaaaaaaaaaaaaaaaaaaaaaaaaaaaaaaaaaaaaaaaaaaaaaaaaaaaaaaa

SEQ ID NO: 10975 - DNA, 5264 bp, synthetic construct
  source 1..5264: mol_type = other DNA
gaaataagagagaaaagaagagtaagaagaaatataagagaattcgccaccatggcccctaagaaaaagcggaaggtgaatatcagcggctctagctgcggcagccccaacagcgccgacaccagcagcgacttcaaggacctgtggaccaagctgaaggaatgccacgaccgggaagtgcagggactccaggtgaaggtcaccaaactcaagcaagaaagaatcctggacgcccagagactggaagaattcttcaccaagaaccagcagctgagagagcagcagaaagtgctgcacgagacaatcaaggttctggaagatagactgcgggccggcctgtgcgacagatgcgccgtgaccgaggaacacatgcgcaaaaagcagcaggagttcgagaacattagacagcaaaatctgaaattgatcacagagctgatgaacgagagaaacacactgcaggaggagaacaagaagctgagcgagcagctgcaacagaagatcgagaatgatcagcaacaccaggccgctgagctggaatgtgaagaggacgtgatccccgacagcccaatcacagctttcagcttttctggcgtgaacagactgaggcggaaggaaaacccccacgtgcggtacatcgagcagacccataccaagctggaacacagcgtgtgtgccaacgagatgagaaaggtgtccaagtcctccacccatccccagcacaaccctaacgaaaatgagatcctggtggctgatacctacgaccagtctcagagccctatggccaaggcccacggcaccagctcttatacccctgataagagctccttcaacctggccaccgtggtggccgagacactgggcctgggcgtgcaggaggaaagcgagacacagggcccaatgagccctctgggagatgagctgtaccactgcctggaaggcaaccacaagaaacagccttttgagtccggctccgagactcctggaacaagcgagagcgctacacctgagggcagccctaagagaaaggtgtccagcgccgagggcgctgccaaggaagagcctaaacggagaagcgccagactgagcgccaagccccccgccaaggtggaagccaagcctaagaaggccgccgctaaggacaagagcagcgataagaaagtccagaccaagggcaagcggggcgccaaaggcaaacaggccgaggtggccaaccaggagacaaaggaagatctgcctgctgagaacggcgaaaccaagaccgaggaatctccagcttctgacgaggccggagagaaggaggccaaaagcgacagcggctctgagacacctggaacaagcgagagcgccaccccggaatcctatgaacaacttgcaccacaaccgtgtgtgggagaaactttacattctagcctcccacgagacagtgaactgtttgtgcctgaagaggggagcagcgagaaggagagcgaggacgcgccaaaaacatctcctccgacgcctgggaaacatggtttggaacagactggggaggaaaaagtgatggtgactgttcctgacaaaaatccaccttgtccttgctgtggtacccgggtaaactctgtgttgaatctgattgaacatctgaaagtgtcacacgggaaaaggggggtttgttttcggtgtgcaaaatgtggaaaggaaaatagtaactatcacagtgttgtttgtcattttaagaaatgcaggggtccagagacggagaaagccccagctggggagtggatttgtgaggtatgcaacagagattttacaaccaaaattggcctgggacaacacaagagattggcacacccagcagtgagaaatcaggaaaggatcgttgcttcccaaccgaaagaaacatcaaatagaggtgctcacaaaaggtgctggacaaaggaggaggaagaattactaataagactggaggctcagttcgagggaaacaaaaatattaataagcttattgcagaacacataaccaccaaaacagctaagcagatcagtgacaaaaggcgattgctgtccagaaagccagcagaggagccacgtgaggagcctggaacgtgtcatcacaccaggagagcagctgcgagcctgagaacggagcctgagatgagtcatcacgcccaggcagaggacagagataatggacctgggagacgccctctgccaggcagggcagctgccggagggagaacaatggacgagataagacgccaccctgataagggcaacggacagcagagacccaccaagcaaaaatcagaagaacagctgcaggcttactataaaaagacactagaggaacgactttcagctggggcacttaacaccttcccccgagcattcaagcaggtaatggaaggccgggatataaagctagtaatcaatcagacagcgcaggactgcttcggatgcctggaatccataagccaaataagaacggcaacccgagataaaaaggacacggtgacccgggagaaacacccaaagaaaccttttcagaagtggatgaagaagagagcaatcaaaaaaggtaattatcttcggttccagcgtttattttatcttgatagagggaaactggctaaaatcattttagatgatattgaatgcttgtcttgtgacataccactcagtgaaatttattcggtttttaaaacaagatgggaaacaactggtagctttaaaagccttggggactttaaaacttacgggaaggctgacaacactgccttcagagaattaattacggctaaagaaattgagaaaaatgtgcaggaaatgagcaaaggctcggctcccggtccagacgggattactcttggggacgtcgtaaagatggatcccgagttttcccggaccatggagattttcaatttatggttaacaactggtaaaatcccggacatggtgagggggagcagaaccgttttgattccaaaatcatcaaagccggatcgtttgaaagacattaataactggagacctatcacgatcggttccatcttgctgagactgttctccaggattgtaacagctaggctgagcaaagcgtgccccctgaacccaaggcaaagaggctttatcagagcggcgggatgctctgaaaacttaaaactcctgcaaactataatttggtcggccaaaagagaacacagaccactgggtgttgtattcgtggacatcgccaaggcttttgacaccgtaagccaccagcacatcattcatgctttgcagcaaagagaggtggatccccacatcgtcggtctggtgagcaatatgtacgagaacatcagtacgtatatcaccacaaagaggaacacacacacagacaaaatccagatccgggttggagtaaagcagggtgacccgatgtcgccccttttatttaacctggcaatggaccctctattatgcaagctggaagagagtggcaaaggataccaccgaggacagagcagcatcacagcgatggcatttgcagacgatctggttttgctgagcgactcctgggaaaatatgaatacaaatattagcatactggagaccttctgcaatctgaccggactcaaaacacaggggcaaaagtgccacggcttttacatcaagccgacaaagaagtcttacaccatcaatgactgcgctgcctggactatcaacggcacacccctgaacatgatcgaccccggcgaatctgagaaatacctcggcctgcagtttgacccgtggattggaatagcaaggtccggtctctccacaaaactagatttttggcttcagcggatcgatcaagcaccacttaaacctctgcagaaaactgatattctcaaaacatacaccatccctcggctgatctacatagctgaccactcagaagtgaaaagcgcactactcgaaacccttgaccagaagatccggacagcggtcaaggaatggcttcacctacctccgtgcacctgcgatgccatcctgtactcgagcacgagagacggcggtttgggcatcaccaaattggcaggactgatccccagcgtgcaggcccgtagactgcatcggatcgcacagtcatctgacgatacgatgaaatgcttcatggaaaaagagaaaatggaacagctgcataagaaattgtggattcaagctggaggggacagagagaacataccctcgatttgggaagcaccaccgtcgagtgaaccaccaaacaacgtgagcacaaattcggaatgggaagcaccgacccagaaagataaatttccaaagccttgcaattggaggaaaaacgaattcaaaaaatggaccaaattggcatcccaaggccgcggaattgtaaattttgaaagagacaaaattagtaaccattggatccaatactacagacgcatacctcacaggaaactcctcactgcactacaactcagggccaacgtttaccccacgagagaatttctagccaggggtagacaagaccaatacatcaaggcgtgtaggcactgcgatgcggacaacgaatcctgcgcccacatcatcggcaactgcccagtgacacaggacgcccgaatcaagaggcacaattacatctgcgaactgcttctcgaggaggcgaagaagaaggactgggtagtgttcaaggaaccgcacataagggattccaacaaggaactgtacaaacctgacctgatatttgtgaaggatgggcgtgcacttgtcgtggatgtgacagtacggtatgaagcagccaaatcatcgctggaggaagccgctgcagagaaagtgagaaagtacaaacacctggaaacggaagtaagacatctcacgaatgcaaaggacgttacttttgtgggctttcccctaggagcgcgggggaaatggcaccaagataactttaaacttttgactgagcttggcctctccaaatcgaggcaagtgaaaatggcagagactttttccacagtagcgctcttttcatctgtggacattgtacatatgtttgccagtagggccagaaaatctatggttatgtgataataggctgccttctgcggggcttgccttctggccatgcccttcttctctcccttgcacctgtacctcttggtctttgaataaagcctgagtaggaaggaccggtaaaaaaaaaaaaaaaaaaaaaaaaaaaaaaacgttgactaaaaaaaaaaaaaaaaaaaaaaaaaaaaaaaaaaaaaaaaaaaaaaaaaaaaaaaaaaaaaaaaaaaaaa

SEQ ID NO: 10976 - DNA, 5264 bp, synthetic construct
  source 1..5264: mol_type = other DNA
gaaataagagagaaaagaagagtaagaagaaatataagagaattcgccaccatggcccctaagaaaaagcggaaggtgaatatcagcggctctagctgcggcagccccaacagcgccgacaccagcagcgacttcaaggacctgtggaccaagctgaaggaatgccacgaccgggaagtgcagggactccaggtgaaggtcaccaaactcaagcaagaaagaatcctggacgcccagagactggaagaattcttcaccaagaaccagcagctgagagagcagcagaaagtgctgcacgagacaatcaaggttctggaagatagactgcgggccggcctgtgcgacagatgcgccgtgaccgaggaacacatgcgcaaaaagcagcaggagttcgagaacattagacagcaaaatctgaaattgatcacagagctgatgaacgagagaaacacactgcaggaggagaacaagaagctgagcgagcagctgcaacagaagatcgagaatgatcagcaacaccaggccgctgagctggaatgtgaagaggacgtgatccccgacagcccaatcacagctttcagcttttctggcgtgaacagactgaggcggaaggaaaacccccacgtgcggtacatcgagcagacccataccaagctggaacacagcgtgtgtgccaacgagatgagaaaggtgtccaagtcctccacccatccccagcacaaccctaacgaaaatgagatcctggtggctgatacctacgaccagtctcagagccctatggccaaggcccacggcaccagctcttatacccctgataagagctccttcaacctggccaccgtggtggccgagacactgggcctgggcgtgcaggaggaaagcgagacacagggcccaatgagccctctgggagatgagctgtaccactgcctggaaggcaaccacaagaaacagccttttgagtccggctccgagactcctggaacaagcgagagcgctacacctgagggcagccctaagagaaaggtgtccagcgccgagggcgctgccaaggaagagcctaaacggagaagcgccagactgagcgccaagccccccgccaaggtggaagccaagcctaagaaggccgccgctaaggacaagagcagcgataagaaagtccagaccaagggcaagcggggcgccaaaggcaaacaggccgaggtggccaaccaggagacaaaggaagatctgcctgctgagaacggcgaaaccaagaccgaggaatctccagcttctgacgaggccggagagaaggaggccaaaagcgacagcggctctgagacacctggaacaagcgagagcgccaccccggaatcctatgaacaacttgcaccacaaccgtgtgtgggagaaactttacattctagcctcccacgagacagtgaactgtttgtgcctgaagaggggagcagcgagaaggagagcgaggacgcgccaaaaacatctcctccgacgcctgggaaacatggtttggaacagactggggaggaaaaagtgatggtgactgttcctgacaaaaatccaccttgtccttgctgtggtacccgggtaaactctgtgttgaatctgattgaacatctgaaagtgtcacacgggaaaaggggggtttgttttcggtgtgcaaaatgtggaaaggaaaatagtaactatcacagtgttgtttgtcattttaagaaatgcaggggtccagagacggagaaagccccagctggggagtggatttgtgaggtatgcaacagagattttacaaccaaaattggcctgggacaacacaagagattggcacacccagcagtgagaaatcaggaaaggatcgttgcttcccaaccgaaagaaacatcaaatagaggtgctcacaaaaggtgctggacaaaggaggaggaagaattactaataagactggaggctcagttcgagggaaacaaaaatattaataagcttattgcagaacacataaccaccaaaacagctaagcagatcagtgacaaaaggcgattgctgtccagaaagccagcagaggagccacgtgaggagcctggaacgtgtcatcacaccaggagagcagctgcgagcctgagaacggagcctgagatgagtcatcacgcccaggcagaggacagagataatggacctgggagacgccctctgccaggcagggcagctgccggagggagaacaatggacgagataagacgccaccctgataagggcaacggacagcagagacccaccaagcaaaaatcagaagaacagctgcaggcttactataaaaagacactagaggaacgactttcagctggggcacttaacaccttcccccgagcattcaagcaggtaatggaaggccgggatataaagctagtaatcaatcagacagcgcaggactgcttcggatgcctggaatccataagccaaataagaacggcaacccgagataaaaaggacacggtgacccgggagaaacacccaaagaaaccttttcagaagtggatgaagaagagagcaatcaaaaaaggtaattatcttcggttccagcgtttattttatcttgatagagggaaactggctaaaatcattttagatgatattgaatgcttgtcttgtgacataccactcagtgaaatttattcggtttttaaaacaagatgggaaacaactggtagctttaaaagccttggggactttaaaacttacgggaaggctgacaacactgccttcagagaattaattacggctaaagaaattgagaaaaatgtgcaggaaatgagcaaaggctcggctcccggtccagacgggattactcttggggacgtcgtaaagatggatcccgagttttcccggaccatggagattttcaatttatggttaacaactggtaaaatcccggacatggtgagggggtgcagaaccgttttgattccaaaatcatcaaagccggatcgtttgaaagacattaataactggagacctatcacgatcggttccatcttgctgagactgttctccaggattgtaacagctaggctgagcaaagcgtgccccctgaacccaaggcaaagaggctttatcagagcggcgggatgctctgaaaacttaaaactcctgcaaactataatttggtcggccaaaagagaacacagaccactgggtgttgtattcgtggacatcgccaaggcttttgacaccgtaagccaccagcacatcattcatgctttgcagcaaagagaggtggatccccacatcgtcggtctggtgagcaatatgtacgagaacatcagtacgtatatcaccacaaagaggaacacacacacagacaaaatccagatccgggttggagtaaagcagggtgacccgatgtcgccccttttatttaacctggcaatggaccctctattatgcaagctggaagagagtggcaaaggataccaccgaggacagagcagcatcacagcgatggcatttgcagacgatctggttttgctgagcgactcctgggaaaatatgaatacaaatattagcctgctggagaccttctgcaatctgaccggactcaaaacacaggggcaaaagtgccacggcttttacatcaagccgacaaagaagtcttacaccatcaatgactgcgctgcctggactatcaacggcacacccctgaacatgatcgaccccggcgaatctgagaaatacctcggcctgcagtttgacccgtggattggaatagcaaggtccggtctctccacaaaactagatttttggcttcagcggatcgatcaagcaccacttaaacctctgcagaaaactgatattctcaaaacatacaccatccctcggctgatctacatagctgaccactcagaagtgaaaagcgcactactcgaaacccttgaccagaagatccggacagcggtcaaggaatggcttcacctacctccgtgcacctgcgatgccatcctgtactcgagcacgagagacggcggtttgggcatcaccaaattggcaggactgatccccagcgtgcaggcccgtagactgcatcggatcgcacagtcatctgacgatacgatgaaatgcttcatggaaaaagagaaaatggaacagctgcataagaaattgtggattcaagctggaggggacagagagaacataccctcgatttgggaagcaccaccgtcgagtgaaccaccaaacaacgtgagcacaaattcggaatgggaagcaccgacccagaaagataaatttccaaagccttgcaattggaggaaaaacgaattcaaaaaatggaccaaattggcatcccaaggccgcggaattgtaaattttgaaagagacaaaattagtaaccattggatccaatactacagacgcatacctcacaggaaactcctcactgcactacaactcagggccaacgtttaccccacgagagaatttctagccaggggtagacaagaccaatacatcaaggcgtgtaggcactgcgatgcggacaacgaatcctgcgcccacatcatcggcaactgcccagtgacacaggacgcccgaatcaagaggcacaattacatctgcgaactgcttctcgaggaggcgaagaagaaggactgggtagtgttcaaggaaccgcacataagggattccaacaaggaactgtacaaacctgacctgatatttgtgaaggatgggcgtgcacttgtcgtggatgtgacagtacggtatgaagcagccaaatcatcgctggaggaagccgctgcagagaaagtgagaaagtacaaacacctggaaacggaagtaagacatctcacgaatgcaaaggacgttacttttgtgggctttcccctaggagcgcgggggaaatggcaccaagataactttaaacttttgactgagcttggcctctccaaatcgaggcaagtgaaaatggcagagactttttccacagtagcgctcttttcatctgtggacattgtacatatgtttgccagtagggccagaaaatctatggttatgtgataataggctgccttctgcggggcttgccttctggccatgcccttcttctctcccttgcacctgtacctcttggtctttgaataaagcctgagtaggaaggaccggtaaaaaaaaaaaaaaaaaaaaaaaaaaaaaaacgttgactaaaaaaaaaaaaaaaaaaaaaaaaaaaaaaaaaaaaaaaaaaaaaaaaaaaaaaaaaaaaaaaaaaaaaa

SEQ ID NO: 10977 - DNA, 5264 bp, synthetic construct
  source 1..5264: mol_type = other DNA
gaaataagagagaaaagaagagtaagaagaaatataagagaattcgccaccatggcccctaagaaaaagcggaaggtgaatatcagcggctctagctgcggcagccccaacagcgccgacaccagcagcgacttcaaggacctgtggaccaagctgaaggaatgccacgaccgggaagtgcagggactccaggtgaaggtcaccaaactcaagcaagaaagaatcctggacgcccagagactggaagaattcttcaccaagaaccagcagctgagagagcagcagaaagtgctgcacgagacaatcaaggttctggaagatagactgcgggccggcctgtgcgacagatgcgccgtgaccgaggaacacatgcgcaaaaagcagcaggagttcgagaacattagacagcaaaatctgaaattgatcacagagctgatgaacgagagaaacacactgcaggaggagaacaagaagctgagcgagcagctgcaacagaagatcgagaatgatcagcaacaccaggccgctgagctggaatgtgaagaggacgtgatccccgacagcccaatcacagctttcagcttttctggcgtgaacagactgaggcggaaggaaaacccccacgtgcggtacatcgagcagacccataccaagctggaacacagcgtgtgtgccaacgagatgagaaaggtgtccaagtcctccacccatccccagcacaaccctaacgaaaatgagatcctggtggctgatacctacgaccagtctcagagccctatggccaaggcccacggcaccagctcttatacccctgataagagctccttcaacctggccaccgtggtggccgagacactgggcctgggcgtgcaggaggaaagcgagacacagggcccaatgagccctctgggagatgagctgtaccactgcctggaaggcaaccacaagaaacagccttttgagtccggctccgagactcctggaacaagcgagagcgctacacctgagggcagccctaagagaaaggtgtccagcgccgagggcgctgccaaggaagagcctaaacggagaagcgccagactgagcgccaagccccccgccaaggtggaagccaagcctaagaaggccgccgctaaggacaagagcagcgataagaaagtccagaccaagggcaagcggggcgccaaaggcaaacaggccgaggtggccaaccaggagacaaaggaagatctgcctgctgagaacggcgaaaccaagaccgaggaatctccagcttctgacgaggccggagagaaggaggccaaaagcgacagcggctctgagacacctggaacaagcgagagcgccaccccggaatcctatgaacaacttgcaccacaaccgtgtgtgggagaaactttacattctagcctcccacgagacagtgaactgtttgtgcctgaagaggggagcagcgagaaggagagcgaggacgcgccaaaaacatctcctccgacgcctgggaaacatggtttggaacagactggggaggaaaaagtgatggtgactgttcctgacaaaaatccaccttgtccttgctgtggtacccgggtaaactctgtgttgaatctgattgaacatctgaaagtgtcacacgggaaaaggggggtttgttttcggtgtgcaaaatgtggaaaggaaaatagtaactatcacagtgttgtttgtcattttaagaaatgcaggggtccagagacggagaaagccccagctggggagtggatttgtgaggtatgcaacagagattttacaaccaaaattggcctgggacaacacaagagattggcacacccagcagtgagaaatcaggaaaggatcgttgcttcccaaccgaaagaaacatcaaatagaggtgctcacaaaaggtgctggacaaaggaggaggaagaattactaataagactggaggctcagttcgagggaaacaaaaatattaataagcttattgcagaacacataaccaccaaaacagctaagcagatcagtgacaaaaggcgattgctgtccagaaagccagcagaggagccacgtgaggagcctggaacgtgtcatcacaccaggagagcagctgcgagcctgagaacggagcctgagatgagtcatcacgcccaggcagaggacagagataatggacctgggagacgccctctgccaggcagggcagctgccggagggagaacaatggacgagataagacgccaccctgataagggcaacggacagcagagacccaccaagcaaaaatcagaagaacagctgcaggcttactataaaaagacactagaggaacgactttcagctggggcacttaacaccttcccccgagcattcaagcaggtaatggaaggccgggatataaagctagtaatcaatcagacagcgcaggactgcttcggatgcctggaatccataagccaaataagaacggcaacccgagataaaaaggacacggtgacccgggagaaacacccaaagaaaccttttcagaagtggatgaagaagagagcaatcaaaaaaggtaattatcttcggttccagcgtttattttatcttgatagagggaaactggctaaaatcattttagatgatattgaatgcttgtcttgtgacataccactcagtgaaatttattcggtttttaaaacaagatgggaaacaactggtagctttaaaagccttggggactttaaaacttacgggaaggctgacaacactgccttcagagaattaattacggctaaagaaattgagaaaaatgtgcaggaaatgagcaaaggctcggctcccggtccagacgggattactcttggggacgtcgtaaagatggatcccgagttttcccggaccatggagattttcaatttatggttaacaactggtaaaatcccggacatggtgagggggtgcagaaccgttttgattccaaaatcatcaaagccggatcgtttgaaagacattaataactggagacctatcacgatcggttccatcttgctgagactgttctccaggattgtaacagctaggctgagcaaagcgtgccccctgaacccaaggcaaagaggctttatcagagcggcgggatgctctgaaaacttaaaactcctgcaaactataatttggtcggccaaaagagaacacagaccactgggtgttgtattcgtggacatcgccaaggcttttgacaccgtaagccaccagcacatcattcatgctttgcagcaaagagaggtggatccccacatcgtcggtctggtgagcaatatgtacgagaacatcagtacgtatatcaccacaaagaggaacacacacacagacaaaatccagatccgggttggagtaaagcagggtgacccgatgtcgccccttttatttaacctggcaatggaccctctattatgcaagctggaagagagtggcaaaggataccaccgaggacagagcagcatcacagcgatggcatttgcagacgatctggttttgctgagcgactcctgggaaaatatgaatacaaatattagcatactggagaccttcctgaatctgaccggactcaaaacacaggggcaaaagtgccacggcttttacatcaagccgacaaagaagtcttacaccatcaatgactgcgctgcctggactatcaacggcacacccctgaacatgatcgaccccggcgaatctgagaaatacctcggcctgcagtttgacccgtggattggaatagcaaggtccggtctctccacaaaactagatttttggcttcagcggatcgatcaagcaccacttaaacctctgcagaaaactgatattctcaaaacatacaccatccctcggctgatctacatagctgaccactcagaagtgaaaagcgcactactcgaaacccttgaccagaagatccggacagcggtcaaggaatggcttcacctacctccgtgcacctgcgatgccatcctgtactcgagcacgagagacggcggtttgggcatcaccaaattggcaggactgatccccagcgtgcaggcccgtagactgcatcggatcgcacagtcatctgacgatacgatgaaatgcttcatggaaaaagagaaaatggaacagctgcataagaaattgtggattcaagctggaggggacagagagaacataccctcgatttgggaagcaccaccgtcgagtgaaccaccaaacaacgtgagcacaaattcggaatgggaagcaccgacccagaaagataaatttccaaagccttgcaattggaggaaaaacgaattcaaaaaatggaccaaattggcatcccaaggccgcggaattgtaaattttgaaagagacaaaattagtaaccattggatccaatactacagacgcatacctcacaggaaactcctcactgcactacaactcagggccaacgtttaccccacgagagaatttctagccaggggtagacaagaccaatacatcaaggcgtgtaggcactgcgatgcggacaacgaatcctgcgcccacatcatcggcaactgcccagtgacacaggacgcccgaatcaagaggcacaattacatctgcgaactgcttctcgaggaggcgaagaagaaggactgggtagtgttcaaggaaccgcacataagggattccaacaaggaactgtacaaacctgacctgatatttgtgaaggatgggcgtgcacttgtcgtggatgtgacagtacggtatgaagcagccaaatcatcgctggaggaagccgctgcagagaaagtgagaaagtacaaacacctggaaacggaagtaagacatctcacgaatgcaaaggacgttacttttgtgggctttcccctaggagcgcgggggaaatggcaccaagataactttaaacttttgactgagcttggcctctccaaatcgaggcaagtgaaaatggcagagactttttccacagtagcgctcttttcatctgtggacattgtacatatgtttgccagtagggccagaaaatctatggttatgtgataataggctgccttctgcggggcttgccttctggccatgcccttcttctctcccttgcacctgtacctcttggtctttgaataaagcctgagtaggaaggaccggtaaaaaaaaaaaaaaaaaaaaaaaaaaaaaaacgttgactaaaaaaaaaaaaaaaaaaaaaaaaaaaaaaaaaaaaaaaaaaaaaaaaaaaaaaaaaaaaaaaaaaaaaa

SEQ ID NO: 10978 - DNA, 5264 bp, synthetic construct
  source 1..5264: mol_type = other DNA
gaaataagagagaaaagaagagtaagaagaaatataagagaattcgccaccatggcccctaagaaaaagcggaaggtgaatatcagcggctctagctgcggcagccccaacagcgccgacaccagcagcgacttcaaggacctgtggaccaagctgaaggaatgccacgaccgggaagtgcagggactccaggtgaaggtcaccaaactcaagcaagaaagaatcctggacgcccagagactggaagaattcttcaccaagaaccagcagctgagagagcagcagaaagtgctgcacgagacaatcaaggttctggaagatagactgcgggccggcctgtgcgacagatgcgccgtgaccgaggaacacatgcgcaaaaagcagcaggagttcgagaacattagacagcaaaatctgaaattgatcacagagctgatgaacgagagaaacacactgcaggaggagaacaagaagctgagcgagcagctgcaacagaagatcgagaatgatcagcaacaccaggccgctgagctggaatgtgaagaggacgtgatccccgacagcccaatcacagctttcagcttttctggcgtgaacagactgaggcggaaggaaaacccccacgtgcggtacatcgagcagacccataccaagctggaacacagcgtgtgtgccaacgagatgagaaaggtgtccaagtcctccacccatccccagcacaaccctaacgaaaatgagatcctggtggctgatacctacgaccagtctcagagccctatggccaaggcccacggcaccagctcttatacccctgataagagctccttcaacctggccaccgtggtggccgagacactgggcctgggcgtgcaggaggaaagcgagacacagggcccaatgagccctctgggagatgagctgtaccactgcctggaaggcaaccacaagaaacagccttttgagtccggctccgagactcctggaacaagcgagagcgctacacctgagggcagccctaagagaaaggtgtccagcgccgagggcgctgccaaggaagagcctaaacggagaagcgccagactgagcgccaagccccccgccaaggtggaagccaagcctaagaaggccgccgctaaggacaagagcagcgataagaaagtccagaccaagggcaagcggggcgccaaaggcaaacaggccgaggtggccaaccaggagacaaaggaagatctgcctgctgagaacggcgaaaccaagaccgaggaatctccagcttctgacgaggccggagagaaggaggccaaaagcgacagcggctctgagacacctggaacaagcgagagcgccaccccggaatcctatgaacaacttgcaccacaaccgtgtgtgggagaaactttacattctagcctcccacgagacagtgaactgtttgtgcctgaagaggggagcagcgagaaggagagcgaggacgcgccaaaaacatctcctccgacgcctgggaaacatggtttggaacagactggggaggaaaaagtgatggtgactgttcctgacaaaaatccaccttgtccttgctgtggtacccgggtaaactctgtgttgaatctgattgaacatctgaaagtgtcacacgggaaaaggggggtttgttttcggtgtgcaaaatgtggaaaggaaaatagtaactatcacagtgttgtttgtcattttaagaaatgcaggggtccagagacggagaaagccccagctggggagtggatttgtgaggtatgcaacagagattttacaaccaaaattggcctgggacaacacaagagattggcacacccagcagtgagaaatcaggaaaggatcgttgcttcccaaccgaaagaaacatcaaatagaggtgctcacaaaaggtgctggacaaaggaggaggaagaattactaataagactggaggctcagttcgagggaaacaaaaatattaataagcttattgcagaacacataaccaccaaaacagctaagcagatcagtgacaaaaggcgattgctgtccagaaagccagcagaggagccacgtgaggagcctggaacgtgtcatcacaccaggagagcagctgcgagcctgagaacggagcctgagatgagtcatcacgcccaggcagaggacagagataatggacctgggagacgccctctgccaggcagggcagctgccggagggagaacaatggacgagataagacgccaccctgataagggcaacggacagcagagacccaccaagcaaaaatcagaagaacagctgcaggcttactataaaaagacactagaggaacgactttcagctggggcacttaacaccttcccccgagcattcaagcaggtaatggaaggccgggatataaagctagtaatcaatcagacagcgcaggactgcttcggatgcctggaatccataagccaaataagaacggcaacccgagataaaaaggacacggtgacccgggagaaacacccaaagaaaccttttcagaagtggatgaagaagagagcaatcaaaaaaggtaattatcttcggttccagcgtttattttatcttgatagagggaaactggctaaaatcattttagatgatattgaatgcttgtcttgtgacataccactcagtgaaatttattcggtttttaaaacaagatgggaaacaactggtagctttaaaagccttggggactttaaaacttacgggaaggctgacaacactgccttcagagaattaattacggctaaagaaattgagaaaaatgtgcaggaaatgagcaaaggctcggctcccggtccagacgggattactcttggggacgtcgtaaagatggatcccgagttttcccggaccatggagattttcaatttatggttaacaactggtaaaatcccggacatggtgagggggtgcagaaccgttttgattccaaaatcatcaaagccggatcgtttgaaagacattaataactggagacctatcacgatcggttccatcttgctgagactgttctccaggattgtaacagctaggctgagcaaagcgtgccccctgaacccaaggcaaagaggctttatcagagcggcgggatgctctgaaaacttaaaactcctgcaaactataatttggtcggccaaaagagaacacagaccactgggtgttgtattcgtggacatcgccaaggcttttgacaccgtaagccaccagcacatcattcatgctttgcagcaaagagaggtggatccccacatcgtcggtctggtgagcaatatgtacgagaacatcagtacgtatatcaccacaaagaggaacacacacacagacaaaatccagatccgggttggagtaaagcagggtgacccgatgtcgccccttttatttaacctggcaatggaccctctattatgcaagctggaagagagtggcaaaggataccaccgaggacagagcagcatcacagcgatggcatttgcagacgatctggttttgctgagcgactcctgggaaaatatgaatacaaatattagcatactggagaccttctgcaatctgaccggactcaaaacacaggggcaaaagtgccacggcttttacatcaagccgacaaagaagtcttacaccatcaatgactgcgctgcctggactatcaacggcacacccctgaacatgatcgaccccggcgaatctgagaaatacctcggcctgcagtttgacccgtggattggaatagcaaggtccggtctctccacaaaactagatttttggcttcagcggatcgatcaagcaccacttaaacctctgcagaaaactgatattctcaaaacatacaccatcagccggctgatctacatagctgaccactcagaagtgaaaagcgcactactcgaaacccttgaccagaagatccggacagcggtcaaggaatggcttcacctacctccgtgcacctgcgatgccatcctgtactcgagcacgagagacggcggtttgggcatcaccaaattggcaggactgatccccagcgtgcaggcccgtagactgcatcggatcgcacagtcatctgacgatacgatgaaatgcttcatggaaaaagagaaaatggaacagctgcataagaaattgtggattcaagctggaggggacagagagaacataccctcgatttgggaagcaccaccgtcgagtgaaccaccaaacaacgtgagcacaaattcggaatgggaagcaccgacccagaaagataaatttccaaagccttgcaattggaggaaaaacgaattcaaaaaatggaccaaattggcatcccaaggccgcggaattgtaaattttgaaagagacaaaattagtaaccattggatccaatactacagacgcatacctcacaggaaactcctcactgcactacaactcagggccaacgtttaccccacgagagaatttctagccaggggtagacaagaccaatacatcaaggcgtgtaggcactgcgatgcggacaacgaatcctgcgcccacatcatcggcaactgcccagtgacacaggacgcccgaatcaagaggcacaattacatctgcgaactgcttctcgaggaggcgaagaagaaggactgggtagtgttcaaggaaccgcacataagggattccaacaaggaactgtacaaacctgacctgatatttgtgaaggatgggcgtgcacttgtcgtggatgtgacagtacggtatgaagcagccaaatcatcgctggaggaagccgctgcagagaaagtgagaaagtacaaacacctggaaacggaagtaagacatctcacgaatgcaaaggacgttacttttgtgggctttcccctaggagcgcgggggaaatggcaccaagataactttaaacttttgactgagcttggcctctccaaatcgaggcaagtgaaaatggcagagactttttccacagtagcgctcttttcatctgtggacattgtacatatgtttgccagtagggccagaaaatctatggttatgtgataataggctgccttctgcggggcttgccttctggccatgcccttcttctctcccttgcacctgtacctcttggtctttgaataaagcctgagtaggaaggaccggtaaaaaaaaaaaaaaaaaaaaaaaaaaaaaaacgttgactaaaaaaaaaaaaaaaaaaaaaaaaaaaaaaaaaaaaaaaaaaaaaaaaaaaaaaaaaaaaaaaaaaaaaa

SEQ ID NO: 10979 - DNA, 5264 bp, synthetic construct
  source 1..5264: mol_type = other DNA
gaaataagagagaaaagaagagtaagaagaaatataagagaattcgccaccatggcccctaagaaaaagcggaaggtgaatatcagcggctctagctgcggcagccccaacagcgccgacaccagcagcgacttcaaggacctgtggaccaagctgaaggaatgccacgaccgggaagtgcagggactccaggtgaaggtcaccaaactcaagcaagaaagaatcctggacgcccagagactggaagaattcttcaccaagaaccagcagctgagagagcagcagaaagtgctgcacgagacaatcaaggttctggaagatagactgcgggccggcctgtgcgacagatgcgccgtgaccgaggaacacatgcgcaaaaagcagcaggagttcgagaacattagacagcaaaatctgaaattgatcacagagctgatgaacgagagaaacacactgcaggaggagaacaagaagctgagcgagcagctgcaacagaagatcgagaatgatcagcaacaccaggccgctgagctggaatgtgaagaggacgtgatccccgacagcccaatcacagctttcagcttttctggcgtgaacagactgaggcggaaggaaaacccccacgtgcggtacatcgagcagacccataccaagctggaacacagcgtgtgtgccaacgagatgagaaaggtgtccaagtcctccacccatccccagcacaaccctaacgaaaatgagatcctggtggctgatacctacgaccagtctcagagccctatggccaaggcccacggcaccagctcttatacccctgataagagctccttcaacctggccaccgtggtggccgagacactgggcctgggcgtgcaggaggaaagcgagacacagggcccaatgagccctctgggagatgagctgtaccactgcctggaaggcaaccacaagaaacagccttttgagtccggctccgagactcctggaacaagcgagagcgctacacctgagggcagccctaagagaaaggtgtccagcgccgagggcgctgccaaggaagagcctaaacggagaagcgccagactgagcgccaagccccccgccaaggtggaagccaagcctaagaaggccgccgctaaggacaagagcagcgataagaaagtccagaccaagggcaagcggggcgccaaaggcaaacaggccgaggtggccaaccaggagacaaaggaagatctgcctgctgagaacggcgaaaccaagaccgaggaatctccagcttctgacgaggccggagagaaggaggccaaaagcgacagcggctctgagacacctggaacaagcgagagcgccaccccggaatcctatgaacaacttgcaccacaaccgtgtgtgggagaaactttacattctagcctcccacgagacagtgaactgtttgtgcctgaagaggggagcagcgagaaggagagcgaggacgcgccaaaaacatctcctccgacgcctgggaaacatggtttggaacagactggggaggaaaaagtgatggtgactgttcctgacaaaaatccaccttgtccttgctgtggtacccgggtaaactctgtgttgaatctgattgaacatctgaaagtgtcacacgggaaaaggggggtttgttttcggtgtgcaaaatgtggaaaggaaaatagtaactatcacagtgttgtttgtcattttaagaaatgcaggggtccagagacggagaaagccccagctggggagtggatttgtgaggtatgcaacagagattttacaaccaaaattggcctgggacaacacaagagattggcacacccagcagtgagaaatcaggaaaggatcgttgcttcccaaccgaaagaaacatcaaatagaggtgctcacaaaaggtgctggacaaaggaggaggaagaattactaataagactggaggctcagttcgagggaaacaaaaatattaataagcttattgcagaacacataaccaccaaaacagctaagcagatcagtgacaaaaggcgattgctgtccagaaagccagcagaggagccacgtgaggagcctggaacgtgtcatcacaccaggagagcagctgcgagcctgagaacggagcctgagatgagtcatcacgcccaggcagaggacagagataatggacctgggagacgccctctgccaggcagggcagctgccggagggagaacaatggacgagataagacgccaccctgataagggcaacggacagcagagacccaccaagcaaaaatcagaagaacagctgcaggcttactataaaaagacactagaggaacgactttcagctggggcacttaacaccttcccccgagcattcaagcaggtaatggaaggccgggatataaagctagtaatcaatcagacagcgcaggactgcttcggatgcctggaatccataagccaaataagaacggcaacccgagataaaaaggacacggtgacccgggagaaacacccaaagaaaccttttcagaagtggatgaagaagagagcaatcaaaaaaggtaattatcttcggttccagcgtttattttatcttgatagagggaaactggctaaaatcattttagatgatattgaatgcttgtcttgtgacataccactcagtgaaatttattcggtttttaaaacaagatgggaaacaactggtagctttaaaagccttggggactttaaaacttacgggaaggctgacaacactgccttcagagaattaattacggctaaagaaattgagaaaaatgtgcaggaaatgagcaaaggctcggctcccggtccagacgggattactcttggggacgtcgtaaagatggatcccgagttttcccggaccatggagattttcaatttatggttaacaactggtaaaatcccggacatggtgagggggtgcagaaccgttttgattccaaaatcatcaaagccggatcgtttgaaagacattaataactggagacctatcacgatcggttccatcttgctgagactgttctccaggattgtaacagctaggctgagcaaagcgtgccccctgaacccaaggcaaagaggctttatcagagcggcgggatgctctgaaaacttaaaactcctgcaaactataatttggtcggccaaaagagaacacagaccactgggtgttgtattcgtggacatcgccaaggcttttgacaccgtaagccaccagcacatcattcatgctttgcagcaaagagaggtggatccccacatcgtcggtctggtgagcaatatgtacgagaacatcagtacgtatatcaccacaaagaggaacacacacacagacaaaatccagatccgggttggagtaaagcagggtgacccgatgtcgccccttttatttaacctggcaatggaccctctattatgcaagctggaagagagtggcaaaggataccaccgaggacagagcagcatcacagcgatggcatttgcagacgatctggttttgctgagcgactcctgggaaaatatgaatacaaatattagcatactggagaccttctgcaatctgaccggactcaaaacacaggggcaaaagtgccacggcttttacatcaagccgacaaagaagtcttacaccatcaatgactgcgctgcctggactatcaacggcacacccctgaacatgatcgaccccggcgaatctgagaaatacctcggcctgcagtttgacccgtggattggaatagcaaggtccggtctctccacaaaactagatttttggcttcagcggatcgatcaagcaccacttaaacctctgcagaaaactgatattctcaaaacatacaccatccctcggctgatccacatagctgaccactcagaagtgaaaagcgcactactcgaaacccttgaccagaagatccggacagcggtcaaggaatggcttcacctacctccgtgcacctgcgatgccatcctgtactcgagcacgagagacggcggtttgggcatcaccaaattggcaggactgatccccagcgtgcaggcccgtagactgcatcggatcgcacagtcatctgacgatacgatgaaatgcttcatggaaaaagagaaaatggaacagctgcataagaaattgtggattcaagctggaggggacagagagaacataccctcgatttgggaagcaccaccgtcgagtgaaccaccaaacaacgtgagcacaaattcggaatgggaagcaccgacccagaaagataaatttccaaagccttgcaattggaggaaaaacgaattcaaaaaatggaccaaattggcatcccaaggccgcggaattgtaaattttgaaagagacaaaattagtaaccattggatccaatactacagacgcatacctcacaggaaactcctcactgcactacaactcagggccaacgtttaccccacgagagaatttctagccaggggtagacaagaccaatacatcaaggcgtgtaggcactgcgatgcggacaacgaatcctgcgcccacatcatcggcaactgcccagtgacacaggacgcccgaatcaagaggcacaattacatctgcgaactgcttctcgaggaggcgaagaagaaggactgggtagtgttcaaggaaccgcacataagggattccaacaaggaactgtacaaacctgacctgatatttgtgaaggatgggcgtgcacttgtcgtggatgtgacagtacggtatgaagcagccaaatcatcgctggaggaagccgctgcagagaaagtgagaaagtacaaacacctggaaacggaagtaagacatctcacgaatgcaaaggacgttacttttgtgggctttcccctaggagcgcgggggaaatggcaccaagataactttaaacttttgactgagcttggcctctccaaatcgaggcaagtgaaaatggcagagactttttccacagtagcgctcttttcatctgtggacattgtacatatgtttgccagtagggccagaaaatctatggttatgtgataataggctgccttctgcggggcttgccttctggccatgcccttcttctctcccttgcacctgtacctcttggtctttgaataaagcctgagtaggaaggaccggtaaaaaaaaaaaaaaaaaaaaaaaaaaaaaaacgttgactaaaaaaaaaaaaaaaaaaaaaaaaaaaaaaaaaaaaaaaaaaaaaaaaaaaaaaaaaaaaaaaaaaaaaa

SEQ ID NO: 10980 - DNA, 5264 bp, synthetic construct
  source 1..5264: mol_type = other DNA
gaaataagagagaaaagaagagtaagaagaaatataagagaattcgccaccatggcccctaagaaaaagcggaaggtgaatatcagcggctctagctgcggcagccccaacagcgccgacaccagcagcgacttcaaggacctgtggaccaagctgaaggaatgccacgaccgggaagtgcagggactccaggtgaaggtcaccaaactcaagcaagaaagaatcctggacgcccagagactggaagaattcttcaccaagaaccagcagctgagagagcagcagaaagtgctgcacgagacaatcaaggttctggaagatagactgcgggccggcctgtgcgacagatgcgccgtgaccgaggaacacatgcgcaaaaagcagcaggagttcgagaacattagacagcaaaatctgaaattgatcacagagctgatgaacgagagaaacacactgcaggaggagaacaagaagctgagcgagcagctgcaacagaagatcgagaatgatcagcaacaccaggccgctgagctggaatgtgaagaggacgtgatccccgacagcccaatcacagctttcagcttttctggcgtgaacagactgaggcggaaggaaaacccccacgtgcggtacatcgagcagacccataccaagctggaacacagcgtgtgtgccaacgagatgagaaaggtgtccaagtcctccacccatccccagcacaaccctaacgaaaatgagatcctggtggctgatacctacgaccagtctcagagccctatggccaaggcccacggcaccagctcttatacccctgataagagctccttcaacctggccaccgtggtggccgagacactgggcctgggcgtgcaggaggaaagcgagacacagggcccaatgagccctctgggagatgagctgtaccactgcctggaaggcaaccacaagaaacagccttttgagtccggctccgagactcctggaacaagcgagagcgctacacctgagggcagccctaagagaaaggtgtccagcgccgagggcgctgccaaggaagagcctaaacggagaagcgccagactgagcgccaagccccccgccaaggtggaagccaagcctaagaaggccgccgctaaggacaagagcagcgataagaaagtccagaccaagggcaagcggggcgccaaaggcaaacaggccgaggtggccaaccaggagacaaaggaagatctgcctgctgagaacggcgaaaccaagaccgaggaatctccagcttctgacgaggccggagagaaggaggccaaaagcgacagcggctctgagacacctggaacaagcgagagcgccaccccggaatcctatgaacaacttgcaccacaaccgtgtgtgggagaaactttacattctagcctcccacgagacagtgaactgtttgtgcctgaagaggggagcagcgagaaggagagcgaggacgcgccaaaaacatctcctccgacgcctgggaaacatggtttggaacagactggggaggaaaaagtgatggtgactgttcctgacaaaaatccaccttgtccttgctgtggtacccgggtaaactctgtgttgaatctgattgaacatctgaaagtgtcacacgggaaaaggggggtttgttttcggtgtgcaaaatgtggaaaggaaaatagtaactatcacagtgttgtttgtcattttaagaaatgcaggggtccagagacggagaaagccccagctggggagtggatttgtgaggtatgcaacagagattttacaaccaaaattggcctgggacaacacaagagattggcacacccagcagtgagaaatcaggaaaggatcgttgcttcccaaccgaaagaaacatcaaatagaggtgctcacaaaaggtgctggacaaaggaggaggaagaattactaataagactggaggctcagttcgagggaaacaaaaatattaataagcttattgcagaacacataaccaccaaaacagctaagcagatcagtgacaaaaggcgattgctgtccagaaagccagcagaggagccacgtgaggagcctggaacgtgtcatcacaccaggagagcagctgcgagcctgagaacggagcctgagatgagtcatcacgcccaggcagaggacagagataatggacctgggagacgccctctgccaggcagggcagctgccggagggagaacaatggacgagataagacgccaccctgataagggcaacggacagcagagacccaccaagcaaaaatcagaagaacagctgcaggcttactataaaaagacactagaggaacgactttcagctggggcacttaacaccttcccccgagcattcaagcaggtaatggaaggccgggatataaagctagtaatcaatcagacagcgcaggactgcttcggatgcctggaatccataagccaaataagaacggcaacccgagataaaaaggacacggtgacccgggagaaacacccaaagaaaccttttcagaagtggatgaagaagagagcaatcaaaaaaggtaattatcttcggttccagcgtttattttatcttgatagagggaaactggctaaaatcattttagatgatattgaatgcttgtcttgtgacataccactcagtgaaatttattcggtttttaaaacaagatgggaaacaactggtagctttaaaagccttggggactttaaaacttacgggaaggctgacaacactgccttcagagaattaattacggctaaagaaattgagaaaaatgtgcaggaaatgagcaaaggctcggctcccggtccagacgggattactcttggggacgtcgtaaagatggatcccgagttttcccggaccatggagattttcaatttatggttaacaactggtaaaatcccggacatggtgagggggtgcagaaccgttttgattccaaaatcatcaaagccggatcgtttgaaagacattaataactggagacctatcacgatcggttccatcttgctgagactgttctccaggattgtaacagctaggctgagcaaagcgtgccccctgaacccaaggcaaagaggctttatcagagcggcgggatgctctgaaaacttaaaactcctgcaaactataatttggtcggccaaaagagaacacagaccactgggtgttgtattcgtggacatcgccaaggcttttgacaccgtaagccaccagcacatcattcatgctttgcagcaaagagaggtggatccccacatcgtcggtctggtgagcaatatgtacgagaacatcagtacgtatatcaccacaaagaggaacacacacacagacaaaatccagatccgggttggagtaaagcagggtgacccgatgtcgccccttttatttaacctggcaatggaccctctattatgcaagctggaagagagtggcaaaggataccaccgaggacagagcagcatcacagcgatggcatttgcagacgatctggttttgctgagcgactcctgggaaaatatgaatacaaatattagcatactggagaccttctgcaatctgaccggactcaaaacacaggggcaaaagtgccacggcttttacatcaagccgacaaagaagtcttacaccatcaatgactgcgctgcctggactatcaacggcacacccctgaacatgatcgaccccggcgaatctgagaaatacctcggcctgcagtttgacccgtggattggaatagcaaggtccggtctctccacaaaactagatttttggcttcagcggatcgatcaagcaccacttaaacctctgcagaaaactgatattctcaaaacatacaccatccctcggctgatctacatagctgaccactcagaagtgaaaagcgcactactcgaaacccttgaccagaagatccggacagcggtcaaggaatggcttcacctacctccgtgcacctgcgatgccatcctgtactcgagcacgagagacggcggtttgggcatcaccaaattggcaggactgatccccagcgtgcaggcccgtagactgcatcggatcgcacagtcatctgacgatacgatgaaatgcttcatggaaaaagagaaaatggaacagctgcataagaaattgtggattcaagctggaggggacagagagaacataccctcgatttgggaagcaccaccgtcgagtgaaccaccaaacaacgtgagcacaaattcggaatgggaagcaccgacccagaaagataaatttccaaagccttgcaattggaggaaaaacgaattcaaaaaatggaccaaattggcatcccaaggccgcggaattgtaaattttgaaagagacaaaattagtaaccatttcatccaatactacagacgcatacctcacaggaaactcctcactgcactacaactcagggccaacgtttaccccacgagagaatttctagccaggggtagacaagaccaatacatcaaggcgtgtaggcactgcgatgcggacaacgaatcctgcgcccacatcatcggcaactgcccagtgacacaggacgcccgaatcaagaggcacaattacatctgcgaactgcttctcgaggaggcgaagaagaaggactgggtagtgttcaaggaaccgcacataagggattccaacaaggaactgtacaaacctgacctgatatttgtgaaggatgggcgtgcacttgtcgtggatgtgacagtacggtatgaagcagccaaatcatcgctggaggaagccgctgcagagaaagtgagaaagtacaaacacctggaaacggaagtaagacatctcacgaatgcaaaggacgttacttttgtgggctttcccctaggagcgcgggggaaatggcaccaagataactttaaacttttgactgagcttggcctctccaaatcgaggcaagtgaaaatggcagagactttttccacagtagcgctcttttcatctgtggacattgtacatatgtttgccagtagggccagaaaatctatggttatgtgataataggctgccttctgcggggcttgccttctggccatgcccttcttctctcccttgcacctgtacctcttggtctttgaataaagcctgagtaggaaggaccggtaaaaaaaaaaaaaaaaaaaaaaaaaaaaaaacgttgactaaaaaaaaaaaaaaaaaaaaaaaaaaaaaaaaaaaaaaaaaaaaaaaaaaaaaaaaaaaaaaaaaaaaaa

SEQ ID NO: 10981 - DNA, 5264 bp, synthetic construct
  source 1..5264: mol_type = other DNA
gaaataagagagaaaagaagagtaagaagaaatataagagaattcgccaccatggcccctaagaaaaagcggaaggtgaatatcagcggctctagctgcggcagccccaacagcgccgacaccagcagcgacttcaaggacctgtggaccaagctgaaggaatgccacgaccgggaagtgcagggactccaggtgaaggtcaccaaactcaagcaagaaagaatcctggacgcccagagactggaagaattcttcaccaagaaccagcagctgagagagcagcagaaagtgctgcacgagacaatcaaggttctggaagatagactgcgggccggcctgtgcgacagatgcgccgtgaccgaggaacacatgcgcaaaaagcagcaggagttcgagaacattagacagcaaaatctgaaattgatcacagagctgatgaacgagagaaacacactgcaggaggagaacaagaagctgagcgagcagctgcaacagaagatcgagaatgatcagcaacaccaggccgctgagctggaatgtgaagaggacgtgatccccgacagcccaatcacagctttcagcttttctggcgtgaacagactgaggcggaaggaaaacccccacgtgcggtacatcgagcagacccataccaagctggaacacagcgtgtgtgccaacgagatgagaaaggtgtccaagtcctccacccatccccagcacaaccctaacgaaaatgagatcctggtggctgatacctacgaccagtctcagagccctatggccaaggcccacggcaccagctcttatacccctgataagagctccttcaacctggccaccgtggtggccgagacactgggcctgggcgtgcaggaggaaagcgagacacagggcccaatgagccctctgggagatgagctgtaccactgcctggaaggcaaccacaagaaacagccttttgagtccggctccgagactcctggaacaagcgagagcgctacacctgagggcagccctaagagaaaggtgtccagcgccgagggcgctgccaaggaagagcctaaacggagaagcgccagactgagcgccaagccccccgccaaggtggaagccaagcctaagaaggccgccgctaaggacaagagcagcgataagaaagtccagaccaagggcaagcggggcgccaaaggcaaacaggccgaggtggccaaccaggagacaaaggaagatctgcctgctgagaacggcgaaaccaagaccgaggaatctccagcttctgacgaggccggagagaaggaggccaaaagcgacagcggctctgagacacctggaacaagcgagagcgccaccccggaatcctatgaacaacttgcaccacaaccgtgtgtgggagaaactttacattctagcctcccacgagacagtgaactgtttgtgcctgaagaggggagcagcgagaaggagagcgaggacgcgccaaaaacatctcctccgacgcctgggaaacatggtttggaacagactggggaggaaaaagtgatggtgactgttcctgacaaaaatccaccttgtccttgctgtggtacccgggtaaactctgtgttgaatctgattgaacatctgaaagtgtcacacgggaaaaggggggtttgttttcggtgtgcaaaatgtggaaaggaaaatagtaactatcacagtgttgtttgtcattttaagaaatgcaggggtccagagacggagaaagccccagctggggagtggatttgtgaggtatgcaacagagattttacaaccaaaattggcctgggacaacacaagagattggcacacccagcagtgagaaatcaggaaaggatcgttgcttcccaaccgaaagaaacatcaaatagaggtgctcacaaaaggtgctggacaaaggaggaggaagaattactaataagactggaggctcagttcgagggaaacaaaaatattaataagcttattgcagaacacataaccaccaaaacagctaagcagatcagtgacaaaaggcgattgctgtccagaaagccagcagaggagccacgtgaggagcctggaacgtgtcatcacaccaggagagcagctgcgagcctgagaacggagcctgagatgagtcatcacgcccaggcagaggacagagataatggacctgggagacgccctctgccaggcagggcagctgccggagggagaacaatggacgagataagacgccaccctgataagggcaacggacagcagagacccaccaagcaaaaatcagaagaacagctgcaggcttactataaaaagacactagaggaacgactttcagctggggcacttaacaccttcccccgagcattcaagcaggtaatggaaggccgggatataaagctagtaatcaatcagacagcgcaggactgcttcggatgcctggaatccataagccaaataagaacggcaacccgagataaaaaggacacggtgacccgggagaaacacccaaagaaaccttttcagaagtggatgaagaagagagcaatcaaaaaaggtaattatcttcggttccagcgtttattttatcttgatagagggaaactggctaaaatcattttagatgatattgaatgcttgtcttgtgacataccactcagtgaaatttattcggtttttaaaacaagatgggaaacaactggtagctttaaaagccttggggactttaaaacttacgggaaggctgacaacactgccttcagagaattaattacggctaaagaaattgagaaaaatgtgcaggaaatgagcaaaggctcggctcccggtccagacgggattactcttggggacgtcgtaaagatggatcccgagttttcccggaccatggagattttcaatttatggttaacaactggtaaaatcccggacatggtgagggggtgcagaaccgttttgattccaaaatcatcaaagccggatcgtttgaaagacattaataactggagacctatcacgatcggttccatcttgctgagactgttctccaggattgtaacagctaggctgagcaaagcgtgccccctgaacccaaggcaaagaggctttatcagagcggcgggatgctctgaaaacttaaaactcctgcaaactataatttggtcggccaaaagagaacacagaccactgggtgttgtattcgtggacatcgccaaggcttttgacaccgtaagccaccagcacatcattcatgctttgcagcaaagagaggtggatccccacatcgtcggtctggtgagcaatatgtacgagaacatcagtacgtatatcaccacaaagaggaacacacacacagacaaaatccagatccgggttggagtaaagcagggtgacccgatgtcgccccttttatttaacctggcaatggaccctctattatgcaagctggaagagagtggcaaaggataccaccgaggacagagcagcatcacagcgatggcatttgcagacgatctggttttgctgagcgactcctgggaaaatatgaatacaaatattagcatactggagaccttctgcaatctgaccggactcaaaacacaggggcaaaagtgccacggcttttacatcaagccgacaaagaagtcttacaccatcaatgactgcgctgcctggactatcaacggcacacccctgaacatgatcgaccccggcgaatctgagaaatacctcggcctgcagtttgacccgtggattggaatagcaaggtccggtctctccacaaaactagatttttggcttcagcggatcgatcaagcaccacttaaacctctgcagaaaactgatattctcaaaacatacaccatccctcggctgatctacatagctgaccactcagaagtgaaaagcgcactactcgaaacccttgaccagaagatccggacagcggtcaaggaatggcttcacctacctccgtgcacctgcgatgccatcctgtactcgagcacgagagacggcggtttgggcatcaccaaattggcaggactgatccccagcgtgcaggcccgtagactgcatcggatcgcacagtcatctgacgatacgatgaaatgcttcatggaaaaagagaaaatggaacagatgcataagaaattgtggattcaagctggaggggacagagagaacataccctcgatttgggaagcaccaccgtcgagtgaaccaccaaacaacgtgagcacaaattcggaatgggaagcaccgacccagaaagataaatttccaaagccttgcaattggaggaaaaacgaattcaaaaaatggaccaaattggcatcccaaggccgcggaattgtaaattttgaaagagacaaaattagtaaccattggatccaatactacagacgcatacctcacaggaaactcctcactgcactacaactcagggccaacgtttaccccacgagagaatttctagccaggggtagacaagaccaatacatcaaggcgtgtaggcactgcgatgcggacaacgaatcctgcgcccacatcatcggcaactgcccagtgacacaggacgcccgaatcaagaggcacaattacatctgcgaactgcttctcgaggaggcgaagaagaaggactgggtagtgttcaaggaaccgcacataagggattccaacaaggaactgtacaaacctgacctgatatttgtgaaggatgggcgtgcacttgtcgtggatgtgacagtacggtatgaagcagccaaatcatcgctggaggaagccgctgcagagaaagtgagaaagtacaaacacctggaaacggaagtaagacatctcacgaatgcaaaggacgttacttttgtgggctttcccctaggagcgcgggggaaatggcaccaagataactttaaacttttgactgagcttggcctctccaaatcgaggcaagtgaaaatggcagagactttttccacagtagcgctcttttcatctgtggacattgtacatatgtttgccagtagggccagaaaatctatggttatgtgataataggctgccttctgcggggcttgccttctggccatgcccttcttctctcccttgcacctgtacctcttggtctttgaataaagcctgagtaggaaggaccggtaaaaaaaaaaaaaaaaaaaaaaaaaaaaaaacgttgactaaaaaaaaaaaaaaaaaaaaaaaaaaaaaaaaaaaaaaaaaaaaaaaaaaaaaaaaaaaaaaaaaaaaaa

SEQ ID NO: 10982 - DNA, 5264 bp, synthetic construct
  source 1..5264: mol_type = other DNA
gaaataagagagaaaagaagagtaagaagaaatataagagaattcgccaccatggcccctaagaaaaagcggaaggtgaatatcagcggctctagctgcggcagccccaacagcgccgacaccagcagcgacttcaaggacctgtggaccaagctgaaggaatgccacgaccgggaagtgcagggactccaggtgaaggtcaccaaactcaagcaagaaagaatcctggacgcccagagactggaagaattcttcaccaagaaccagcagctgagagagcagcagaaagtgctgcacgagacaatcaaggttctggaagatagactgcgggccggcctgtgcgacagatgcgccgtgaccgaggaacacatgcgcaaaaagcagcaggagttcgagaacattagacagcaaaatctgaaattgatcacagagctgatgaacgagagaaacacactgcaggaggagaacaagaagctgagcgagcagctgcaacagaagatcgagaatgatcagcaacaccaggccgctgagctggaatgtgaagaggacgtgatccccgacagcccaatcacagctttcagcttttctggcgtgaacagactgaggcggaaggaaaacccccacgtgcggtacatcgagcagacccataccaagctggaacacagcgtgtgtgccaacgagatgagaaaggtgtccaagtcctccacccatccccagcacaaccctaacgaaaatgagatcctggtggctgatacctacgaccagtctcagagccctatggccaaggcccacggcaccagctcttatacccctgataagagctccttcaacctggccaccgtggtggccgagacactgggcctgggcgtgcaggaggaaagcgagacacagggcccaatgagccctctgggagatgagctgtaccactgcctggaaggcaaccacaagaaacagccttttgagtccggctccgagactcctggaacaagcgagagcgctacacctgagggcagccctaagagaaaggtgtccagcgccgagggcgctgccaaggaagagcctaaacggagaagcgccagactgagcgccaagccccccgccaaggtggaagccaagcctaagaaggccgccgctaaggacaagagcagcgataagaaagtccagaccaagggcaagcggggcgccaaaggcaaacaggccgaggtggccaaccaggagacaaaggaagatctgcctgctgagaacggcgaaaccaagaccgaggaatctccagcttctgacgaggccggagagaaggaggccaaaagcgacagcggctctgagacacctggaacaagcgagagcgccaccccggaatcctatgaacaacttgcaccacaaccgtgtgtgggagaaactttacattctagcctcccacgagacagtgaactgtttgtgcctgaagaggggagcagcgagaaggagagcgaggacgcgccaaaaacatctcctccgacgcctgggaaacatggtttggaacagactggggaggaaaaagtgatggtgactgttcctgacaaaaatccaccttgtccttgctgtggtacccgggtaaactctgtgttgaatctgattgaacatctgaaagtgtcacacgggaaaaggggggtttgttttcggtgtgcaaaatgtggaaaggaaaatagtaactatcacagtgttgtttgtcattttaagaaatgcaggggtccagagacggagaaagccccagctggggagtggatttgtgaggtatgcaacagagattttacaaccaaaattggcctgggacaacacaagagattggcacacccagcagtgagaaatcaggaaaggatcgttgcttcccaaccgaaagaaacatcaaatagaggtgctcacaaaaggtgctggacaaaggaggaggaagaattactaataagactggaggctcagttcgagggaaacaaaaatattaataagcttattgcagaacacataaccaccaaaacagctaagcagatcagtgacaaaaggcgattgctgtccagaaagccagcagaggagccacgtgaggagcctggaacgtgtcatcacaccaggagagcagctgcgagcctgagaacggagcctgagatgagtcatcacgcccaggcagaggacagagataatggacctgggagacgccctctgccaggcagggcagctgccggagggagaacaatggacgagataagacgccaccctgataagggcaacggacagcagagacccaccaagcaaaaatcagaagaacagctgcaggcttactataaaaagacactagaggaacgactttcagctggggcacttaacaccttcccccgagcattcaagcaggtaatggaaggccgggatataaagctagtaatcaatcagacagcgcaggactgcttcggatgcctggaatccataagccaaataagaacggcaacccgagataaaaaggacacggtgacccgggagaaacacccaaagaaaccttttcagaagtggatgaagaagagagcaatcaaaaaaggtaattatcttcggttccagcgtttattttatcttgatagagggaaactggctaaaatcattttagatgatattgaatgcttgtcttgtgacataccactcagtgaaatttattcggtttttaaaacaagatgggaaacaactggtagctttaaaagccttggggactttaaaacttacgggaaggctgacaacactgccttcagagaattaattacggctaaagaaattgagaaaaatgtgcaggaaatgagcaaaggctcggctcccggtccagacgggattactcttggggacgtcgtaaagatggatcccgagttttcccggaccatggagattttcaatttatggttaacaactggtaaaatcccggacatggtgagggggtgcagaaccgttttgattccaaaatcatcaaagccggatcgtttgaaagacattaataactggagacctatcacgatcggttccatcttgctgagactgttctccaggattgtaacagctaggctgagcaaagcgtgccccctgaacccaaggcaaagaggctttatcagagcggcgggatgctctgaaaacttaaaactcctgcaaactataatttggtcggccaaaagagaacacagaccactgggtgttgtattcgtggacatcgccaaggcttttgacaccgtaagccaccagcacatcattcatgctttgcagcaaagagaggtggatccccacatcgtcggtctggtgagcaatatgtacgagaacatcagtacgtatatcaccacaaagaggaacacacacacagacaaaatccagatccgggttggagtaaagcagggtgacccgatgtcgccccttttatttaacctggcaatggaccctctattatgcaagctggaagagagtggcaaaggataccaccgaggacagagcagcatcacagcgatggcatttgcagacgatctggttttgctgagcgactcctgggaaaatatgaatacaaatattagcatactggagaccttctgcaatctgaccggactcaaaacacaggggcaaaagtgccacggcttttacatcaagccgacaaagaagtcttacaccatcaatgactgcgctgcctggactatcaacggcacacccctgaacatgatcgaccccggcgaatctgagaaatacctcggcctgcagtttgacccgtggattggaatagcaaggtccggtctctccacaaaactagatttttggcttcagcggatcgatcaagcaccacttaaacctctgcagaaaactgatattctcaaaacatacaccatccctcggctgatctacatagctgaccactcagaagtgaaaagcgcactactcgaaacccttgaccagaagatccggacagcggtcaaggaatggcttcacctacctccgtgcacctgcgatgccatcctgtactcgagcacgagagacggcggtttgggcatcaccaaattggcaggactgatccccagcgtgcaggcccgtagactgcatcggatcgcacagtcatctgacgatacgatgaaatgcttcatggaaaaagagaaaatggaacagctgcataagaaattgtggattcaagctggaggggacagagagaacataccctcgatttgggaagcaccaccgtcgagtgaaccaccaaacaacgtgagcacaaattcggaatgggaagcaccgacccagaaagataaatttccaaagccttgcaattggaggaaaaacgaattcaaaaaatggaccaaattggcatcccaaggccgcggaattgtaaattttgaaagagacaaaattagtaaccattggatccaatactacagacgcatacctcacaggaaactcctcactgcactacaactcagggccaacgtttaccccacgagagaatttctagccaggggtagacaagaccaatacatcaaggcgtgtaggcactgcgatgcggacctggaatcctgcgcccacatcatcggcaactgcccagtgacacaggacgcccgaatcaagaggcacaattacatctgcgaactgcttctcgaggaggcgaagaagaaggactgggtagtgttcaaggaaccgcacataagggattccaacaaggaactgtacaaacctgacctgatatttgtgaaggatgggcgtgcacttgtcgtggatgtgacagtacggtatgaagcagccaaatcatcgctggaggaagccgctgcagagaaagtgagaaagtacaaacacctggaaacggaagtaagacatctcacgaatgcaaaggacgttacttttgtgggctttcccctaggagcgcgggggaaatggcaccaagataactttaaacttttgactgagcttggcctctccaaatcgaggcaagtgaaaatggcagagactttttccacagtagcgctcttttcatctgtggacattgtacatatgtttgccagtagggccagaaaatctatggttatgtgataataggctgccttctgcggggcttgccttctggccatgcccttcttctctcccttgcacctgtacctcttggtctttgaataaagcctgagtaggaaggaccggtaaaaaaaaaaaaaaaaaaaaaaaaaaaaaaacgttgactaaaaaaaaaaaaaaaaaaaaaaaaaaaaaaaaaaaaaaaaaaaaaaaaaaaaaaaaaaaaaaaaaaaaaa

SEQ ID NO: 10983 - DNA, 5264 bp, synthetic construct
  source 1..5264: mol_type = other DNA
gaaataagagagaaaagaagagtaagaagaaatataagagaattcgccaccatggcccctaagaaaaagcggaaggtgaatatcagcggctctagctgcggcagccccaacagcgccgacaccagcagcgacttcaaggacctgtggaccaagctgaaggaatgccacgaccgggaagtgcagggactccaggtgaaggtcaccaaactcaagcaagaaagaatcctggacgcccagagactggaagaattcttcaccaagaaccagcagctgagagagcagcagaaagtgctgcacgagacaatcaaggttctggaagatagactgcgggccggcctgtgcgacagatgcgccgtgaccgaggaacacatgcgcaaaaagcagcaggagttcgagaacattagacagcaaaatctgaaattgatcacagagctgatgaacgagagaaacacactgcaggaggagaacaagaagctgagcgagcagctgcaacagaagatcgagaatgatcagcaacaccaggccgctgagctggaatgtgaagaggacgtgatccccgacagcccaatcacagctttcagcttttctggcgtgaacagactgaggcggaaggaaaacccccacgtgcggtacatcgagcagacccataccaagctggaacacagcgtgtgtgccaacgagatgagaaaggtgtccaagtcctccacccatccccagcacaaccctaacgaaaatgagatcctggtggctgatacctacgaccagtctcagagccctatggccaaggcccacggcaccagctcttatacccctgataagagctccttcaacctggccaccgtggtggccgagacactgggcctgggcgtgcaggaggaaagcgagacacagggcccaatgagccctctgggagatgagctgtaccactgcctggaaggcaaccacaagaaacagccttttgagtccggctccgagactcctggaacaagcgagagcgctacacctgagggcagccctaagagaaaggtgtccagcgccgagggcgctgccaaggaagagcctaaacggagaagcgccagactgagcgccaagccccccgccaaggtggaagccaagcctaagaaggccgccgctaaggacaagagcagcgataagaaagtccagaccaagggcaagcggggcgccaaaggcaaacaggccgaggtggccaaccaggagacaaaggaagatctgcctgctgagaacggcgaaaccaagaccgaggaatctccagcttctgacgaggccggagagaaggaggccaaaagcgacagcggctctgagacacctggaacaagcgagagcgccaccccggaatcctatgaacaacttgcaccacaaccgtgtgtgggagaaactttacattctagcctcccacgagacagtgaactgtttgtgcctgaagaggggagcagcgagaaggagagcgaggacgcgccaaaaacatctcctccgacgcctgggaaacatggtttggaacagactggggaggaaaaagtgatggtgactgttcctgacaaaaatccaccttgtccttgctgtggtacccgggtaaactctgtgttgaatctgattgaacatctgaaagtgtcacacgggaaaaggggggtttgttttcggtgtgcaaaatgtggaaaggaaaatagtaactatcacagtgttgtttgtcattttaagaaatgcaggggtccagagacggagaaagccccagctggggagtggatttgtgaggtatgcaacagagattttacaaccaaaattggcctgggacaacacaagagattggcacacccagcagtgagaaatcaggaaaggatcgttgcttcccaaccgaaagaaacatcaaatagaggtgctcacaaaaggtgctggacaaaggaggaggaagaattactaataagactggaggctcagttcgagggaaacaaaaatattaataagcttattgcagaacacataaccaccaaaacagctaagcagatcagtgacaaaaggcgattgctgtccagaaagccagcagaggagccacgtgaggagcctggaacgtgtcatcacaccaggagagcagctgcgagcctgagaacggagcctgagatgagtcatcacgcccaggcagaggacagagataatggacctgggagacgccctctgccaggcagggcagctgccggagggagaacaatggacgagataagacgccaccctgataagggcaacggacagcagagacccaccaagcaaaaatcagaaggccagctgcaggcttactataaaaagacactagaggaacgactttcagctggggcacttaacaccttcccccgagcattcaagcaggtaatggaaggccgggatataaagctagtaatcaatcagacagcgcaggactgcttcggatgcctggaatccataagccaaataagaacggcaacccgagataaaaaggacacggtgacccgggagaaacacccaaagaaaccttttcagaagtggatgaagaagagagcaatcaaaaaaggtaattatcttcggttccagcgtttattttatcttgatagagggaaactggctaaaatcattttagatgatattgaatgcttgtcttgtgacataccactcagtgaaatttattcggtttttaaaacaagatgggaaacaactggtagctttaaaagccttggggactttaaaacttacgggaaggctgacaacactgccttcagagaattaattacggctaaagaaattgagaaaaatgtgcaggaaatgagcaaaggctcggctcccggtccagacgggattactcttggggacgtcgtaaagatggatcccgagttttcccggaccatggagattttcaatttatggttaacaactggtaaaatcccggacatggtgagggggtgcagaaccgttttgattccaaaatcatcaaagccggatcgtttgaaagacattaataactggagacctatcacgatcggttccatcttgctgagactgttctccaggattgtaacagctaggctgagcaaagcgtgccccctgaacccaaggcaaagaggctttatcagagcggcgggatgctctgaaaacttaaaactcctgcaaactataatttggtcggccaaaagagaacacagaccactgggtgttgtattcgtggacatcgccaaggcttttgacaccgtaagccaccagcacatcattcatgctttgcagcaaagagaggtggatccccacatcgtcggtctggtgagcaatatgtacgagaacatcagtacgtatatcaccacaaagaggaacacacacacagacaaaatccagatccgggttggagtaaagcagggtgacccgatgtcgccccttttatttaacctggcaatggaccctctattatgcaagctggaagagagtggcaaaggataccaccgaggacagagcagcatcacagcgatggcatttgcagacgatctggttttgctgagcgactcctgggaaaatatgaatacaaatattagcatactggagaccttctgcaatctgaccggactcaaaacacaggggcaaaagtgccacggcttttacatcaagccgacaaagaagtcttacaccatcaatgactgcgctgcctggactatcaacggcacacccctgaacatgatcgaccccggcgaatctgagaaatacctcggcctgcagtttgacccgtggattggaatagcaaggtccggtctctccacaaaactagatttttggcttcagcggatcgatcaagcaccacttaaacctctgcagaaaactgatattctcaaaacatacaccatccctcggctgatctacatagctgaccactcagaagtgaaaagcgcactactcgaaacccttgaccagaagatccggacagcggtcaaggaatggcttcacctacctccgtgcacctgcgatgccatcctgtactcgagcacgagagacggcggtttgggcatcaccaaattggcaggactgatccccagcgtgcaggcccgtagactgcatcggatcgcacagtcatctgacgatacgatgaaatgcttcatggaaaaagagaaaatggaacagctgcataagaaattgtggattcaagctggaggggacagagagaacataccctcgatttgggaagcaccaccgtcgagtgaaccaccaaacaacgtgagcacaaattcggaatgggaagcaccgacccagaaagataaatttccaaagccttgcaattggaggaaaaacgaattcaaaaaatggaccaaattggcatcccaaggccgcggaattgtaaattttgaaagagacaaaattagtaaccattggatccaatactacagacgcatacctcacaggaaactcctcactgcactacaactcagggccaacgtttaccccacgagagaatttctagccaggggtagacaagaccaatacatcaaggcgtgtaggcactgcgatgcggacaacgaatcctgcgcccacatcatcggcaactgcccagtgacacaggacgcccgaatcaagaggcacaattacatctgcgaactgcttctcgaggaggcgaagaagaaggactgggtagtgttcaaggaaccgcacataagggattccaacaaggaactgtacaaacctgacctgatatttgtgaaggatgggcgtgcacttgtcgtggatgtgacagtacggtatgaagcagccaaatcatcgctggaggaagccgctgcagagaaagtgagaaagtacaaacacctggaaacggaagtaagacatctcacgaatgcaaaggacgttacttttgtgggctttcccctaggagcgcgggggaaatggcaccaagataactttaaacttttgactgagcttggcctctccaaatcgaggcaagtgaaaatggcagagactttttccacagtagcgctcttttcatctgtggacattgtacatatgtttgccagtagggccagaaaatctatggttatgtgataataggctgccttctgcggggcttgccttctggccatgcccttcttctctcccttgcacctgtacctcttggtctttgaataaagcctgagtaggaaggaccggtaaaaaaaaaaaaaaaaaaaaaaaaaaaaaaacgttgactaaaaaaaaaaaaaaaaaaaaaaaaaaaaaaaaaaaaaaaaaaaaaaaaaaaaaaaaaaaaaaaaaaaaaa

SEQ ID NO: 10984 - DNA, 5264 bp, synthetic construct
  source 1..5264: mol_type = other DNA
gaaataagagagaaaagaagagtaagaagaaatataagagaattcgccaccatggcccctaagaaaaagcggaaggtgaatatcagcggctctagctgcggcagccccaacagcgccgacaccagcagcgacttcaaggacctgtggaccaagctgaaggaatgccacgaccgggaagtgcagggactccaggtgaaggtcaccaaactcaagcaagaaagaatcctggacgcccagagactggaagaattcttcaccaagaaccagcagctgagagagcagcagaaagtgctgcacgagacaatcaaggttctggaagatagactgcgggccggcctgtgcgacagatgcgccgtgaccgaggaacacatgcgcaaaaagcagcaggagttcgagaacattagacagcaaaatctgaaattgatcacagagctgatgaacgagagaaacacactgcaggaggagaacaagaagctgagcgagcagctgcaacagaagatcgagaatgatcagcaacaccaggccgctgagctggaatgtgaagaggacgtgatccccgacagcccaatcacagctttcagcttttctggcgtgaacagactgaggcggaaggaaaacccccacgtgcggtacatcgagcagacccataccaagctggaacacagcgtgtgtgccaacgagatgagaaaggtgtccaagtcctccacccatccccagcacaaccctaacgaaaatgagatcctggtggctgatacctacgaccagtctcagagccctatggccaaggcccacggcaccagctcttatacccctgataagagctccttcaacctggccaccgtggtggccgagacactgggcctgggcgtgcaggaggaaagcgagacacagggcccaatgagccctctgggagatgagctgtaccactgcctggaaggcaaccacaagaaacagccttttgagtccggctccgagactcctggaacaagcgagagcgctacacctgagggcagccctaagagaaaggtgtccagcgccgagggcgctgccaaggaagagcctaaacggagaagcgccagactgagcgccaagccccccgccaaggtggaagccaagcctaagaaggccgccgctaaggacaagagcagcgataagaaagtccagaccaagggcaagcggggcgccaaaggcaaacaggccgaggtggccaaccaggagacaaaggaagatctgcctgctgagaacggcgaaaccaagaccgaggaatctccagcttctgacgaggccggagagaaggaggccaaaagcgacagcggctctgagacacctggaacaagcgagagcgccaccccggaatcctatgaacaacttgcaccacaaccgtgtgtgggagaaactttacattctagcctcccacgagacagtgaactgtttgtgcctgaagaggggagcagcgagaaggagagcgaggacgcgccaaaaacatctcctccgacgcctgggaaacatggtttggaacagactggggaggaaaaagtgatggtgactgttcctgacaaaaatccaccttgtccttgctgtggtacccgggtaaactctgtgttgaatctgattgaacatctgaaagtgtcacacgggaaaaggggggtttgttttcggtgtgcaaaatgtggaaaggaaaatagtaactatcacagtgttgtttgtcattttaagaaatgcaggggtccagagacggagaaagccccagctggggagtggatttgtgaggtatgcaacagagattttacaaccaaaattggcctgggacaacacaagagattggcacacccagcagtgagaaatcaggaaaggatcgttgcttcccaaccgaaagaaacatcaaatagaggtgctcacaaaaggtgctggacaaaggaggaggaagaattactaataagactggaggctcagttcgagggaaacaaaaatattaataagcttattgcagaacacataaccaccaaaacagctaagcagatcagtgacaaaaggcgattgctgtccagaaagccagcagaggagccacgtgaggagcctggaacgtgtcatcacaccaggagagcagctgcgagcctgagaacggagcctgagatgagtcatcacgcccaggcagaggacagagataatggacctgggagacgccctctgccaggcagggcagctgccggagggagaacaatggacgagataagacgccaccctgataagggcaacggacagcagagacccaccaagcaaaaatcagaagaacagctgcaggcttactataaaagaacactagaggaacgactttcagctggggcacttaacaccttcccccgagcattcaagcaggtaatggaaggccgggatataaagctagtaatcaatcagacagcgcaggactgcttcggatgcctggaatccataagccaaataagaacggcaacccgagataaaaaggacacggtgacccgggagaaacacccaaagaaaccttttcagaagtggatgaagaagagagcaatcaaaaaaggtaattatcttcggttccagcgtttattttatcttgatagagggaaactggctaaaatcattttagatgatattgaatgcttgtcttgtgacataccactcagtgaaatttattcggtttttaaaacaagatgggaaacaactggtagctttaaaagccttggggactttaaaacttacgggaaggctgacaacactgccttcagagaattaattacggctaaagaaattgagaaaaatgtgcaggaaatgagcaaaggctcggctcccggtccagacgggattactcttggggacgtcgtaaagatggatcccgagttttcccggaccatggagattttcaatttatggttaacaactggtaaaatcccggacatggtgagggggtgcagaaccgttttgattccaaaatcatcaaagccggatcgtttgaaagacattaataactggagacctatcacgatcggttccatcttgctgagactgttctccaggattgtaacagctaggctgagcaaagcgtgccccctgaacccaaggcaaagaggctttatcagagcggcgggatgctctgaaaacttaaaactcctgcaaactataatttggtcggccaaaagagaacacagaccactgggtgttgtattcgtggacatcgccaaggcttttgacaccgtaagccaccagcacatcattcatgctttgcagcaaagagaggtggatccccacatcgtcggtctggtgagcaatatgtacgagaacatcagtacgtatatcaccacaaagaggaacacacacacagacaaaatccagatccgggttggagtaaagcagggtgacccgatgtcgccccttttatttaacctggcaatggaccctctattatgcaagctggaagagagtggcaaaggataccaccgaggacagagcagcatcacagcgatggcatttgcagacgatctggttttgctgagcgactcctgggaaaatatgaatacaaatattagcatactggagaccttctgcaatctgaccggactcaaaacacaggggcaaaagtgccacggcttttacatcaagccgacaaagaagtcttacaccatcaatgactgcgctgcctggactatcaacggcacacccctgaacatgatcgaccccggcgaatctgagaaatacctcggcctgcagtttgacccgtggattggaatagcaaggtccggtctctccacaaaactagatttttggcttcagcggatcgatcaagcaccacttaaacctctgcagaaaactgatattctcaaaacatacaccatccctcggctgatctacatagctgaccactcagaagtgaaaagcgcactactcgaaacccttgaccagaagatccggacagcggtcaaggaatggcttcacctacctccgtgcacctgcgatgccatcctgtactcgagcacgagagacggcggtttgggcatcaccaaattggcaggactgatccccagcgtgcaggcccgtagactgcatcggatcgcacagtcatctgacgatacgatgaaatgcttcatggaaaaagagaaaatggaacagctgcataagaaattgtggattcaagctggaggggacagagagaacataccctcgatttgggaagcaccaccgtcgagtgaaccaccaaacaacgtgagcacaaattcggaatgggaagcaccgacccagaaagataaatttccaaagccttgcaattggaggaaaaacgaattcaaaaaatggaccaaattggcatcccaaggccgcggaattgtaaattttgaaagagacaaaattagtaaccattggatccaatactacagacgcatacctcacaggaaactcctcactgcactacaactcagggccaacgtttaccccacgagagaatttctagccaggggtagacaagaccaatacatcaaggcgtgtaggcactgcgatgcggacaacgaatcctgcgcccacatcatcggcaactgcccagtgacacaggacgcccgaatcaagaggcacaattacatctgcgaactgcttctcgaggaggcgaagaagaaggactgggtagtgttcaaggaaccgcacataagggattccaacaaggaactgtacaaacctgacctgatatttgtgaaggatgggcgtgcacttgtcgtggatgtgacagtacggtatgaagcagccaaatcatcgctggaggaagccgctgcagagaaagtgagaaagtacaaacacctggaaacggaagtaagacatctcacgaatgcaaaggacgttacttttgtgggctttcccctaggagcgcgggggaaatggcaccaagataactttaaacttttgactgagcttggcctctccaaatcgaggcaagtgaaaatggcagagactttttccacagtagcgctcttttcatctgtggacattgtacatatgtttgccagtagggccagaaaatctatggttatgtgataataggctgccttctgcggggcttgccttctggccatgcccttcttctctcccttgcacctgtacctcttggtctttgaataaagcctgagtaggaaggaccggtaaaaaaaaaaaaaaaaaaaaaaaaaaaaaaacgttgactaaaaaaaaaaaaaaaaaaaaaaaaaaaaaaaaaaaaaaaaaaaaaaaaaaaaaaaaaaaaaaaaaaaaaa

SEQ ID NO: 10985 - DNA, 5264 bp, synthetic construct
  source 1..5264: mol_type = other DNA
gaaataagagagaaaagaagagtaagaagaaatataagagaattcgccaccatggcccctaagaaaaagcggaaggtgaatatcagcggctctagctgcggcagccccaacagcgccgacaccagcagcgacttcaaggacctgtggaccaagctgaaggaatgccacgaccgggaagtgcagggactccaggtgaaggtcaccaaactcaagcaagaaagaatcctggacgcccagagactggaagaattcttcaccaagaaccagcagctgagagagcagcagaaagtgctgcacgagacaatcaaggttctggaagatagactgcgggccggcctgtgcgacagatgcgccgtgaccgaggaacacatgcgcaaaaagcagcaggagttcgagaacattagacagcaaaatctgaaattgatcacagagctgatgaacgagagaaacacactgcaggaggagaacaagaagctgagcgagcagctgcaacagaagatcgagaatgatcagcaacaccaggccgctgagctggaatgtgaagaggacgtgatccccgacagcccaatcacagctttcagcttttctggcgtgaacagactgaggcggaaggaaaacccccacgtgcggtacatcgagcagacccataccaagctggaacacagcgtgtgtgccaacgagatgagaaaggtgtccaagtcctccacccatccccagcacaaccctaacgaaaatgagatcctggtggctgatacctacgaccagtctcagagccctatggccaaggcccacggcaccagctcttatacccctgataagagctccttcaacctggccaccgtggtggccgagacactgggcctgggcgtgcaggaggaaagcgagacacagggcccaatgagccctctgggagatgagctgtaccactgcctggaaggcaaccacaagaaacagccttttgagtccggctccgagactcctggaacaagcgagagcgctacacctgagggcagccctaagagaaaggtgtccagcgccgagggcgctgccaaggaagagcctaaacggagaagcgccagactgagcgccaagccccccgccaaggtggaagccaagcctaagaaggccgccgctaaggacaagagcagcgataagaaagtccagaccaagggcaagcggggcgccaaaggcaaacaggccgaggtggccaaccaggagacaaaggaagatctgcctgctgagaacggcgaaaccaagaccgaggaatctccagcttctgacgaggccggagagaaggaggccaaaagcgacagcggctctgagacacctggaacaagcgagagcgccaccccggaatcctatgaacaacttgcaccacaaccgtgtgtgggagaaactttacattctagcctcccacgagacagtgaactgtttgtgcctgaagaggggagcagcgagaaggagagcgaggacgcgccaaaaacatctcctccgacgcctgggaaacatggtttggaacagactggggaggaaaaagtgatggtgactgttcctgacaaaaatccaccttgtccttgctgtggtacccgggtaaactctgtgttgaatctgattgaacatctgaaagtgtcacacgggaaaaggggggtttgttttcggtgtgcaaaatgtggaaaggaaaatagtaactatcacagtgttgtttgtcattttaagaaatgcaggggtccagagacggagaaagccccagctggggagtggatttgtgaggtatgcaacagagattttacaaccaaaattggcctgggacaacacaagagattggcacacccagcagtgagaaatcaggaaaggatcgttgcttcccaaccgaaagaaacatcaaatagaggtgctcacaaaaggtgctggacaaaggaggaggaagaattactaataagactggaggctcagttcgagggaaacaaaaatattaataagcttattgcagaacacataaccaccaaaacagctaagcagatcagtgacaaaaggcgattgctgtccagaaagccagcagaggagccacgtgaggagcctggaacgtgtcatcacaccaggagagcagctgcgagcctgagaacggagcctgagatgagtcatcacgcccaggcagaggacagagataatggacctgggagacgccctctgccaggcagggcagctgccggagggagaacaatggacgagataagacgccaccctgataagggcaacggacagcagagacccaccaagcaaaaatcagaagaacagctgcaggcttactataaaaagacactagaggaacgactttcagctggggcacttaacaccttcccccgagcattcaagcaggtaatggaaggccgggatataaagctagtaatcaatcagacagcgcaggactgcttcggatgcctggaatccataagccaaataagaacggcaacccgagataaaaaggacacggtgacccgggagaaacacccaaagaaaccttttcagaagtggatgaagaagagagcaatcaaaaaaggtgactatcttcggttccagcgtttattttatcttgatagagggaaactggctaaaatcattttagatgatattgaatgcttgtcttgtgacataccactcagtgaaatttattcggtttttaaaacaagatgggaaacaactggtagctttaaaagccttggggactttaaaacttacgggaaggctgacaacactgccttcagagaattaattacggctaaagaaattgagaaaaatgtgcaggaaatgagcaaaggctcggctcccggtccagacgggattactcttggggacgtcgtaaagatggatcccgagttttcccggaccatggagattttcaatttatggttaacaactggtaaaatcccggacatggtgagggggtgcagaaccgttttgattccaaaatcatcaaagccggatcgtttgaaagacattaataactggagacctatcacgatcggttccatcttgctgagactgttctccaggattgtaacagctaggctgagcaaagcgtgccccctgaacccaaggcaaagaggctttatcagagcggcgggatgctctgaaaacttaaaactcctgcaaactataatttggtcggccaaaagagaacacagaccactgggtgttgtattcgtggacatcgccaaggcttttgacaccgtaagccaccagcacatcattcatgctttgcagcaaagagaggtggatccccacatcgtcggtctggtgagcaatatgtacgagaacatcagtacgtatatcaccacaaagaggaacacacacacagacaaaatccagatccgggttggagtaaagcagggtgacccgatgtcgccccttttatttaacctggcaatggaccctctattatgcaagctggaagagagtggcaaaggataccaccgaggacagagcagcatcacagcgatggcatttgcagacgatctggttttgctgagcgactcctgggaaaatatgaatacaaatattagcatactggagaccttctgcaatctgaccggactcaaaacacaggggcaaaagtgccacggcttttacatcaagccgacaaagaagtcttacaccatcaatgactgcgctgcctggactatcaacggcacacccctgaacatgatcgaccccggcgaatctgagaaatacctcggcctgcagtttgacccgtggattggaatagcaaggtccggtctctccacaaaactagatttttggcttcagcggatcgatcaagcaccacttaaacctctgcagaaaactgatattctcaaaacatacaccatccctcggctgatctacatagctgaccactcagaagtgaaaagcgcactactcgaaacccttgaccagaagatccggacagcggtcaaggaatggcttcacctacctccgtgcacctgcgatgccatcctgtactcgagcacgagagacggcggtttgggcatcaccaaattggcaggactgatccccagcgtgcaggcccgtagactgcatcggatcgcacagtcatctgacgatacgatgaaatgcttcatggaaaaagagaaaatggaacagctgcataagaaattgtggattcaagctggaggggacagagagaacataccctcgatttgggaagcaccaccgtcgagtgaaccaccaaacaacgtgagcacaaattcggaatgggaagcaccgacccagaaagataaatttccaaagccttgcaattggaggaaaaacgaattcaaaaaatggaccaaattggcatcccaaggccgcggaattgtaaattttgaaagagacaaaattagtaaccattggatccaatactacagacgcatacctcacaggaaactcctcactgcactacaactcagggccaacgtttaccccacgagagaatttctagccaggggtagacaagaccaatacatcaaggcgtgtaggcactgcgatgcggacaacgaatcctgcgcccacatcatcggcaactgcccagtgacacaggacgcccgaatcaagaggcacaattacatctgcgaactgcttctcgaggaggcgaagaagaaggactgggtagtgttcaaggaaccgcacataagggattccaacaaggaactgtacaaacctgacctgatatttgtgaaggatgggcgtgcacttgtcgtggatgtgacagtacggtatgaagcagccaaatcatcgctggaggaagccgctgcagagaaagtgagaaagtacaaacacctggaaacggaagtaagacatctcacgaatgcaaaggacgttacttttgtgggctttcccctaggagcgcgggggaaatggcaccaagataactttaaacttttgactgagcttggcctctccaaatcgaggcaagtgaaaatggcagagactttttccacagtagcgctcttttcatctgtggacattgtacatatgtttgccagtagggccagaaaatctatggttatgtgataataggctgccttctgcggggcttgccttctggccatgcccttcttctctcccttgcacctgtacctcttggtctttgaataaagcctgagtaggaaggaccggtaaaaaaaaaaaaaaaaaaaaaaaaaaaaaaacgttgactaaaaaaaaaaaaaaaaaaaaaaaaaaaaaaaaaaaaaaaaaaaaaaaaaaaaaaaaaaaaaaaaaaaaaa

SEQ ID NO: 10986 - DNA, 5264 bp, synthetic construct
  source 1..5264: mol_type = other DNA
gaaataagagagaaaagaagagtaagaagaaatataagagaattcgccaccatggcccctaagaaaaagcggaaggtgaatatcagcggctctagctgcggcagccccaacagcgccgacaccagcagcgacttcaaggacctgtggaccaagctgaaggaatgccacgaccgggaagtgcagggactccaggtgaaggtcaccaaactcaagcaagaaagaatcctggacgcccagagactggaagaattcttcaccaagaaccagcagctgagagagcagcagaaagtgctgcacgagacaatcaaggttctggaagatagactgcgggccggcctgtgcgacagatgcgccgtgaccgaggaacacatgcgcaaaaagcagcaggagttcgagaacattagacagcaaaatctgaaattgatcacagagctgatgaacgagagaaacacactgcaggaggagaacaagaagctgagcgagcagctgcaacagaagatcgagaatgatcagcaacaccaggccgctgagctggaatgtgaagaggacgtgatccccgacagcccaatcacagctttcagcttttctggcgtgaacagactgaggcggaaggaaaacccccacgtgcggtacatcgagcagacccataccaagctggaacacagcgtgtgtgccaacgagatgagaaaggtgtccaagtcctccacccatccccagcacaaccctaacgaaaatgagatcctggtggctgatacctacgaccagtctcagagccctatggccaaggcccacggcaccagctcttatacccctgataagagctccttcaacctggccaccgtggtggccgagacactgggcctgggcgtgcaggaggaaagcgagacacagggcccaatgagccctctgggagatgagctgtaccactgcctggaaggcaaccacaagaaacagccttttgagtccggctccgagactcctggaacaagcgagagcgctacacctgagggcagccctaagagaaaggtgtccagcgccgagggcgctgccaaggaagagcctaaacggagaagcgccagactgagcgccaagccccccgccaaggtggaagccaagcctaagaaggccgccgctaaggacaagagcagcgataagaaagtccagaccaagggcaagcggggcgccaaaggcaaacaggccgaggtggccaaccaggagacaaaggaagatctgcctgctgagaacggcgaaaccaagaccgaggaatctccagcttctgacgaggccggagagaaggaggccaaaagcgacagcggctctgagacacctggaacaagcgagagcgccaccccggaatcctatgaacaacttgcaccacaaccgtgtgtgggagaaactttacattctagcctcccacgagacagtgaactgtttgtgcctgaagaggggagcagcgagaaggagagcgaggacgcgccaaaaacatctcctccgacgcctgggaaacatggtttggaacagactggggaggaaaaagtgatggtgactgttcctgacaaaaatccaccttgtccttgctgtggtacccgggtaaactctgtgttgaatctgattgaacatctgaaagtgtcacacgggaaaaggggggtttgttttcggtgtgcaaaatgtggaaaggaaaatagtaactatcacagtgttgtttgtcattttaagaaatgcaggggtccagagacggagaaagccccagctggggagtggatttgtgaggtatgcaacagagattttacaaccaaaattggcctgggacaacacaagagattggcacacccagcagtgagaaatcaggaaaggatcgttgcttcccaaccgaaagaaacatcaaatagaggtgctcacaaaaggtgctggacaaaggaggaggaagaattactaataagactggaggctcagttcgagggaaacaaaaatattaataagcttattgcagaacacataaccaccaaaacagctaagcagatcagtgacaaaaggcgattgctgtccagaaagccagcagaggagccacgtgaggagcctggaacgtgtcatcacaccaggagagcagctgcgagcctgagaacggagcctgagatgagtcatcacgcccaggcagaggacagagataatggacctgggagacgccctctgccaggcagggcagctgccggagggagaacaatggacgagataagacgccaccctgataagggcaacggacagcagagacccaccaagcaaaaatcagaagaacagctgcaggcttactataaaaagacactagaggaacgactttcagctggggcacttaacaccttcccccgagcattcaagcaggtaatggaaggccgggatataaagctagtaatcaatcagacagcgcaggactgcttcggatgcctggaatccataagccaaataagaacggcaacccgagataaaaaggacacggtgacccgggagaaacacccaaagaaaccttttcagaagtggatgaagaagagagcaatcaaaaaaggtaattatcttcggttccagcgtttattttatcttgatagagggaaactggctaaaatcattttagatgatattgaatgcttgtcttgtgacataccactcagtgaaatttattcggtttttaaaacaagatgggaaacaactggtagctttaaaagccttggggactttaaaacttacgggaaggctgacaacactgccttcagagaattaattacggctaaagaaattgagaaaaatgtgcaggaaatgagcaaaggctcggctcccggtccagacgggattactcttggggacgtcgtaaagatggatcccgagttttcccggaccatggagattttcaatttatggttaacaactggtaaaatcccggacatggtgagggggtgcagaaccgttttgattccaaaatcatcaaagccggatcgtttgaaagacattaataactggagacctatcacgatcggttccatcttgctgagactgttctccaggattgtaacagctaggctgagcaaagcgtgccccctgaacccaaggcaaagaggctttatcagagcggcgggatgctctgaaaacttaaaactcctgcaaactataatttggtcggccaaaagagaacacagaccactgggtgttgtattcgtggacatcgccaaggcttttgacaccgtaagccaccagcacatcattcatgctttgcagcaaagagaggtggatccccacatcgtcggtctggtgagcaatatgtacgagaacatcagtacgtatatcaccacaaagaggaacacacacacagacaaaatccagatccgggttggagtaaagcagggtgacccgatgtcgccccttttatttaacctggcaatggaccctctattatgcaagctggaagagagtggcaaaggataccaccgaggacagagcagcatcacagcgatggcatttgcagacgatctggttttgctgagcgactcctgggaaaatatgaatacaaatattagcatactggagaccttctgcaatctgaccggactcaaaacacaggggcaaaagtgccacggcttttacatcaagccgacaaagaagtcttacaccatcaatgactgcgctgcctggactatcaacggcacacccctgaacatgatcgaccccggcgaatctgagaaatacctcggcctgcagtttgacccgtggattggaatagcaaggtccggtctctccacaaaactagatttttggcttcagcggatcgatcaagcaccacttaaacctctgcagaaaactgatattctcaaaacatacaccatccctcggctgatctacatagctgaccactcagaagtgaaaagcgcactactcgaaacccttgaccagaagatccggacagcggtcaaggaatggcttcacctacctccgtgcacctgcgatgccatcctgtactcgagcacgagagacggcggtttgggcatcaccaaattggcaggactgatccccagcgtgcaggcccgtagactgcatcggatcgcacagtcatctgacgatacgatgaaatgcttcatggaaaaagagaaaatggaacagctgcataagaaattgtggattcaagctggaggggacagagagaacataccctcgatttgggaagcaccaccgtcgagtgaaccaccaaacaacgtgagcacaaattcggaatgggaagcaccgacccagaaagataaatttccaaagccttgcaattggaggaaaaacgaattcaaaaaatggaccaaattggcatcccaaggccgcggaattgtaaattttgaaagagacaaaattagtaaccattggatccaatactacagacgcatacctcacaggaaactcctcactgcactacaactcagggccaacgtttaccccacgagagaatttctagccaggggtagacaagaccaatacatcaaggcgtgtaggcactgcgatgcggacaacgaatcctgcgcccacatcatcggcaactgcccagtgacacaggacgcccgaatcaagaggcacaattacatctgcgaactgcttctcgaggaggcgaagaagaaggactgggtagtgttcaaggaaccgcacataagggattccaacaaggaactgtacaaacctgacctgatatttgtgaaggatgggcgtgcacttgtcgtggatgtgacagtacggtatgaagcagccaaatcatcgctggaggaagccgctgcagagaaagtgagaaagtacaaacacctggaaacggaagtaagagagctcacgaatgcaaaggacgttacttttgtgggctttcccctaggagcgcgggggaaatggcaccaagataactttaaacttttgactgagcttggcctctccaaatcgaggcaagtgaaaatggcagagactttttccacagtagcgctcttttcatctgtggacattgtacatatgtttgccagtagggccagaaaatctatggttatgtgataataggctgccttctgcggggcttgccttctggccatgcccttcttctctcccttgcacctgtacctcttggtctttgaataaagcctgagtaggaaggaccggtaaaaaaaaaaaaaaaaaaaaaaaaaaaaaaacgttgactaaaaaaaaaaaaaaaaaaaaaaaaaaaaaaaaaaaaaaaaaaaaaaaaaaaaaaaaaaaaaaaaaaaaaa

SEQ ID NO: 10987 - DNA, 5264 bp, synthetic construct
  source 1..5264: mol_type = other DNA
gaaataagagagaaaagaagagtaagaagaaatataagagaattcgccaccatggcccctaagaaaaagcggaaggtgaatatcagcggctctagctgcggcagccccaacagcgccgacaccagcagcgacttcaaggacctgtggaccaagctgaaggaatgccacgaccgggaagtgcagggactccaggtgaaggtcaccaaactcaagcaagaaagaatcctggacgcccagagactggaagaattcttcaccaagaaccagcagctgagagagcagcagaaagtgctgcacgagacaatcaaggttctggaagatagactgcgggccggcctgtgcgacagatgcgccgtgaccgaggaacacatgcgcaaaaagcagcaggagttcgagaacattagacagcaaaatctgaaattgatcacagagctgatgaacgagagaaacacactgcaggaggagaacaagaagctgagcgagcagctgcaacagaagatcgagaatgatcagcaacaccaggccgctgagctggaatgtgaagaggacgtgatccccgacagcccaatcacagctttcagcttttctggcgtgaacagactgaggcggaaggaaaacccccacgtgcggtacatcgagcagacccataccaagctggaacacagcgtgtgtgccaacgagatgagaaaggtgtccaagtcctccacccatccccagcacaaccctaacgaaaatgagatcctggtggctgatacctacgaccagtctcagagccctatggccaaggcccacggcaccagctcttatacccctgataagagctccttcaacctggccaccgtggtggccgagacactgggcctgggcgtgcaggaggaaagcgagacacagggcccaatgagccctctgggagatgagctgtaccactgcctggaaggcaaccacaagaaacagccttttgagtccggctccgagactcctggaacaagcgagagcgctacacctgagggcagccctaagagaaaggtgtccagcgccgagggcgctgccaaggaagagcctaaacggagaagcgccagactgagcgccaagccccccgccaaggtggaagccaagcctaagaaggccgccgctaaggacaagagcagcgataagaaagtccagaccaagggcaagcggggcgccaaaggcaaacaggccgaggtggccaaccaggagacaaaggaagatctgcctgctgagaacggcgaaaccaagaccgaggaatctccagcttctgacgaggccggagagaaggaggccaaaagcgacagcggctctgagacacctggaacaagcgagagcgccaccccggaatcctatgaacaacttgcaccacaaccgtgtgtgggagaaactttacattctagcctcccacgagacagtgaactgtttgtgcctgaagaggggagcagcgagaaggagagcgaggacgcgccaaaaacatctcctccgacgcctgggaaacatggtttggaacagactggggaggaaaaagtgatggtgactgttcctgacaaaaatccaccttgtccttgctgtggtacccgggtaaactctgtgttgaatctgattgaacatctgaaagtgtcacacgggaaaaggggggtttgttttcggtgtgcaaaatgtggaaaggaaaatagtaactatcacagtgttgtttgtcattttaagaaatgcaggggtccagagacggagaaagccccagctggggagtggatttgtgaggtatgcaacagagattttacaaccaaaattggcctgggacaacacaagagattggcacacccagcagtgagaaatcaggaaaggatcgttgcttcccaaccgaaagaaacatcaaatagaggtgctcacaaaaggtgctggacaaaggaggaggaagaattactaataagactggaggctcagttcgagggaaacaaaaatattaataagcttattgcagaacacataaccaccaaaacagctaagcagatcagtgacaaaaggcgattgctgtccagaaagccagcagaggagccacgtgaggagcctggaacgtgtcatcacaccaggagagcagctgcgagcctgagaacggagcctgagatgagtcatcacgcccaggcagaggacagagataatggacctgggagacgccctctgccaggcagggcagctgccggagggagaacaatggacgagataagacgccaccctgataagggcaacggacagcagagacccaccaagcaaaaatcagaagaacagctgcaggcttactataaaaagacactagaggaacgactttcagctggggcacttaacaccttcccccgagcattcaagcaggtaatggaaggccgggatataaagctagtaatcaatcagacagcgcaggactgcttcggatgcctggaatccataagccaaataagaacggcaacccgagataaaaaggacacggtgacccgggagaaacacccaaagaaaccttttcagaagtggatgaagaagagagcaatcaaaaaaggtaattatcttcggttccagcgtttattttatcttgatagagggaaactggctaaaatcattttagatgatattgaatgcttgtcttgtgacataccactcagtgaaatttattcggtttttaaaacaagatgggaaacaactggtagctttaaaagccttggggactttaaaacttacgggaaggctgacaacactgccttcagagaattaattacggctaaagaaattgagaaaaatgtgcaggaaatgagcaaaggctcggctcccggtccagacgggattactcttggggacgtcgtaaagatggatcccgagttttcccggaccatggagattttcaatttatggttaacaactggtaaaatcccggacatggtgagggggtgcagaaccgttttgattccaaaatcatcaaagccggatcgtttgaaagacattaataactggagacctatcacgatcggttccatcttgctgagactgttctccaggattgtaacagctaggctgagcaaagcgtgccccctgaacccaaggcaaagaggctttatcagagcggcgggatgctctgaaaacttaaaactcctgcaaactataatttggtcggccaaaagagaacacagaccactgggtgttgtattcgtggacatcgccaaggcttttgacaccgtaagccaccagcacatcattcatgctttgcagcaaagagaggtggatccccacatcgtcggtctggtgagcaatatgtacgagaacatcagtacgtatatcaccacaaagaggaacacacacacagacaaaatccagatccgggttggagtaaagcagggtgacccgatgtcgccccttttatttaacctggcaatggaccctctattatgcaagctggaagagagtggcaaaggataccaccgaggacagagcagcatcacagcgatggcatttgcagacgatctggttttgctgagcgactcctgggaaaatatgaatacaaatattagcatactggagaccttctgcaatctgaccggactcagaacacaggggcaaaagtgccacggcttttacatcaagccgacaaagaagtcttacaccatcaatgactgcgctgcctggactatcaacggcacacccctgaacatgatcgaccccggcgaatctgagaaatacctcggcctgcagtttgacccgtggattggaatagcaaggtccggtctctccacaaaactagatttttggcttcagcggatcgatcaagcaccacttaaacctctgcagaaaactgatattctcaaaacatacaccatccctcggctgatctacatagctgaccactcagaagtgaaaagcgcactactcgaaacccttgaccagaagatccggacagcggtcaaggaatggcttcacctacctccgtgcacctgcgatgccatcctgtactcgagcacgagagacggcggtttgggcatcaccaaattggcaggactgatccccagcgtgcaggcccgtagactgcatcggatcgcacagtcatctgacgatacgatgaaatgcttcatggaaaaagagaaaatggaacagctgcataagaaattgtggattcaagctggaggggacagagagaacataccctcgatttgggaagcaccaccgtcgagtgaaccaccaaacaacgtgagcacaaattcggaatgggaagcaccgacccagaaagataaatttccaaagccttgcaattggaggaaaaacgaattcaaaaaatggaccaaattggcatcccaaggccgcggaattgtaaattttgaaagagacaaaattagtaaccattggatccaatactacagacgcatacctcacaggaaactcctcactgcactacaactcagggccaacgtttaccccacgagagaatttctagccaggggtagacaagaccaatacatcaaggcgtgtaggcactgcgatgcggacaacgaatcctgcgcccacatcatcggcaactgcccagtgacacaggacgcccgaatcaagaggcacaattacatctgcgaactgcttctcgaggaggcgaagaagaaggactgggtagtgttcaaggaaccgcacataagggattccaacaaggaactgtacaaacctgacctgatatttgtgaaggatgggcgtgcacttgtcgtggatgtgacagtacggtatgaagcagccaaatcatcgctggaggaagccgctgcagagaaagtgagaaagtacaaacacctggaaacggaagtaagacatctcacgaatgcaaaggacgttacttttgtgggctttcccctaggagcgcgggggaaatggcaccaagataactttaaacttttgactgagcttggcctctccaaatcgaggcaagtgaaaatggcagagactttttccacagtagcgctcttttcatctgtggacattgtacatatgtttgccagtagggccagaaaatctatggttatgtgataataggctgccttctgcggggcttgccttctggccatgcccttcttctctcccttgcacctgtacctcttggtctttgaataaagcctgagtaggaaggaccggtaaaaaaaaaaaaaaaaaaaaaaaaaaaaaaacgttgactaaaaaaaaaaaaaaaaaaaaaaaaaaaaaaaaaaaaaaaaaaaaaaaaaaaaaaaaaaaaaaaaaaaaaa

SEQ ID NO: 10988 - DNA, 5264 bp, synthetic construct; identical to SEQ ID NO: 10905
  source 1..5264: mol_type = other DNA

SEQ ID NO: 10989 - DNA, 5264 bp, synthetic construct
  source 1..5264: mol_type = other DNA
gaaataagagagaaaagaagagtaagaagaaatataagagaattcgccaccatggcccctaagaaaaagcggaaggtgaatatcagcggctctagctgcggcagccccaacagcgccgacaccagcagcgacttcaaggacctgtggaccaagctgaaggaatgccacgaccgggaagtgcagggactccaggtgaaggtcaccaaactcaagcaagaaagaatcctggacgcccagagactggaagaattcttcaccaagaaccagcagctgagagagcagcagaaagtgctgcacgagacaatcaaggttctggaagatagactgcgggccggcctgtgcgacagatgcgccgtgaccgaggaacacatgcgcaaaaagcagcaggagttcgagaacattagacagcaaaatctgaaattgatcacagagctgatgaacgagagaaacacactgcaggaggagaacaagaagctgagcgagcagctgcaacagaagatcgagaatgatcagcaacaccaggccgctgagctggaatgtgaagaggacgtgatccccgacagcccaatcacagctttcagcttttctggcgtgaacagactgaggcggaaggaaaacccccacgtgcggtacatcgagcagacccataccaagctggaacacagcgtgtgtgccaacgagatgagaaaggtgtccaagtcctccacccatccccagcacaaccctaacgaaaatgagatcctggtggctgatacctacgaccagtctcagagccctatggccaaggcccacggcaccagctcttatacccctgataagagctccttcaacctggccaccgtggtggccgagacactgggcctgggcgtgcaggaggaaagcgagacacagggcccaatgagccctctgggagatgagctgtaccactgcctggaaggcaaccacaagaaacagccttttgagtccggctccgagactcctggaacaagcgagagcgctacacctgagggcagccctaagagaaaggtgtccagcgccgagggcgctgccaaggaagagcctaaacggagaagcgccagactgagcgccaagccccccgccaaggtggaagccaagcctaagaaggccgccgctaaggacaagagcagcgataagaaagtccagaccaagggcaagcggggcgccaaaggcaaacaggccgaggtggccaaccaggagacaaaggaagatctgcctgctgagaacggcgaaaccaagaccgaggaatctccagcttctgacgaggccggagagaaggaggccaaaagcgacagcggctctgagacacctggaacaagcgagagcgccaccccggaatcctatgaacaacttgcaccacaaccgtgtgtgggagaaactttacattctagcctcccacgagacagtgaactgtttgtgcctgaagaggggagcagcgagaaggagagcgaggacgcgccaaaaacatctcctccgacgcctgggaaacatggtttggaacagactggggaggaaaaagtgatggtgactgttcctgacaaaaatccaccttgtccttgctgtggtacccgggtaaactctgtgttgaatctgattgaacatctgaaagtgtcacacgggaaaaggggggtttgttttcggtgtgcaaaatgtggaaaggaaaatagtaactatcacagtgttgtttgtcattttaagaaatgcaggggtccagagacggagaaagccccagctggggagtggatttgtgaggtatgcaacagagattttacaaccaaaattggcctgggacaacacaagagattggcacacccagcagtgagaaatcaggaaaggatcgttgcttcccaaccgaaagaaacatcaaatagaggtgctcacaaaaggtgctggacaaaggaggaggaagaattactaataagactggaggctcagttcgagggaaacaaaaatattaataagcttattgcagaacacataaccaccaaaacagctaagcagatcagtgacaaaaggcgattgctgtccagaaagccagcagaggagccacgtgaggagcctggaacgtgtcatcacaccaggagagcagctgcgagcctgagaacggagcctgagatgagtcatcacgcccaggcagaggacagagataatggacctgggagacgccctctgccaggcagggcagctgccggagggagaacaatggacgagataagacgccaccctgataagggcaacggacagcagagacccaccaagcaaaaatcagaagaacagctgcaggcttactataaaaagacactagaggaacgactttcagctggggcacttaacaccttcccccgagcattcaagcaggtaatggaaggccgggatataaagctagtaatcaatcagacagcgcaggactgcttcggatgcctggaatccataagccaaataagaacggcaacccgagataaaaaggacacggtgacccgggagaaacacccaaagaaaccttttcagaagtggatgaagaagagagcaatcaaaaaaggtaattatcttcggttccagcgtttattttatcttgatagagggaaactggctaaaatcattttagatgatattgaatgcttgtcttgtgacataccactcagtgaaatttattcggtttttaaaacaagatgggaaacaactggtagctttaaaagccttggggactttaaaacttacgggaaggctgacaacactgccttcagagaattaattacggctaaagaaattgagaaaaatgtgcaggaaatgagcaaaggctcggctcccggtccagacgggattactcttggggacgtcgtaaagatggatcccgagttttcccggaccatggagattttcaatttatggttaacaactggtaaaatcccggacatggtgagggggtgcagaaccgttttgattccaaaatcatcaaagccggatcgtttgaaagacattaataactggagacctatcacgatcggttccatcttgctgagactgttctccaggattgtaacagctaggctgagcaaagcgtgccccctgaacccaaggcaaagaggctttatcagagcggcgggatgctctgaaaacttaaaactcctgcaaactataatttggtcggccaaaagagaacacagaccactgggtgttgtattcgtggacatcgccaaggcttttgacaccgtaagccaccagcacatcattcatgctttgcagcaaagagaggtggatccccacatcgtcggtctggtgagcaatatgtacgagaacatcagtacgtatatcaccacaaagaggaacacacacacagacaaaatccagatccgggttggagtaaagcagggtgacccgatgtcgccccttttatttaacctggcaatggaccctctattatgcaagctggaagagagtggcaaaggataccaccgaggacagagcagcatcacagcgatggcatttgcagacgatctggttttgctgagcgactcctgggaaaatatgaatacaaatattagcatactggagaccttctgcaatctgaccggactcaaaacacaggggcaaaagtgccacggcttttacatcaagccgacaaagaagtcttacaccatcaatgactgcgctgcctggactatcaacggcacacccctgaacatgatcgaccccggcgaatctgagaaatacctcggcctgcagtttgacccgtggattggaatagcaaggtccggtctctccacaaaactagatttttggcttcagcggatcgatcaagcaccacttaaacctctgcagaaaactgatattctcaaaacatacaccatccctcggctgatctacatagctgaccactcagaagtgaaaagcgcactactcgaaacccttgaccagaagatccggacagcggtcaaggaaaagcttcacctacctccgtgcacctgcgatgccatcctgtactcgagcacgagagacggcggtttgggcatcaccaaattggcaggactgatccccagcgtgcaggcccgtagactgcatcggatcgcacagtcatctgacgatacgatgaaatgcttcatggaaaaagagaaaatggaacagctgcataagaaattgtggattcaagctggaggggacagagagaacataccctcgatttgggaagcaccaccgtcgagtgaaccaccaaacaacgtgagcacaaattcggaatgggaagcaccgacccagaaagataaatttccaaagccttgcaattggaggaaaaacgaattcaaaaaatggaccaaattggcatcccaaggccgcggaattgtaaattttgaaagagacaaaattagtaaccattggatccaatactacagacgcatacctcacaggaaactcctcactgcactacaactcagggccaacgtttaccccacgagagaatttctagccaggggtagacaagaccaatacatcaaggcgtgtaggcactgcgatgcggacaacgaatcctgcgcccacatcatcggcaactgcccagtgacacaggacgcccgaatcaagaggcacaattacatctgcgaactgcttctcgaggaggcgaagaagaaggactgggtagtgttcaaggaaccgcacataagggattccaacaaggaactgtacaaacctgacctgatatttgtgaaggatgggcgtgcacttgtcgtggatgtgacagtacggtatgaagcagccaaatcatcgctggaggaagccgctgcagagaaagtgagaaagtacaaacacctggaaacggaagtaagacatctcacgaatgcaaaggacgttacttttgtgggctttcccctaggagcgcgggggaaatggcaccaagataactttaaacttttgactgagcttggcctctccaaatcgaggcaagtgaaaatggcagagactttttccacagtagcgctcttttcatctgtggacattgtacatatgtttgccagtagggccagaaaatctatggttatgtgataataggctgccttctgcggggcttgccttctggccatgcccttcttctctcccttgcacctgtacctcttggtctttgaataaagcctgagtaggaaggaccggtaaaaaaaaaaaaaaaaaaaaaaaaaaaaaaacgttgactaaaaaaaaaaaaaaaaaaaaaaaaaaaaaaaaaaaaaaaaaaaaaaaaaaaaaaaaaaaaaaaaaaaaaa

SEQ ID NO: 10990 - DNA, 5264 bp, synthetic construct
  source 1..5264: mol_type = other DNA
gaaataagagagaaaagaagagtaagaagaaatataagagaattcgccaccatggcccctaagaaaaagcggaaggtgaatatcagcggctctagctgcggcagccccaacagcgccgacaccagcagcgacttcaaggacctgtggaccaagctgaaggaatgccacgaccgggaagtgcagggactccaggtgaaggtcaccaaactcaagcaagaaagaatcctggacgcccagagactggaagaattcttcaccaagaaccagcagctgagagagcagcagaaagtgctgcacgagacaatcaaggttctggaagatagactgcgggccggcctgtgcgacagatgcgccgtgaccgaggaacacatgcgcaaaaagcagcaggagttcgagaacattagacagcaaaatctgaaattgatcacagagctgatgaacgagagaaacacactgcaggaggagaacaagaagctgagcgagcagctgcaacagaagatcgagaatgatcagcaacaccaggccgctgagctggaatgtgaagaggacgtgatccccgacagcccaatcacagctttcagcttttctggcgtgaacagactgaggcggaaggaaaacccccacgtgcggtacatcgagcagacccataccaagctggaacacagcgtgtgtgccaacgagatgagaaaggtgtccaagtcctccacccatccccagcacaaccctaacgaaaatgagatcctggtggctgatacctacgaccagtctcagagccctatggccaaggcccacggcaccagctcttatacccctgataagagctccttcaacctggccaccgtggtggccgagacactgggcctgggcgtgcaggaggaaagcgagacacagggcccaatgagccctctgggagatgagctgtaccactgcctggaaggcaaccacaagaaacagccttttgagtccggctccgagactcctggaacaagcgagagcgctacacctgagggcagccctaagagaaaggtgtccagcgccgagggcgctgccaaggaagagcctaaacggagaagcgccagactgagcgccaagccccccgccaaggtggaagccaagcctaagaaggccgccgctaaggacaagagcagcgataagaaagtccagaccaagggcaagcggggcgccaaaggcaaacaggccgaggtggccaaccaggagacaaaggaagatctgcctgctgagaacggcgaaaccaagaccgaggaatctccagcttctgacgaggccggagagaaggaggccaaaagcgacagcggctctgagacacctggaacaagcgagagcgccaccccggaatcctatgaacaacttgcaccacaaagatgtgtgggagaaactttacattctagcctcccacgagacagtgaactgtttgtgcctgaagaggggagcagcgagaaggagagcgaggacgcgccaaaaacatctcctccgacgcctgggaaacatggtttggaacagactggggaggaaaaagtgatggtgactgttcctgacaaaaatccaccttgtccttgctgtggtacccgggtaaactctgtgttgaatctgattgaacatctgaaagtgtcacacgggaaaaggggggtttgttttcggtgtgcaaaatgtggaaaggaaaatagtaactatcacagtgttgtttgtcattttaagaaatgcaggggtccagagacggagaaagccccagctggggagtggatttgtgaggtatgcaacagagattttacaaccaaaattggcctgggacaacacaagagattggcacacccagcagtgagaaatcaggaaaggatcgttgcttcccaaccgaaagaaacatcaaatagaggtgctcacaaaaggtgctggacaaaggaggaggaagaattactaataagactggaggctcagttcgagggaaacaaaaatattaataagcttattgcagaacacataaccaccaaaacagctaagcagatcagtgacaaaaggcgattgctgtccagaaagccagcagaggagccacgtgaggagcctggaacgtgtcatcacaccaggagagcagctgcgagcctgagaacggagcctgagatgagtcatcacgcccaggcagaggacagagataatggacctgggagacgccctctgccaggcagggcagctgccggagggagaacaatggacgagataagacgccaccctgataagggcaacggacagcagagacccaccaagcaaaaatcagaagaacagctgcaggcttactataaaaagacactagaggaacgactttcagctggggcacttaacaccttcccccgagcattcaagcaggtaatggaaggccgggatataaagctagtaatcaatcagacagcgcaggactgcttcggatgcctggaatccataagccaaataagaacggcaacccgagataaaaaggacacggtgacccgggagaaacacccaaagaaaccttttcagaagtggatgaagaagagagcaatcaaaaaaggtaattatcttcggttccagcgtttattttatcttgatagagggaaactggctaaaatcattttagatgatattgaatgcttgtcttgtgacataccactcagtgaaatttattcggtttttaaaacaagatgggaaacaactggtagctttaaaagccttggggactttaaaacttacgggaaggctgacaacactgccttcagagaattaattacggctaaagaaattgagaaaaatgtgcaggaaatgagcaaaggctcggctcccggtccagacgggattactcttggggacgtcgtaaagatggatcccgagttttcccggaccatggagattttcaatttatggttaacaactggtaaaatcccggacatggtgagggggtgcagaaccgttttgattccaaaatcatcaaagccggatcgtttgaaagacattaataactggagacctatcacgatcggttccatcttgctgagactgttctccaggattgtaacagctaggctgagcaaagcgtgccccctgaacccaaggcaaagaggctttatcagagcggcgggatgctctgaaaacttaaaactcctgcaaactataatttggtcggccaaaagagaacacagaccactgggtgttgtattcgtggacatcgccaaggcttttgacaccgtaagccaccagcacatcattcatgctttgcagcaaagagaggtggatccccacatcgtcggtctggtgagcaatatgtacgagaacatcagtacgtatatcaccacaaagaggaacacacacacagacaaaatccagatccgggttggagtaaagcagggtgacccgatgtcgccccttttatttaacctggcaatggaccctctattatgcaagctggaagagagtggcaaaggataccaccgaggacagagcagcatcacagcgatggcatttgcagacgatctggttttgctgagcgactcctgggaaaatatgaatacaaatattagcatactggagaccttctgcaatctgaccggactcaaaacacaggggcaaaagtgccacggcttttacatcaagccgacaaagaagtcttacaccatcaatgactgcgctgcctggactatcaacggcacacccctgaacatgatcgaccccggcgaatctgagaaatacctcggcctgcagtttgacccgtggattggaatagcaaggtccggtctctccacaaaactagatttttggcttcagcggatcgatcaagcaccacttaaacctctgcagaaaactgatattctcaaaacatacaccatccctcggctgatctacatagctgaccactcagaagtgaaaagcgcactactcgaaacccttgaccagaagatccggacagcggtcaaggaatggcttcacctacctccgtgcacctgcgatgccatcctgtactcgagcacgagagacggcggtttgggcatcaccaaattggcaggactgatccccagcgtgcaggcccgtagactgcatcggatcgcacagtcatctgacgatacgatgaaatgcttcatggaaaaagagaaaatggaacagctgcataagaaattgtggattcaagctggaggggacagagagaacataccctcgatttgggaagcaccaccgtcgagtgaaccaccaaacaacgtgagcacaaattcggaatgggaagcaccgacccagaaagataaatttccaaagccttgcaattggaggaaaaacgaattcaaaaaatggaccaaattggcatcccaaggccgcggaattgtaaattttgaaagagacaaaattagtaaccattggatccaatactacagacgcatacctcacaggaaactcctcactgcactacaactcagggccaacgtttaccccacgagagaatttctagccaggggtagacaagaccaatacatcaaggcgtgtaggcactgcgatgcggacaacgaatcctgcgcccacatcatcggcaactgcccagtgacacaggacgcccgaatcaagaggcacaattacatctgcgaactgcttctcgaggaggcgaagaagaaggactgggtagtgttcaaggaaccgcacataagggattccaacaaggaactgtacaaacctgacctgatatttgtgaaggatgggcgtgcacttgtcgtggatgtgacagtacggtatgaagcagccaaatcatcgctggaggaagccgctgcagagaaagtgagaaagtacaaacacctggaaacggaagtaagacatctcacgaatgcaaaggacgttacttttgtgggctttcccctaggagcgcgggggaaatggcaccaagataactttaaacttttgactgagcttggcctctccaaatcgaggcaagtgaaaatggcagagactttttccacagtagcgctcttttcatctgtggacattgtacatatgtttgccagtagggccagaaaatctatggttatgtgataataggctgccttctgcggggcttgccttctggccatgcccttcttctctcccttgcacctgtacctcttggtctttgaataaagcctgagtaggaaggaccggtaaaaaaaaaaaaaaaaaaaaaaaaaaaaaaacgttgactaaaaaaaaaaaaaaaaaaaaaaaaaaaaaaaaaaaaaaaaaaaaaaaaaaaaaaaaaaaaaaaaaaaaaa

SEQ ID NO: 10991 - DNA, 5264 bp, synthetic construct
  source 1..5264: mol_type = other DNA
gaaataagagagaaaagaagagtaagaagaaatataagagaattcgccaccatggcccctaagaaaaagcggaaggtgaatatcagcggctctagctgcggcagccccaacagcgccgacaccagcagcgacttcaaggacctgtggaccaagctgaaggaatgccacgaccgggaagtgcagggactccaggtgaaggtcaccaaactcaagcaagaaagaatcctggacgcccagagactggaagaattcttcaccaagaaccagcagctgagagagcagcagaaagtgctgcacgagacaatcaaggttctggaagatagactgcgggccggcctgtgcgacagatgcgccgtgaccgaggaacacatgcgcaaaaagcagcaggagttcgagaacattagacagcaaaatctgaaattgatcacagagctgatgaacgagagaaacacactgcaggaggagaacaagaagctgagcgagcagctgcaacagaagatcgagaatgatcagcaacaccaggccgctgagctggaatgtgaagaggacgtgatccccgacagcccaatcacagctttcagcttttctggcgtgaacagactgaggcggaaggaaaacccccacgtgcggtacatcgagcagacccataccaagctggaacacagcgtgtgtgccaacgagatgagaaaggtgtccaagtcctccacccatccccagcacaaccctaacgaaaatgagatcctggtggctgatacctacgaccagtctcagagccctatggccaaggcccacggcaccagctcttatacccctgataagagctccttcaacctggccaccgtggtggccgagacactgggcctgggcgtgcaggaggaaagcgagacacagggcccaatgagccctctgggagatgagctgtaccactgcctggaaggcaaccacaagaaacagccttttgagtccggctccgagactcctggaacaagcgagagcgctacacctgagggcagccctaagagaaaggtgtccagcgccgagggcgctgccaaggaagagcctaaacggagaagcgccagactgagcgccaagccccccgccaaggtggaagccaagcctaagaaggccgccgctaaggacaagagcagcgataagaaagtccagaccaagggcaagcggggcgccaaaggcaaacaggccgaggtggccaaccaggagacaaaggaagatctgcctgctgagaacggcgaaaccaagaccgaggaatctccagcttctgacgaggccggagagaaggaggccaaaagcgacagcggctctgagacacctggaacaagcgagagcgccaccccggaatcctatgaacaacttgcaccacaaccgtgtgtgggagaaactttacattctagcctcccacgagacagtgaactgtttgtgcctgaagaggggagcagcgagaaggagagcgaggacgcgccaaaaacatctcctccgacgcctgggaaacatggtttggaacagactggggaggaaaaagtgatggtgactgttcctgacaaaaatccaccttgtccttgctgtggtacccgggtaaactctgtgttgaatctgattgaacatctgaaagtgtcacacgggaaaaggggggtttgttttcggtgtgcaaaatgtggaaaggaaaatagtaactatcacagtgttgtttgtcattttaagaaatgcaggggtccagagacggagaaagccccagctggggagtggatttgtgaggtatgcaacagagattttacaaccaaaattggcctgggacaacacaagagattggcacacccagcagtgagaaatcaggaaaggatcgttgcttcccaaccgaaagaaacatcaaatagaggtgctcacaaaaggtgctggacaaaggaggaggaagaattactaataagactggaggctcagttcgagggaaacaaaaatattaataagcttattgcagaacacataaccaccaaaacagctaagcagatcagtgacaaaaggcgattgctgtccagaaagccagcagaggagccacgtgaggagcctggaacgtgtcatcacaccaggagagcagctgcgagcctgagaacggagcctgagatgagtcatcacgcccaggcagaggacagagataatggacctgggagacgccctctgccaggcagggcagctgccggagggagaacaatggacgagataagacgccaccctgataagggcaacggacagcagagacccaccaagcaaaaatcagaagaacagctgcaggcttactataaaaagacactagaggaacgactttcagctggggcacttaacaccttcccccgagcattcaagcaggtaatggaaggccgggatataaagctagtaatcaatcagacagcgcaggactgcttcggatgcctggaatccataagccaaataagaacggcaacccgagataaaaaggacacggtgacccgggagaaacacccaaagaaaccttttcagaagtggatgaagaagagagcaatcaaaaaaggtaattatcttcggttccagcgtttattttatcttgatagagggaaactggctaaaatcattttagatgatattgaatgcttgtcttgtgacataccactcagtgaaatttattcggtttttaaaacaagatgggaaacaactggtagctttaaaagccttggggactttaaaacttacgggaaggctgacaacactgccttcagagaattaattacggctaaagaaattgagaaaaatgtgcaggaaatgagcaaaggctcggctcccggtccagacgggattactcttggggacgtcgtaaagatggatcccgagttttcccggaccatggagattttcaatttatggttaacaactggtaaaatcccggacatggtgagggggtgcagaaccgttttgattccaaaatcatcaaagccggatcgtttgaaagacattaataactggagacctatcacgatcggttccatcttgctgagactgttctccaggattgtaacagctaggctgagcaaagcgtgccccctgaacccaaggcaaagaggctttatcagagcggcgggatgctctgaaaacttaaaactcctgcaaactataatttggtcggccaaaagagaacacagaccactgggtgttgtattcgtggacatcgccaaggcttttgacaccgtaagccaccagcacatcattcatgctttgcagcaaagagaggtggatccccacatcgtcggtctggtgagcaatatgtacgagaacatcagtacgtatatcaccacaaagaggaacacacacacagacaaaatccagatccgggttggagtaaagcagggtgacccgatgtcgccccttttatttaacctggcaatggaccctctattatgcaagctggaagagagtggcaaaggataccaccgaggacagagcagcatcacagcgatggcatttgcagacgatctggttttgctgagcgactcctgggaaaatatgaatacaaatattagcatactggagaccttctgcaatctgaccggactcaaaacacaggggcaaaagtgccacggcttttacatcaagccgacaaagaagtcttacaccatcaatgactgcgctgcctggactatcaacggcacacccctgaacatgatcgaccccggcgaatctgagaaatacctcggcctgcagtttgacccgtggattggaatagcaaggtccggtctctccacaaaactaatgttttggcttcagcggatcgatcaagcaccacttaaacctctgcagaaaactgatattctcaaaacatacaccatccctcggctgatctacatagctgaccactcagaagtgaaaagcgcactactcgaaacccttgaccagaagatccggacagcggtcaaggaatggcttcacctacctccgtgcacctgcgatgccatcctgtactcgagcacgagagacggcggtttgggcatcaccaaattggcaggactgatccccagcgtgcaggcccgtagactgcatcggatcgcacagtcatctgacgatacgatgaaatgcttcatggaaaaagagaaaatggaacagctgcataagaaattgtggattcaagctggaggggacagagagaacataccctcgatttgggaagcaccaccgtcgagtgaaccaccaaacaacgtgagcacaaattcggaatgggaagcaccgacccagaaagataaatttccaaagccttgcaattggaggaaaaacgaattcaaaaaatggaccaaattggcatcccaaggccgcggaattgtaaattttgaaagagacaaaattagtaaccattggatccaatactacagacgcatacctcacaggaaactcctcactgcactacaactcagggccaacgtttaccccacgagagaatttctagccaggggtagacaagaccaatacatcaaggcgtgtaggcactgcgatgcggacaacgaatcctgcgcccacatcatcggcaactgcccagtgacacaggacgcccgaatcaagaggcacaattacatctgcgaactgcttctcgaggaggcgaagaagaaggactgggtagtgttcaaggaaccgcacataagggattccaacaaggaactgtacaaacctgacctgatatttgtgaaggatgggcgtgcacttgtcgtggatgtgacagtacggtatgaagcagccaaatcatcgctggaggaagccgctgcagagaaagtgagaaagtacaaacacctggaaacggaagtaagacatctcacgaatgcaaaggacgttacttttgtgggctttcccctaggagcgcgggggaaatggcaccaagataactttaaacttttgactgagcttggcctctccaaatcgaggcaagtgaaaatggcagagactttttccacagtagcgctcttttcatctgtggacattgtacatatgtttgccagtagggccagaaaatctatggttatgtgataataggctgccttctgcggggcttgccttctggccatgcccttcttctctcccttgcacctgtacctcttggtctttgaataaagcctgagtaggaaggaccggtaaaaaaaaaaaaaaaaaaaaaaaaaaaaaaacgttgactaaaaaaaaaaaaaaaaaaaaaaaaaaaaaaaaaaaaaaaaaaaaaaaaaaaaaaaaaaaaaaaaaaaaaa

SEQ ID NO: 10992 - DNA, 5264 bp, synthetic construct
  source 1..5264: mol_type = other DNA
gaaataagagagaaaagaagagtaagaagaaatataagagaattcgccaccatggcccctaagaaaaagcggaaggtgaatatcagcggctctagctgcggcagccccaacagcgccgacaccagcagcgacttcaaggacctgtggaccaagctgaaggaatgccacgaccgggaagtgcagggactccaggtgaaggtcaccaaactcaagcaagaaagaatcctggacgcccagagactggaagaattcttcaccaagaaccagcagctgagagagcagcagaaagtgctgcacgagacaatcaaggttctggaagatagactgcgggccggcctgtgcgacagatgcgccgtgaccgaggaacacatgcgcaaaaagcagcaggagttcgagaacattagacagcaaaatctgaaattgatcacagagctgatgaacgagagaaacacactgcaggaggagaacaagaagctgagcgagcagctgcaacagaagatcgagaatgatcagcaacaccaggccgctgagctggaatgtgaagaggacgtgatccccgacagcccaatcacagctttcagcttttctggcgtgaacagactgaggcggaaggaaaacccccacgtgcggtacatcgagcagacccataccaagctggaacacagcgtgtgtgccaacgagatgagaaaggtgtccaagtcctccacccatccccagcacaaccctaacgaaaatgagatcctggtggctgatacctacgaccagtctcagagccctatggccaaggcccacggcaccagctcttatacccctgataagagctccttcaacctggccaccgtggtggccgagacactgggcctgggcgtgcaggaggaaagcgagacacagggcccaatgagccctctgggagatgagctgtaccactgcctggaaggcaaccacaagaaacagccttttgagtccggctccgagactcctggaacaagcgagagcgctacacctgagggcagccctaagagaaaggtgtccagcgccgagggcgctgccaaggaagagcctaaacggagaagcgccagactgagcgccaagccccccgccaaggtggaagccaagcctaagaaggccgccgctaaggacaagagcagcgataagaaagtccagaccaagggcaagcggggcgccaaaggcaaacaggccgaggtggccaaccaggagacaaaggaagatctgcctgctgagaacggcgaaaccaagaccgaggaatctccagcttctgacgaggccggagagaaggaggccaaaagcgacagcggctctgagacacctggaacaagcgagagcgccaccccggaatcctatgaacaacttgcaccacaaccgaaggtgggagaaactttacattctagcctcccacgagacagtgaactgtttgtgcctgaagaggggagcagcgagaaggagagcgaggacgcgccaaaaacatctcctccgacgcctgggaaacatggtttggaacagactggggaggaaaaagtgatggtgactgttcctgacaaaaatccaccttgtccttgctgtggtacccgggtaaactctgtgttgaatctgattgaacatctgaaagtgtcacacgggaaaaggggggtttgttttcggtgtgcaaaatgtggaaaggaaaatagtaactatcacagtgttgtttgtcattttaagaaatgcaggggtccagagacggagaaagccccagctggggagtggatttgtgaggtatgcaacagagattttacaaccaaaattggcctgggacaacacaagagattggcacacccagcagtgagaaatcaggaaaggatcgttgcttcccaaccgaaagaaacatcaaatagaggtgctcacaaaaggtgctggacaaaggaggaggaagaattactaataagactggaggctcagttcgagggaaacaaaaatattaataagcttattgcagaacacataaccaccaaaacagctaagcagatcagtgacaaaaggcgattgctgtccagaaagccagcagaggagccacgtgaggagcctggaacgtgtcatcacaccaggagagcagctgcgagcctgagaacggagcctgagatgagtcatcacgcccaggcagaggacagagataatggacctgggagacgccctctgccaggcagggcagctgccggagggagaacaatggacgagataagacgccaccctgataagggcaacggacagcagagacccaccaagcaaaaatcagaagaacagctgcaggcttactataaaaagacactagaggaacgactttcagctggggcacttaacaccttcccccgagcattcaagcaggtaatggaaggccgggatataaagctagtaatcaatcagacagcgcaggactgcttcggatgcctggaatccataagccaaataagaacggcaacccgagataaaaaggacacggtgacccgggagaaacacccaaagaaaccttttcagaagtggatgaagaagagagcaatcaaaaaaggtaattatcttcggttccagcgtttattttatcttgatagagggaaactggctaaaatcattttagatgatattgaatgcttgtcttgtgacataccactcagtgaaatttattcggtttttaaaacaagatgggaaacaactggtagctttaaaagccttggggactttaaaacttacgggaaggctgacaacactgccttcagagaattaattacggctaaagaaattgagaaaaatgtgcaggaaatgagcaaaggctcggctcccggtccagacgggattactcttggggacgtcgtaaagatggatcccgagttttcccggaccatggagattttcaatttatggttaacaactggtaaaatcccggacatggtgagggggtgcagaaccgttttgattccaaaatcatcaaagccggatcgtttgaaagacattaataactggagacctatcacgatcggttccatcttgctgagactgttctccaggattgtaacagctaggctgagcaaagcgtgccccctgaacccaaggcaaagaggctttatcagagcggcgggatgctctgaaaacttaaaactcctgcaaactataatttggtcggccaaaagagaacacagaccactgggtgttgtattcgtggacatcgccaaggcttttgacaccgtaagccaccagcacatcattcatgctttgcagcaaagagaggtggatccccacatcgtcggtctggtgagcaatatgtacgagaacatcagtacgtatatcaccacaaagaggaacacacacacagacaaaatccagatccgggttggagtaaagcagggtgacccgatgtcgccccttttatttaacctggcaatggaccctctattatgcaagctggaagagagtggcaaaggataccaccgaggacagagcagcatcacagcgatggcatttgcagacgatctggttttgctgagcgactcctgggaaaatatgaatacaaatattagcatactggagaccttctgcaatctgaccggactcaaaacacaggggcaaaagtgccacggcttttacatcaagccgacaaagaagtcttacaccatcaatgactgcgctgcctggactatcaacggcacacccctgaacatgatcgaccccggcgaatctgagaaatacctcggcctgcagtttgacccgtggattggaatagcaaggtccggtctctccacaaaactagatttttggcttcagcggatcgatcaagcaccacttaaacctctgcagaaaactgatattctcaaaacatacaccatccctcggctgatctacatagctgaccactcagaagtgaaaagcgcactactcgaaacccttgaccagaagatccggacagcggtcaaggaatggcttcacctacctccgtgcacctgcgatgccatcctgtactcgagcacgagagacggcggtttgggcatcaccaaattggcaggactgatccccagcgtgcaggcccgtagactgcatcggatcgcacagtcatctgacgatacgatgaaatgcttcatggaaaaagagaaaatggaacagctgcataagaaattgtggattcaagctggaggggacagagagaacataccctcgatttgggaagcaccaccgtcgagtgaaccaccaaacaacgtgagcacaaattcggaatgggaagcaccgacccagaaagataaatttccaaagccttgcaattggaggaaaaacgaattcaaaaaatggaccaaattggcatcccaaggccgcggaattgtaaattttgaaagagacaaaattagtaaccattggatccaatactacagacgcatacctcacaggaaactcctcactgcactacaactcagggccaacgtttaccccacgagagaatttctagccaggggtagacaagaccaatacatcaaggcgtgtaggcactgcgatgcggacaacgaatcctgcgcccacatcatcggcaactgcccagtgacacaggacgcccgaatcaagaggcacaattacatctgcgaactgcttctcgaggaggcgaagaagaaggactgggtagtgttcaaggaaccgcacataagggattccaacaaggaactgtacaaacctgacctgatatttgtgaaggatgggcgtgcacttgtcgtggatgtgacagtacggtatgaagcagccaaatcatcgctggaggaagccgctgcagagaaagtgagaaagtacaaacacctggaaacggaagtaagacatctcacgaatgcaaaggacgttacttttgtgggctttcccctaggagcgcgggggaaatggcaccaagataactttaaacttttgactgagcttggcctctccaaatcgaggcaagtgaaaatggcagagactttttccacagtagcgctcttttcatctgtggacattgtacatatgtttgccagtagggccagaaaatctatggttatgtgataataggctgccttctgcggggcttgccttctggccatgcccttcttctctcccttgcacctgtacctcttggtctttgaataaagcctgagtaggaaggaccggtaaaaaaaaaaaaaaaaaaaaaaaaaaaaaaacgttgactaaaaaaaaaaaaaaaaaaaaaaaaaaaaaaaaaaaaaaaaaaaaaaaaaaaaaaaaaaaaaaaaaaaaaa

SEQ ID NO: 10993 - DNA, 5264 bp, synthetic construct
  source 1..5264: mol_type = other DNA
gaaataagagagaaaagaagagtaagaagaaatataagagaattcgccaccatggcccctaagaaaaagcggaaggtgaatatcagcggctctagctgcggcagccccaacagcgccgacaccagcagcgacttcaaggacctgtggaccaagctgaaggaatgccacgaccgggaagtgcagggactccaggtgaaggtcaccaaactcaagcaagaaagaatcctggacgcccagagactggaagaattcttcaccaagaaccagcagctgagagagcagcagaaagtgctgcacgagacaatcaaggttctggaagatagactgcgggccggcctgtgcgacagatgcgccgtgaccgaggaacacatgcgcaaaaagcagcaggagttcgagaacattagacagcaaaatctgaaattgatcacagagctgatgaacgagagaaacacactgcaggaggagaacaagaagctgagcgagcagctgcaacagaagatcgagaatgatcagcaacaccaggccgctgagctggaatgtgaagaggacgtgatccccgacagcccaatcacagctttcagcttttctggcgtgaacagactgaggcggaaggaaaacccccacgtgcggtacatcgagcagacccataccaagctggaacacagcgtgtgtgccaacgagatgagaaaggtgtccaagtcctccacccatccccagcacaaccctaacgaaaatgagatcctggtggctgatacctacgaccagtctcagagccctatggccaaggcccacggcaccagctcttatacccctgataagagctccttcaacctggccaccgtggtggccgagacactgggcctgggcgtgcaggaggaaagcgagacacagggcccaatgagccctctgggagatgagctgtaccactgcctggaaggcaaccacaagaaacagccttttgagtccggctccgagactcctggaacaagcgagagcgctacacctgagggcagccctaagagaaaggtgtccagcgccgagggcgctgccaaggaagagcctaaacggagaagcgccagactgagcgccaagccccccgccaaggtggaagccaagcctaagaaggccgccgctaaggacaagagcagcgataagaaagtccagaccaagggcaagcggggcgccaaaggcaaacaggccgaggtggccaaccaggagacaaaggaagatctgcctgctgagaacggcgaaaccaagaccgaggaatctccagcttctgacgaggccggagagaaggaggccaaaagcgacagcggctctgagacacctggaacaagcgagagcgccaccccggaatcctatgaacaacttgcaccacaaccgtgtgtgggagaaactttacatagaagcctcccacgagacagtgaactgtttgtgcctgaagaggggagcagcgagaaggagagcgaggacgcgccaaaaacatctcctccgacgcctgggaaacatggtttggaacagactggggaggaaaaagtgatggtgactgttcctgacaaaaatccaccttgtccttgctgtggtacccgggtaaactctgtgttgaatctgattgaacatctgaaagtgtcacacgggaaaaggggggtttgttttcggtgtgcaaaatgtggaaaggaaaatagtaactatcacagtgttgtttgtcattttaagaaatgcaggggtccagagacggagaaagccccagctggggagtggatttgtgaggtatgcaacagagattttacaaccaaaattggcctgggacaacacaagagattggcacacccagcagtgagaaatcaggaaaggatcgttgcttcccaaccgaaagaaacatcaaatagaggtgctcacaaaaggtgctggacaaaggaggaggaagaattactaataagactggaggctcagttcgagggaaacaaaaatattaataagcttattgcagaacacataaccaccaaaacagctaagcagatcagtgacaaaaggcgattgctgtccagaaagccagcagaggagccacgtgaggagcctggaacgtgtcatcacaccaggagagcagctgcgagcctgagaacggagcctgagatgagtcatcacgcccaggcagaggacagagataatggacctgggagacgccctctgccaggcagggcagctgccggagggagaacaatggacgagataagacgccaccctgataagggcaacggacagcagagacccaccaagcaaaaatcagaagaacagctgcaggcttactataaaaagacactagaggaacgactttcagctggggcacttaacaccttcccccgagcattcaagcaggtaatggaaggccgggatataaagctagtaatcaatcagacagcgcaggactgcttcggatgcctggaatccataagccaaataagaacggcaacccgagataaaaaggacacggtgacccgggagaaacacccaaagaaaccttttcagaagtggatgaagaagagagcaatcaaaaaaggtaattatcttcggttccagcgtttattttatcttgatagagggaaactggctaaaatcattttagatgatattgaatgcttgtcttgtgacataccactcagtgaaatttattcggtttttaaaacaagatgggaaacaactggtagctttaaaagccttggggactttaaaacttacgggaaggctgacaacactgccttcagagaattaattacggctaaagaaattgagaaaaatgtgcaggaaatgagcaaaggctcggctcccggtccagacgggattactcttggggacgtcgtaaagatggatcccgagttttcccggaccatggagattttcaatttatggttaacaactggtaaaatcccggacatggtgagggggtgcagaaccgttttgattccaaaatcatcaaagccggatcgtttgaaagacattaataactggagacctatcacgatcggttccatcttgctgagactgttctccaggattgtaacagctaggctgagcaaagcgtgccccctgaacccaaggcaaagaggctttatcagagcggcgggatgctctgaaaacttaaaactcctgcaaactataatttggtcggccaaaagagaacacagaccactgggtgttgtattcgtggacatcgccaaggcttttgacaccgtaagccaccagcacatcattcatgctttgcagcaaagagaggtggatccccacatcgtcggtctggtgagcaatatgtacgagaacatcagtacgtatatcaccacaaagaggaacacacacacagacaaaatccagatccgggttggagtaaagcagggtgacccgatgtcgccccttttatttaacctggcaatggaccctctattatgcaagctggaagagagtggcaaaggataccaccgaggacagagcagcatcacagcgatggcatttgcagacgatctggttttgctgagcgactcctgggaaaatatgaatacaaatattagcatactggagaccttctgcaatctgaccggactcaaaacacaggggcaaaagtgccacggcttttacatcaagccgacaaagaagtcttacaccatcaatgactgcgctgcctggactatcaacggcacacccctgaacatgatcgaccccggcgaatctgagaaatacctcggcctgcagtttgacccgtggattggaatagcaaggtccggtctctccacaaaactagatttttggcttcagcggatcgatcaagcaccacttaaacctctgcagaaaactgatattctcaaaacatacaccatccctcggctgatctacatagctgaccactcagaagtgaaaagcgcactactcgaaacccttgaccagaagatccggacagcggtcaaggaatggcttcacctacctccgtgcacctgcgatgccatcctgtactcgagcacgagagacggcggtttgggcatcaccaaattggcaggactgatccccagcgtgcaggcccgtagactgcatcggatcgcacagtcatctgacgatacgatgaaatgcttcatggaaaaagagaaaatggaacagctgcataagaaattgtggattcaagctggaggggacagagagaacataccctcgatttgggaagcaccaccgtcgagtgaaccaccaaacaacgtgagcacaaattcggaatgggaagcaccgacccagaaagataaatttccaaagccttgcaattggaggaaaaacgaattcaaaaaatggaccaaattggcatcccaaggccgcggaattgtaaattttgaaagagacaaaattagtaaccattggatccaatactacagacgcatacctcacaggaaactcctcactgcactacaactcagggccaacgtttaccccacgagagaatttctagccaggggtagacaagaccaatacatcaaggcgtgtaggcactgcgatgcggacaacgaatcctgcgcccacatcatcggcaactgcccagtgacacaggacgcccgaatcaagaggcacaattacatctgcgaactgcttctcgaggaggcgaagaagaaggactgggtagtgttcaaggaaccgcacataagggattccaacaaggaactgtacaaacctgacctgatatttgtgaaggatgggcgtgcacttgtcgtggatgtgacagtacggtatgaagcagccaaatcatcgctggaggaagccgctgcagagaaagtgagaaagtacaaacacctggaaacggaagtaagacatctcacgaatgcaaaggacgttacttttgtgggctttcccctaggagcgcgggggaaatggcaccaagataactttaaacttttgactgagcttggcctctccaaatcgaggcaagtgaaaatggcagagactttttccacagtagcgctcttttcatctgtggacattgtacatatgtttgccagtagggccagaaaatctatggttatgtgataataggctgccttctgcggggcttgccttctggccatgcccttcttctctcccttgcacctgtacctcttggtctttgaataaagcctgagtaggaaggaccggtaaaaaaaaaaaaaaaaaaaaaaaaaaaaaaacgttgactaaaaaaaaaaaaaaaaaaaaaaaaaaaaaaaaaaaaaaaaaaaaaaaaaaaaaaaaaaaaaaaaaaaaaa

SEQ ID NO: 10994 - DNA, 5264 bp, synthetic construct
  source 1..5264: mol_type = other DNA
gaaataagagagaaaagaagagtaagaagaaatataagagaattcgccaccatggcccctaagaaaaagcggaaggtgaatatcagcggctctagctgcggcagccccaacagcgccgacaccagcagcgacttcaaggacctgtggaccaagctgaaggaatgccacgaccgggaagtgcagggactccaggtgaaggtcaccaaactcaagcaagaaagaatcctggacgcccagagactggaagaattcttcaccaagaaccagcagctgagagagcagcagaaagtgctgcacgagacaatcaaggttctggaagatagactgcgggccggcctgtgcgacagatgcgccgtgaccgaggaacacatgcgcaaaaagcagcaggagttcgagaacattagacagcaaaatctgaaattgatcacagagctgatgaacgagagaaacacactgcaggaggagaacaagaagctgagcgagcagctgcaacagaagatcgagaatgatcagcaacaccaggccgctgagctggaatgtgaagaggacgtgatccccgacagcccaatcacagctttcagcttttctggcgtgaacagactgaggcggaaggaaaacccccacgtgcggtacatcgagcagacccataccaagctggaacacagcgtgtgtgccaacgagatgagaaaggtgtccaagtcctccacccatccccagcacaaccctaacgaaaatgagatcctggtggctgatacctacgaccagtctcagagccctatggccaaggcccacggcaccagctcttatacccctgataagagctccttcaacctggccaccgtggtggccgagacactgggcctgggcgtgcaggaggaaagcgagacacagggcccaatgagccctctgggagatgagctgtaccactgcctggaaggcaaccacaagaaacagccttttgagtccggctccgagactcctggaacaagcgagagcgctacacctgagggcagccctaagagaaaggtgtccagcgccgagggcgctgccaaggaagagcctaaacggagaagcgccagactgagcgccaagccccccgccaaggtggaagccaagcctaagaaggccgccgctaaggacaagagcagcgataagaaagtccagaccaagggcaagcggggcgccaaaggcaaacaggccgaggtggccaaccaggagacaaaggaagatctgcctgctgagaacggcgaaaccaagaccgaggaatctccagcttctgacgaggccggagagaaggaggccaaaagcgacagcggctctgagacacctggaacaagcgagagcgccaccccggaatcctatgaacaacttagaccacaaccgtgtgtgggagaaactttacattctagcctcccacgagacagtgaactgtttgtgcctgaagaggggagcagcgagaaggagagcgaggacgcgccaaaaacatctcctccgacgcctgggaaacatggtttggaacagactggggaggaaaaagtgatggtgactgttcctgacaaaaatccaccttgtccttgctgtggtacccgggtaaactctgtgttgaatctgattgaacatctgaaagtgtcacacgggaaaaggggggtttgttttcggtgtgcaaaatgtggaaaggaaaatagtaactatcacagtgttgtttgtcattttaagaaatgcaggggtccagagacggagaaagccccagctggggagtggatttgtgaggtatgcaacagagattttacaaccaaaattggcctgggacaacacaagagattggcacacccagcagtgagaaatcaggaaaggatcgttgcttcccaaccgaaagaaacatcaaatagaggtgctcacaaaaggtgctggacaaaggaggaggaagaattactaataagactggaggctcagttcgagggaaacaaaaatattaataagcttattgcagaacacataaccaccaaaacagctaagcagatcagtgacaaaaggcgattgctgtccagaaagccagcagaggagccacgtgaggagcctggaacgtgtcatcacaccaggagagcagctgcgagcctgagaacggagcctgagatgagtcatcacgcccaggcagaggacagagataatggacctgggagacgccctctgccaggcagggcagctgccggagggagaacaatggacgagataagacgccaccctgataagggcaacggacagcagagacccaccaagcaaaaatcagaagaacagctgcaggcttactataaaaagacactagaggaacgactttcagctggggcacttaacaccttcccccgagcattcaagcaggtaatggaaggccgggatataaagctagtaatcaatcagacagcgcaggactgcttcggatgcctggaatccataagccaaataagaacggcaacccgagataaaaaggacacggtgacccgggagaaacacccaaagaaaccttttcagaagtggatgaagaagagagcaatcaaaaaaggtaattatcttcggttccagcgtttattttatcttgatagagggaaactggctaaaatcattttagatgatattgaatgcttgtcttgtgacataccactcagtgaaatttattcggtttttaaaacaagatgggaaacaactggtagctttaaaagccttggggactttaaaacttacgggaaggctgacaacactgccttcagagaattaattacggctaaagaaattgagaaaaatgtgcaggaaatgagcaaaggctcggctcccggtccagacgggattactcttggggacgtcgtaaagatggatcccgagttttcccggaccatggagattttcaatttatggttaacaactggtaaaatcccggacatggtgagggggtgcagaaccgttttgattccaaaatcatcaaagccggatcgtttgaaagacattaataactggagacctatcacgatcggttccatcttgctgagactgttctccaggattgtaacagctaggctgagcaaagcgtgccccctgaacccaaggcaaagaggctttatcagagcggcgggatgctctgaaaacttaaaactcctgcaaactataatttggtcggccaaaagagaacacagaccactgggtgttgtattcgtggacatcgccaaggcttttgacaccgtaagccaccagcacatcattcatgctttgcagcaaagagaggtggatccccacatcgtcggtctggtgagcaatatgtacgagaacatcagtacgtatatcaccacaaagaggaacacacacacagacaaaatccagatccgggttggagtaaagcagggtgacccgatgtcgccccttttatttaacctggcaatggaccctctattatgcaagctggaagagagtggcaaaggataccaccgaggacagagcagcatcacagcgatggcatttgcagacgatctggttttgctgagcgactcctgggaaaatatgaatacaaatattagcatactggagaccttctgcaatctgaccggactcaaaacacaggggcaaaagtgccacggcttttacatcaagccgacaaagaagtcttacaccatcaatgactgcgctgcctggactatcaacggcacacccctgaacatgatcgaccccggcgaatctgagaaatacctcggcctgcagtttgacccgtggattggaatagcaaggtccggtctctccacaaaactagatttttggcttcagcggatcgatcaagcaccacttaaacctctgcagaaaactgatattctcaaaacatacaccatccctcggctgatctacatagctgaccactcagaagtgaaaagcgcactactcgaaacccttgaccagaagatccggacagcggtcaaggaatggcttcacctacctccgtgcacctgcgatgccatcctgtactcgagcacgagagacggcggtttgggcatcaccaaattggcaggactgatccccagcgtgcaggcccgtagactgcatcggatcgcacagtcatctgacgatacgatgaaatgcttcatggaaaaagagaaaatggaacagctgcataagaaattgtggattcaagctggaggggacagagagaacataccctcgatttgggaagcaccaccgtcgagtgaaccaccaaacaacgtgagcacaaattcggaatgggaagcaccgacccagaaagataaatttccaaagccttgcaattggaggaaaaacgaattcaaaaaatggaccaaattggcatcccaaggccgcggaattgtaaattttgaaagagacaaaattagtaaccattggatccaatactacagacgcatacctcacaggaaactcctcactgcactacaactcagggccaacgtttaccccacgagagaatttctagccaggggtagacaagaccaatacatcaaggcgtgtaggcactgcgatgcggacaacgaatcctgcgcccacatcatcggcaactgcccagtgacacaggacgcccgaatcaagaggcacaattacatctgcgaactgcttctcgaggaggcgaagaagaaggactgggtagtgttcaaggaaccgcacataagggattccaacaaggaactgtacaaacctgacctgatatttgtgaaggatgggcgtgcacttgtcgtggatgtgacagtacggtatgaagcagccaaatcatcgctggaggaagccgctgcagagaaagtgagaaagtacaaacacctggaaacggaagtaagacatctcacgaatgcaaaggacgttacttttgtgggctttcccctaggagcgcgggggaaatggcaccaagataactttaaacttttgactgagcttggcctctccaaatcgaggcaagtgaaaatggcagagactttttccacagtagcgctcttttcatctgtggacattgtacatatgtttgccagtagggccagaaaatctatggttatgtgataataggctgccttctgcggggcttgccttctggccatgcccttcttctctcccttgcacctgtacctcttggtctttgaataaagcctgagtaggaaggaccggtaaaaaaaaaaaaaaaaaaaaaaaaaaaaaaacgttgactaaaaaaaaaaaaaaaaaaaaaaaaaaaaaaaaaaaaaaaaaaaaaaaaaaaaaaaaaaaaaaaaaaaaaa

SEQ ID NO: 10995 - DNA, 5264 bp, synthetic construct
  source 1..5264: mol_type = other DNA
gaaataagagagaaaagaagagtaagaagaaatataagagaattcgccaccatggcccctaagaaaaagcggaaggtgaatatcagcggctctagctgcggcagccccaacagcgccgacaccagcagcgacttcaaggacctgtggaccaagctgaaggaatgccacgaccgggaagtgcagggactccaggtgaaggtcaccaaactcaagcaagaaagaatcctggacgcccagagactggaagaattcttcaccaagaaccagcagctgagagagcagcagaaagtgctgcacgagacaatcaaggttctggaagatagactgcgggccggcctgtgcgacagatgcgccgtgaccgaggaacacatgcgcaaaaagcagcaggagttcgagaacattagacagcaaaatctgaaattgatcacagagctgatgaacgagagaaacacactgcaggaggagaacaagaagctgagcgagcagctgcaacagaagatcgagaatgatcagcaacaccaggccgctgagctggaatgtgaagaggacgtgatccccgacagcccaatcacagctttcagcttttctggcgtgaacagactgaggcggaaggaaaacccccacgtgcggtacatcgagcagacccataccaagctggaacacagcgtgtgtgccaacgagatgagaaaggtgtccaagtcctccacccatccccagcacaaccctaacgaaaatgagatcctggtggctgatacctacgaccagtctcagagccctatggccaaggcccacggcaccagctcttatacccctgataagagctccttcaacctggccaccgtggtggccgagacactgggcctgggcgtgcaggaggaaagcgagacacagggcccaatgagccctctgggagatgagctgtaccactgcctggaaggcaaccacaagaaacagccttttgagtccggctccgagactcctggaacaagcgagagcgctacacctgagggcagccctaagagaaaggtgtccagcgccgagggcgctgccaaggaagagcctaaacggagaagcgccagactgagcgccaagccccccgccaaggtggaagccaagcctaagaaggccgccgctaaggacaagagcagcgataagaaagtccagaccaagggcaagcggggcgccaaaggcaaacaggccgaggtggccaaccaggagacaaaggaagatctgcctgctgagaacggcgaaaccaagaccgaggaatctccagcttctgacgaggccggagagaaggaggccaaaagcgacagcggctctgagacacctggaacaagcgagagcgccaccccggaatcctatgaacaacttgcaccacaaccgtgtgtgggagaaactttacattctagcctcccacgagacagtgaactgtttgtgcctgaagaggggagcagcgagaaggagagcgaggacgcgccaaaaacatctcctccgacgcctgggaaacatggtttggaacagactggggaggaaaaagtgatggtgactgttcctgacaaaaatccaccttgtccttgctgtggtacccgggtaaactctgtgttgaatctgattgaacatctgaaagtgtcacacgggaaaaggggggtttgttttcggtgtgcaaaatgtggaaaggaaaatagtaactatcacagtgttgtttgtcattttaagaaatgcaggggtccagagacggagaaagccccagctggggagtggatttgtgaggtatgcaacagagattttacaaccaaaattggcctgggacaacacaagagattggcacacccagcagtgagaaatcaggaaaggatcgttgcttcccaaccgaaagaaacatcaaatagaggtgctcacaaaaggtgctggacaaaggaggaggaagaattactaataagactggaggctcagttcgagggaaacaaaaatattaataagcttattgcagaacacataaccaccaaaacagctaagcagatcagtgacaaaaggcgattgctgtccagaaagccagcagaggagccacgtgaggagcctggaacgtgtcatcacaccaggagagcagctgcgagcctgagaacggagcctgagatgagtcatcacgcccaggcagaggacagagataatggacctgggagacgccctctgccaggcagggcagctgccggagggagaacaatggacgagataagacgccaccctgataagggcaacggacagcagagacccaccaagcaaaaatcagaagaacagctgcaggcttactataaaaagacactagaggaacgactttcagctggggcacttaacaccttcccccgagcattcaagcaggtaatggaaggccgggatataaagctagtaatcaatcagacagcgcaggactgcttcggatgcctggaatccataagccaaataagaacggcaacccgagataaaaaggacacggtgacccgggagaaacacccaaagaaaagatttcagaagtggatgaagaagagagcaatcaaaaaaggtaattatcttcggttccagcgtttattttatcttgatagagggaaactggctaaaatcattttagatgatattgaatgcttgtcttgtgacataccactcagtgaaatttattcggtttttaaaacaagatgggaaacaactggtagctttaaaagccttggggactttaaaacttacgggaaggctgacaacactgccttcagagaattaattacggctaaagaaattgagaaaaatgtgcaggaaatgagcaaaggctcggctcccggtccagacgggattactcttggggacgtcgtaaagatggatcccgagttttcccggaccatggagattttcaatttatggttaacaactggtaaaatcccggacatggtgagggggtgcagaaccgttttgattccaaaatcatcaaagccggatcgtttgaaagacattaataactggagacctatcacgatcggttccatcttgctgagactgttctccaggattgtaacagctaggctgagcaaagcgtgccccctgaacccaaggcaaagaggctttatcagagcggcgggatgctctgaaaacttaaaactcctgcaaactataatttggtcggccaaaagagaacacagaccactgggtgttgtattcgtggacatcgccaaggcttttgacaccgtaagccaccagcacatcattcatgctttgcagcaaagagaggtggatccccacatcgtcggtctggtgagcaatatgtacgagaacatcagtacgtatatcaccacaaagaggaacacacacacagacaaaatccagatccgggttggagtaaagcagggtgacccgatgtcgccccttttatttaacctggcaatggaccctctattatgcaagctggaagagagtggcaaaggataccaccgaggacagagcagcatcacagcgatggcatttgcagacgatctggttttgctgagcgactcctgggaaaatatgaatacaaatattagcatactggagaccttctgcaatctgaccggactcaaaacacaggggcaaaagtgccacggcttttacatcaagccgacaaagaagtcttacaccatcaatgactgcgctgcctggactatcaacggcacacccctgaacatgatcgaccccggcgaatctgagaaatacctcggcctgcagtttgacccgtggattggaatagcaaggtccggtctctccacaaaactagatttttggcttcagcggatcgatcaagcaccacttaaacctctgcagaaaactgatattctcaaaacatacaccatccctcggctgatctacatagctgaccactcagaagtgaaaagcgcactactcgaaacccttgaccagaagatccggacagcggtcaaggaatggcttcacctacctccgtgcacctgcgatgccatcctgtactcgagcacgagagacggcggtttgggcatcaccaaattggcaggactgatccccagcgtgcaggcccgtagactgcatcggatcgcacagtcatctgacgatacgatgaaatgcttcatggaaaaagagaaaatggaacagctgcataagaaattgtggattcaagctggaggggacagagagaacataccctcgatttgggaagcaccaccgtcgagtgaaccaccaaacaacgtgagcacaaattcggaatgggaagcaccgacccagaaagataaatttccaaagccttgcaattggaggaaaaacgaattcaaaaaatggaccaaattggcatcccaaggccgcggaattgtaaattttgaaagagacaaaattagtaaccattggatccaatactacagacgcatacctcacaggaaactcctcactgcactacaactcagggccaacgtttaccccacgagagaatttctagccaggggtagacaagaccaatacatcaaggcgtgtaggcactgcgatgcggacaacgaatcctgcgcccacatcatcggcaactgcccagtgacacaggacgcccgaatcaagaggcacaattacatctgcgaactgcttctcgaggaggcgaagaagaaggactgggtagtgttcaaggaaccgcacataagggattccaacaaggaactgtacaaacctgacctgatatttgtgaaggatgggcgtgcacttgtcgtggatgtgacagtacggtatgaagcagccaaatcatcgctggaggaagccgctgcagagaaagtgagaaagtacaaacacctggaaacggaagtaagacatctcacgaatgcaaaggacgttacttttgtgggctttcccctaggagcgcgggggaaatggcaccaagataactttaaacttttgactgagcttggcctctccaaatcgaggcaagtgaaaatggcagagactttttccacagtagcgctcttttcatctgtggacattgtacatatgtttgccagtagggccagaaaatctatggttatgtgataataggctgccttctgcggggcttgccttctggccatgcccttcttctctcccttgcacctgtacctcttggtctttgaataaagcctgagtaggaaggaccggtaaaaaaaaaaaaaaaaaaaaaaaaaaaaaaacgttgactaaaaaaaaaaaaaaaaaaaaaaaaaaaaaaaaaaaaaaaaaaaaaaaaaaaaaaaaaaaaaaaaaaaaaa

SEQ ID NO: 10996 - DNA, 5264 bp, synthetic construct
  source 1..5264: mol_type = other DNA
gaaataagagagaaaagaagagtaagaagaaatataagagaattcgccaccatggcccctaagaaaaagcggaaggtgaatatcagcggctctagctgcggcagccccaacagcgccgacaccagcagcgacttcaaggacctgtggaccaagctgaaggaatgccacgaccgggaagtgcagggactccaggtgaaggtcaccaaactcaagcaagaaagaatcctggacgcccagagactggaagaattcttcaccaagaaccagcagctgagagagcagcagaaagtgctgcacgagacaatcaaggttctggaagatagactgcgggccggcctgtgcgacagatgcgccgtgaccgaggaacacatgcgcaaaaagcagcaggagttcgagaacattagacagcaaaatctgaaattgatcacagagctgatgaacgagagaaacacactgcaggaggagaacaagaagctgagcgagcagctgcaacagaagatcgagaatgatcagcaacaccaggccgctgagctggaatgtgaagaggacgtgatccccgacagcccaatcacagctttcagcttttctggcgtgaacagactgaggcggaaggaaaacccccacgtgcggtacatcgagcagacccataccaagctggaacacagcgtgtgtgccaacgagatgagaaaggtgtccaagtcctccacccatccccagcacaaccctaacgaaaatgagatcctggtggctgatacctacgaccagtctcagagccctatggccaaggcccacggcaccagctcttatacccctgataagagctccttcaacctggccaccgtggtggccgagacactgggcctgggcgtgcaggaggaaagcgagacacagggcccaatgagccctctgggagatgagctgtaccactgcctggaaggcaaccacaagaaacagccttttgagtccggctccgagactcctggaacaagcgagagcgctacacctgagggcagccctaagagaaaggtgtccagcgccgagggcgctgccaaggaagagcctaaacggagaagcgccagactgagcgccaagccccccgccaaggtggaagccaagcctaagaaggccgccgctaaggacaagagcagcgataagaaagtccagaccaagggcaagcggggcgccaaaggcaaacaggccgaggtggccaaccaggagacaaaggaagatctgcctgctgagaacggcgaaaccaagaccgaggaatctccagcttctgacgaggccggagagaaggaggccaaaagcgacagcggctctgagacacctggaacaagcgagagcgccaccccggaatcctatgaacaacttgcaccacaaccgtgtgtgggagaaactttacattctagcctcccacgagacagtgaactgtttgtgcctgaagaggggagcagcgagaaggagagcgaggacgcgccaaaaacaagacctccgacgcctgggaaacatggtttggaacagactggggaggaaaaagtgatggtgactgttcctgacaaaaatccaccttgtccttgctgtggtacccgggtaaactctgtgttgaatctgattgaacatctgaaagtgtcacacgggaaaaggggggtttgttttcggtgtgcaaaatgtggaaaggaaaatagtaactatcacagtgttgtttgtcattttaagaaatgcaggggtccagagacggagaaagccccagctggggagtggatttgtgaggtatgcaacagagattttacaaccaaaattggcctgggacaacacaagagattggcacacccagcagtgagaaatcaggaaaggatcgttgcttcccaaccgaaagaaacatcaaatagaggtgctcacaaaaggtgctggacaaaggaggaggaagaattactaataagactggaggctcagttcgagggaaacaaaaatattaataagcttattgcagaacacataaccaccaaaacagctaagcagatcagtgacaaaaggcgattgctgtccagaaagccagcagaggagccacgtgaggagcctggaacgtgtcatcacaccaggagagcagctgcgagcctgagaacggagcctgagatgagtcatcacgcccaggcagaggacagagataatggacctgggagacgccctctgccaggcagggcagctgccggagggagaacaatggacgagataagacgccaccctgataagggcaacggacagcagagacccaccaagcaaaaatcagaagaacagctgcaggcttactataaaaagacactagaggaacgactttcagctggggcacttaacaccttcccccgagcattcaagcaggtaatggaaggccgggatataaagctagtaatcaatcagacagcgcaggactgcttcggatgcctggaatccataagccaaataagaacggcaacccgagataaaaaggacacggtgacccgggagaaacacccaaagaaaccttttcagaagtggatgaagaagagagcaatcaaaaaaggtaattatcttcggttccagcgtttattttatcttgatagagggaaactggctaaaatcattttagatgatattgaatgcttgtcttgtgacataccactcagtgaaatttattcggtttttaaaacaagatgggaaacaactggtagctttaaaagccttggggactttaaaacttacgggaaggctgacaacactgccttcagagaattaattacggctaaagaaattgagaaaaatgtgcaggaaatgagcaaaggctcggctcccggtccagacgggattactcttggggacgtcgtaaagatggatcccgagttttcccggaccatggagattttcaatttatggttaacaactggtaaaatcccggacatggtgagggggtgcagaaccgttttgattccaaaatcatcaaagccggatcgtttgaaagacattaataactggagacctatcacgatcggttccatcttgctgagactgttctccaggattgtaacagctaggctgagcaaagcgtgccccctgaacccaaggcaaagaggctttatcagagcggcgggatgctctgaaaacttaaaactcctgcaaactataatttggtcggccaaaagagaacacagaccactgggtgttgtattcgtggacatcgccaaggcttttgacaccgtaagccaccagcacatcattcatgctttgcagcaaagagaggtggatccccacatcgtcggtctggtgagcaatatgtacgagaacatcagtacgtatatcaccacaaagaggaacacacacacagacaaaatccagatccgggttggagtaaagcagggtgacccgatgtcgccccttttatttaacctggcaatggaccctctattatgcaagctggaagagagtggcaaaggataccaccgaggacagagcagcatcacagcgatggcatttgcagacgatctggttttgctgagcgactcctgggaaaatatgaatacaaatattagcatactggagaccttctgcaatctgaccggactcaaaacacaggggcaaaagtgccacggcttttacatcaagccgacaaagaagtcttacaccatcaatgactgcgctgcctggactatcaacggcacacccctgaacatgatcgaccccggcgaatctgagaaatacctcggcctgcagtttgacccgtggattggaatagcaaggtccggtctctccacaaaactagatttttggcttcagcggatcgatcaagcaccacttaaacctctgcagaaaactgatattctcaaaacatacaccatccctcggctgatctacatagctgaccactcagaagtgaaaagcgcactactcgaaacccttgaccagaagatccggacagcggtcaaggaatggcttcacctacctccgtgcacctgcgatgccatcctgtactcgagcacgagagacggcggtttgggcatcaccaaattggcaggactgatccccagcgtgcaggcccgtagactgcatcggatcgcacagtcatctgacgatacgatgaaatgcttcatggaaaaagagaaaatggaacagctgcataagaaattgtggattcaagctggaggggacagagagaacataccctcgatttgggaagcaccaccgtcgagtgaaccaccaaacaacgtgagcacaaattcggaatgggaagcaccgacccagaaagataaatttccaaagccttgcaattggaggaaaaacgaattcaaaaaatggaccaaattggcatcccaaggccgcggaattgtaaattttgaaagagacaaaattagtaaccattggatccaatactacagacgcatacctcacaggaaactcctcactgcactacaactcagggccaacgtttaccccacgagagaatttctagccaggggtagacaagaccaatacatcaaggcgtgtaggcactgcgatgcggacaacgaatcctgcgcccacatcatcggcaactgcccagtgacacaggacgcccgaatcaagaggcacaattacatctgcgaactgcttctcgaggaggcgaagaagaaggactgggtagtgttcaaggaaccgcacataagggattccaacaaggaactgtacaaacctgacctgatatttgtgaaggatgggcgtgcacttgtcgtggatgtgacagtacggtatgaagcagccaaatcatcgctggaggaagccgctgcagagaaagtgagaaagtacaaacacctggaaacggaagtaagacatctcacgaatgcaaaggacgttacttttgtgggctttcccctaggagcgcgggggaaatggcaccaagataactttaaacttttgactgagcttggcctctccaaatcgaggcaagtgaaaatggcagagactttttccacagtagcgctcttttcatctgtggacattgtacatatgtttgccagtagggccagaaaatctatggttatgtgataataggctgccttctgcggggcttgccttctggccatgcccttcttctctcccttgcacctgtacctcttggtctttgaataaagcctgagtaggaaggaccggtaaaaaaaaaaaaaaaaaaaaaaaaaaaaaaacgttgactaaaaaaaaaaaaaaaaaaaaaaaaaaaaaaaaaaaaaaaaaaaaaaaaaaaaaaaaaaaaaaaaaaaaaa

SEQ ID NO: 10997 - DNA, 5264 bp, synthetic construct
  source 1..5264: mol_type = other DNA
gaaataagagagaaaagaagagtaagaagaaatataagagaattcgccaccatggcccctaagaaaaagcggaaggtgaatatcagcggctctagctgcggcagccccaacagcgccgacaccagcagcgacttcaaggacctgtggaccaagctgaaggaatgccacgaccgggaagtgcagggactccaggtgaaggtcaccaaactcaagcaagaaagaatcctggacgcccagagactggaagaattcttcaccaagaaccagcagctgagagagcagcagaaagtgctgcacgagacaatcaaggttctggaagatagactgcgggccggcctgtgcgacagatgcgccgtgaccgaggaacacatgcgcaaaaagcagcaggagttcgagaacattagacagcaaaatctgaaattgatcacagagctgatgaacgagagaaacacactgcaggaggagaacaagaagctgagcgagcagctgcaacagaagatcgagaatgatcagcaacaccaggccgctgagctggaatgtgaagaggacgtgatccccgacagcccaatcacagctttcagcttttctggcgtgaacagactgaggcggaaggaaaacccccacgtgcggtacatcgagcagacccataccaagctggaacacagcgtgtgtgccaacgagatgagaaaggtgtccaagtcctccacccatccccagcacaaccctaacgaaaatgagatcctggtggctgatacctacgaccagtctcagagccctatggccaaggcccacggcaccagctcttatacccctgataagagctccttcaacctggccaccgtggtggccgagacactgggcctgggcgtgcaggaggaaagcgagacacagggcccaatgagccctctgggagatgagctgtaccactgcctggaaggcaaccacaagaaacagccttttgagtccggctccgagactcctggaacaagcgagagcgctacacctgagggcagccctaagagaaaggtgtccagcgccgagggcgctgccaaggaagagcctaaacggagaagcgccagactgagcgccaagccccccgccaaggtggaagccaagcctaagaaggccgccgctaaggacaagagcagcgataagaaagtccagaccaagggcaagcggggcgccaaaggcaaacaggccgaggtggccaaccaggagacaaaggaagatctgcctgctgagaacggcgaaaccaagaccgaggaatctccagcttctgacgaggccggagagaaggaggccaaaagcgacagcggctctgagacacctggaacaagcgagagcgccaccccggaatcctatgaacaacttgcaccacaaccgtgtgtgggagaaactttacattctagcctcccacgagacagtgaactgtttgtgcctgaagaggggagcagcgagaaggagagcgaggacgcgccaaaaacatctcctccgacgcctgggaaacatggtttggaacagactggggaggaaaaagtgatggtgactgttcctgacaaaaatccaccttgtccttgctgtggtacccgggtaaactctgtgttgaatctgattgaacatctgaaagtgtcacacgggaaaaggggggtttgttttcggtgtgcaaaatgtggaaaggaaaatagtaactatcacagtgttgtttgtcattttaagaaatgcaggggtccagagacggagaaagccccagctggggagtggatttgtgaggtatgcaacagagattttacaaccaaaattggcctgggacaacacaagagattggcacacccagcagtgagaaatcaggaaaggatcgttgcttcccaaccgaaagaaacatcaaatagaggtgctcacaaaaggtgctggacaaaggaggaggaagaattactaataagactggaggctcagttcgagggaaacaaaaatattaataagcttattgcagaacacataaccaccaaaacagctaagcagatcagtgacaaaaggcgattgctgtccagaaagccagcagaggagccacgtgaggagcctggaacgtgtcatcacaccaggagagcagctgcgagcctgagaacggagcctgagatgagtcatcacgcccaggcagaggacagagataatggacctgggagacgccctctgccaggcagggcagctgccggagggagaacaatggacgagataagacgccaccctgataagggcaacggacagcagagacccaccaagcaaaaatcagaagaacagctgcaggcttactataaaaagacactagaggaacgactttcagctggggcacttaacaccttcccccgagcattcaagcaggtaatggaaggccgggatataaagctagtaatcaatcagacagcgcaggactgcttcggatgcctggaatccataagccaaataagaacggcaacccgagataaaaaggacacggtgacccgggagaaacacccaaagaaaccttttcagaagtggatgaagaagagagcaatcaaaaaaggtaattatcttcggttccagcgtttattttatcttgatagagggaaactggctaaaatcattttagatgatattgaatgcttgtcttgtgacataccactcagtgaaatttattcggtttttaaaacaagatgggaaacaactggtagctttaaaagccttggggactttaaaacttacgggaaggctgacaacactgccttcagagaattaattacggctaaagaaattgagaaaaatgtgcaggaaatgagcaaaggctcggctcccggtccagacgggattactcttggggacgtcgtaaagatggatcccgagttttcccggaccatggagattttcaatttatggttaacaactggtaaaatcccggacatggtgagggggtgcagaaccgttttgattccaaaatcatcaaagccggatcgtttgaaagacattaataactggagacctatcacgatcggttccatcttgctgagactgttctccaggattgtaacagctaggctgagcaaagcgtgccccctgaacccaaggcaaagaggctttatcagagcggcgggatgctctgaaaacttaaaactcctgcaaactataatttggtcggccaaaagagaacacagaccactgggtgttgtattcgtggacatcgccaaggcttttgacaccgtaagccaccagcacatcattcatgctttgcagcaaagagaggtggatccccacatcgtcggtctggtgagcaatatgtacgagaacatcagtacgtatatcaccacaaagaggaacacacacacagacaaaatccagatccgggttggagtaaagcagggtgacccgatgtcgccccttttatttaacctggcaatggaccctctattatgcaagctggaagagagtggcaaaggataccaccgaggacagagcagcatcacagcgatggcatttgcagactggctggttttgctgagcgactcctgggaaaatatgaatacaaatattagcatactggagaccttctgcaatctgaccggactcaaaacacaggggcaaaagtgccacggcttttacatcaagccgacaaagaagtcttacaccatcaatgactgcgctgcctggactatcaacggcacacccctgaacatgatcgaccccggcgaatctgagaaatacctcggcctgcagtttgacccgtggattggaatagcaaggtccggtctctccacaaaactagatttttggcttcagcggatcgatcaagcaccacttaaacctctgcagaaaactgatattctcaaaacatacaccatccctcggctgatctacatagctgaccactcagaagtgaaaagcgcactactcgaaacccttgaccagaagatccggacagcggtcaaggaatggcttcacctacctccgtgcacctgcgatgccatcctgtactcgagcacgagagacggcggtttgggcatcaccaaattggcaggactgatccccagcgtgcaggcccgtagactgcatcggatcgcacagtcatctgacgatacgatgaaatgcttcatggaaaaagagaaaatggaacagctgcataagaaattgtggattcaagctggaggggacagagagaacataccctcgatttgggaagcaccaccgtcgagtgaaccaccaaacaacgtgagcacaaattcggaatgggaagcaccgacccagaaagataaatttccaaagccttgcaattggaggaaaaacgaattcaaaaaatggaccaaattggcatcccaaggccgcggaattgtaaattttgaaagagacaaaattagtaaccattggatccaatactacagacgcatacctcacaggaaactcctcactgcactacaactcagggccaacgtttaccccacgagagaatttctagccaggggtagacaagaccaatacatcaaggcgtgtaggcactgcgatgcggacaacgaatcctgcgcccacatcatcggcaactgcccagtgacacaggacgcccgaatcaagaggcacaattacatctgcgaactgcttctcgaggaggcgaagaagaaggactgggtagtgttcaaggaaccgcacataagggattccaacaaggaactgtacaaacctgacctgatatttgtgaaggatgggcgtgcacttgtcgtggatgtgacagtacggtatgaagcagccaaatcatcgctggaggaagccgctgcagagaaagtgagaaagtacaaacacctggaaacggaagtaagacatctcacgaatgcaaaggacgttacttttgtgggctttcccctaggagcgcgggggaaatggcaccaagataactttaaacttttgactgagcttggcctctccaaatcgaggcaagtgaaaatggcagagactttttccacagtagcgctcttttcatctgtggacattgtacatatgtttgccagtagggccagaaaatctatggttatgtgataataggctgccttctgcggggcttgccttctggccatgcccttcttctctcccttgcacctgtacctcttggtctttgaataaagcctgagtaggaaggaccggtaaaaaaaaaaaaaaaaaaaaaaaaaaaaaaacgttgactaaaaaaaaaaaaaaaaaaaaaaaaaaaaaaaaaaaaaaaaaaaaaaaaaaaaaaaaaaaaaaaaaaaaaa

SEQ ID NO: 10998 - DNA, 5264 bp, synthetic construct
  source 1..5264: mol_type = other DNA
gaaataagagagaaaagaagagtaagaagaaatataagagaattcgccaccatggcccctaagaaaaagcggaaggtgaatatcagcggctctagctgcggcagccccaacagcgccgacaccagcagcgacttcaaggacctgtggaccaagctgaaggaatgccacgaccgggaagtgcagggactccaggtgaaggtcaccaaactcaagcaagaaagaatcctggacgcccagagactggaagaattcttcaccaagaaccagcagctgagagagcagcagaaagtgctgcacgagacaatcaaggttctggaagatagactgcgggccggcctgtgcgacagatgcgccgtgaccgaggaacacatgcgcaaaaagcagcaggagttcgagaacattagacagcaaaatctgaaattgatcacagagctgatgaacgagagaaacacactgcaggaggagaacaagaagctgagcgagcagctgcaacagaagatcgagaatgatcagcaacaccaggccgctgagctggaatgtgaagaggacgtgatccccgacagcccaatcacagctttcagcttttctggcgtgaacagactgaggcggaaggaaaacccccacgtgcggtacatcgagcagacccataccaagctggaacacagcgtgtgtgccaacgagatgagaaaggtgtccaagtcctccacccatccccagcacaaccctaacgaaaatgagatcctggtggctgatacctacgaccagtctcagagccctatggccaaggcccacggcaccagctcttatacccctgataagagctccttcaacctggccaccgtggtggccgagacactgggcctgggcgtgcaggaggaaagcgagacacagggcccaatgagccctctgggagatgagctgtaccactgcctggaaggcaaccacaagaaacagccttttgagtccggctccgagactcctggaacaagcgagagcgctacacctgagggcagccctaagagaaaggtgtccagcgccgagggcgctgccaaggaagagcctaaacggagaagcgccagactgagcgccaagccccccgccaaggtggaagccaagcctaagaaggccgccgctaaggacaagagcagcgataagaaagtccagaccaagggcaagcggggcgccaaaggcaaacaggccgaggtggccaaccaggagacaaaggaagatctgcctgctgagaacggcgaaaccaagaccgaggaatctccagcttctgacgaggccggagagaaggaggccaaaagcgacagcggctctgagacacctggaacaagcgagagcgccaccccggaatcctatgaacaacttgcaccacaaccgtgtgtgggagaaactttacattctagcctcccacgagacagtgaactgtttgtgcctgaagaggggagcagcgagaaggagagcgaggacgcgccaaaaacatctcctccgacgcctgggaaacatggtttggaacagactggggaggaaaaagtgatggtgactgttcctgacaaaaatccaccttgtccttgctgtggtacccgggtaaactctgtgttgaatctgattgaacatctgaaagtgtcacacgggaaaaggggggtttgttttcggtgtgcaaaatgtggaaaggaaaatagtaactatcacagtgttgtttgtcattttaagaaatgcaggggtccagagacggagaaagccccagctggggagtggatttgtgaggtatgcaacagagattttacaaccaaaattggcctgggacaacacaagagattggcacacccagcagtgagaaatcaggaaaggatcgttgcttcccaaccgaaagaaacatcaaatagaggtgctcacaaaaggtgctggacaaaggaggaggaagaattactaataagactggaggctcagttcgagggaaacaaaaatattaataagcttattgcagaacacataaccaccaaaacagctaagcagatcagtgacaaaaggcgattgctgtccagaaagccagcagaggagccacgtgaggagcctggaacgtgtcatcacaccaggagagcagctgcgagcctgagaacggagcctgagatgagtcatcacgcccaggcagaggacagagataatggacctgggagacgccctctgccaggcagggcagctgccggagggagaacaatggacgagataagacgccaccctgataagggcaacggacagcagagacccaccaagcaaaaatcagaagaacagctgcaggcttactataaaaagacactagaggaacgactttcagctggggcacttaacaccttcccccgagcattcaagcaggtaatggaaggccgggatataaagctagtaatcaatcagacagcgcaggactgcttcggatgcctggaatccataagccaaataagaacggcaacccgagataaaaaggacacggtgacccgggagaaacacccaaagaaaccttttcagaagtggatgaagaagagagcaatcaaaaaaggtaattatcttcggttccagcgtttattttatcttgatagaagaaaactggctaaaatcattttagatgatattgaatgcttgtcttgtgacataccactcagtgaaatttattcggtttttaaaacaagatgggaaacaactggtagctttaaaagccttggggactttaaaacttacgggaaggctgacaacactgccttcagagaattaattacggctaaagaaattgagaaaaatgtgcaggaaatgagcaaaggctcggctcccggtccagacgggattactcttggggacgtcgtaaagatggatcccgagttttcccggaccatggagattttcaatttatggttaacaactggtaaaatcccggacatggtgagggggtgcagaaccgttttgattccaaaatcatcaaagccggatcgtttgaaagacattaataactggagacctatcacgatcggttccatcttgctgagactgttctccaggattgtaacagctaggctgagcaaagcgtgccccctgaacccaaggcaaagaggctttatcagagcggcgggatgctctgaaaacttaaaactcctgcaaactataatttggtcggccaaaagagaacacagaccactgggtgttgtattcgtggacatcgccaaggcttttgacaccgtaagccaccagcacatcattcatgctttgcagcaaagagaggtggatccccacatcgtcggtctggtgagcaatatgtacgagaacatcagtacgtatatcaccacaaagaggaacacacacacagacaaaatccagatccgggttggagtaaagcagggtgacccgatgtcgccccttttatttaacctggcaatggaccctctattatgcaagctggaagagagtggcaaaggataccaccgaggacagagcagcatcacagcgatggcatttgcagacgatctggttttgctgagcgactcctgggaaaatatgaatacaaatattagcatactggagaccttctgcaatctgaccggactcaaaacacaggggcaaaagtgccacggcttttacatcaagccgacaaagaagtcttacaccatcaatgactgcgctgcctggactatcaacggcacacccctgaacatgatcgaccccggcgaatctgagaaatacctcggcctgcagtttgacccgtggattggaatagcaaggtccggtctctccacaaaactagatttttggcttcagcggatcgatcaagcaccacttaaacctctgcagaaaactgatattctcaaaacatacaccatccctcggctgatctacatagctgaccactcagaagtgaaaagcgcactactcgaaacccttgaccagaagatccggacagcggtcaaggaatggcttcacctacctccgtgcacctgcgatgccatcctgtactcgagcacgagagacggcggtttgggcatcaccaaattggcaggactgatccccagcgtgcaggcccgtagactgcatcggatcgcacagtcatctgacgatacgatgaaatgcttcatggaaaaagagaaaatggaacagctgcataagaaattgtggattcaagctggaggggacagagagaacataccctcgatttgggaagcaccaccgtcgagtgaaccaccaaacaacgtgagcacaaattcggaatgggaagcaccgacccagaaagataaatttccaaagccttgcaattggaggaaaaacgaattcaaaaaatggaccaaattggcatcccaaggccgcggaattgtaaattttgaaagagacaaaattagtaaccattggatccaatactacagacgcatacctcacaggaaactcctcactgcactacaactcagggccaacgtttaccccacgagagaatttctagccaggggtagacaagaccaatacatcaaggcgtgtaggcactgcgatgcggacaacgaatcctgcgcccacatcatcggcaactgcccagtgacacaggacgcccgaatcaagaggcacaattacatctgcgaactgcttctcgaggaggcgaagaagaaggactgggtagtgttcaaggaaccgcacataagggattccaacaaggaactgtacaaacctgacctgatatttgtgaaggatgggcgtgcacttgtcgtggatgtgacagtacggtatgaagcagccaaatcatcgctggaggaagccgctgcagagaaagtgagaaagtacaaacacctggaaacggaagtaagacatctcacgaatgcaaaggacgttacttttgtgggctttcccctaggagcgcgggggaaatggcaccaagataactttaaacttttgactgagcttggcctctccaaatcgaggcaagtgaaaatggcagagactttttccacagtagcgctcttttcatctgtggacattgtacatatgtttgccagtagggccagaaaatctatggttatgtgataataggctgccttctgcggggcttgccttctggccatgcccttcttctctcccttgcacctgtacctcttggtctttgaataaagcctgagtaggaaggaccggtaaaaaaaaaaaaaaaaaaaaaaaaaaaaaaacgttgactaaaaaaaaaaaaaaaaaaaaaaaaaaaaaaaaaaaaaaaaaaaaaaaaaaaaaaaaaaaaaaaaaaaaaa

SEQ ID NO: 10999 - DNA, 5264 bp, synthetic construct
  source 1..5264: mol_type = other DNA
gaaataagagagaaaagaagagtaagaagaaatataagagaattcgccaccatggcccctaagaaaaagcggaaggtgaatatcagcggctctagctgcggcagccccaacagcgccgacaccagcagcgacttcaaggacctgtggaccaagctgaaggaatgccacgaccgggaagtgcagggactccaggtgaaggtcaccaaactcaagcaagaaagaatcctggacgcccagagactggaagaattcttcaccaagaaccagcagctgagagagcagcagaaagtgctgcacgagacaatcaaggttctggaagatagactgcgggccggcctgtgcgacagatgcgccgtgaccgaggaacacatgcgcaaaaagcagcaggagttcgagaacattagacagcaaaatctgaaattgatcacagagctgatgaacgagagaaacacactgcaggaggagaacaagaagctgagcgagcagctgcaacagaagatcgagaatgatcagcaacaccaggccgctgagctggaatgtgaagaggacgtgatccccgacagcccaatcacagctttcagcttttctggcgtgaacagactgaggcggaaggaaaacccccacgtgcggtacatcgagcagacccataccaagctggaacacagcgtgtgtgccaacgagatgagaaaggtgtccaagtcctccacccatccccagcacaaccctaacgaaaatgagatcctggtggctgatacctacgaccagtctcagagccctatggccaaggcccacggcaccagctcttatacccctgataagagctccttcaacctggccaccgtggtggccgagacactgggcctgggcgtgcaggaggaaagcgagacacagggcccaatgagccctctgggagatgagctgtaccactgcctggaaggcaaccacaagaaacagccttttgagtccggctccgagactcctggaacaagcgagagcgctacacctgagggcagccctaagagaaaggtgtccagcgccgagggcgctgccaaggaagagcctaaacggagaagcgccagactgagcgccaagccccccgccaaggtggaagccaagcctaagaaggccgccgctaaggacaagagcagcgataagaaagtccagaccaagggcaagcggggcgccaaaggcaaacaggccgaggtggccaaccaggagacaaaggaagatctgcctgctgagaacggcgaaaccaagaccgaggaatctccagcttctgacgaggccggagagaaggaggccaaaagcgacagcggctctgagacacctggaacaagcgagagcgccaccccggaatcctatgaacaacttgcaccacaaccgtgtgtgggagaaactttacattctagcctcccacgagacagtgaactgtttgtgcctgaagaggggagcagcgagaaggagagcgaggacgcgccaaaaacatctcctccgacgcctgggaaacatggtttggaacagactggggaggaaaaagtgatggtgactgttcctgacaaaaatccaccttgtccttgctgtggtacccgggtaaactctgtgttgaatctgattgaacatctgaaagtgtcacacgggaaaaggggggtttgttttcggtgtgcaaaatgtggaaaggaaaatagtaactatcacagtgttgtttgtcattttaagaaatgcaggggtccagagacggagaaagccccagctggggagtggatttgtgaggtatgcaacagagattttacaaccaaaattggcctgggacaacacaagagattggcacacccagcagtgagaaatcaggaaaggatcgttgcttcccaaccgaaagaaacatcaaatagaggtgctcacaaaaggtgctggacaaaggaggaggaagaattactaataagactggaggctcagttcgagggaaacaaaaatattaataagcttattgcagaacacataaccaccaaaacagctaagcagatcagtgacaaaaggcgattgctgtccagaaagccagcagaggagccacgtgaggagcctggaacgtgtcatcacaccaggagagcagctgcgagcctgagaacggagcctgagatgagtcatcacgcccaggcagaggacagagataatggacctgggagacgccctctgccaggcagggcagctgccggagggagaacaatggacgagataagacgccaccctgataagggcaacggacagcagagacccaccaagcaaaaatcagaagaacagctgcaggcttactataaaaagacactagaggaacgactttcagctggggcacttaacaccttcccccgagcattcaagcaggtaatggaaggccgggatataaagctagtaatcaatcagacagcgcaggactgcttcggatgcctggaatccataagccaaataagaacggcaacccgagataaaaaggacacggtgacccgggagaaacacccaaagaaaccttttcagaagtggatgaagaagagagcaatcaaaaaaggtaattatcttcggttccagcgtttattttatcttgatagagggaaactggctaaaatcattttagatgatattgaatgcttgtcttgtgacataccactcagtgaaatttattcggtttttaaaacaagatgggaaacaactggtagctttaaaagccttggggactttaaaacttacgggaaggctgacaacactgccttcagagaattaattacggctaaagaaattgagaaaaatgtgcaggaaatgagcaaaggctcggctcccggtccagacgggattactcttggggacgtcgtaaagatggatcccgagttttcccggaccatggagattttcaatttatggttaacaactggtaaaatcccggacatggtgagggggtgcagaaccgttttgattccaaaatcatcaaagccggatcgtttgaaagacattaataactggagacctatcacgatcggttccatcttgctgagactgttctccaggattgtaacagctaggctgagcaaagcgtgccccctgaacccaaggcaaagaggctttatcagagcggcgggatgctctgaaaacttaaaactcctgcaaactataatttggtcggccaaaagagaacacagaccactgggtgttgtattcgtggacatcgccaaggcttttgacaccgtaagccaccagcacatcattcatgctttgcagcaaagagaggtggatccccacatcgtcggtctggtgagcaatatgtacgagaacatcagtacgtatatcaccacaaagaggaacacacacacagacaaaatccagatccgggttggagtaaagcagggtgacccgatgtcgccccttttatttaacctggcaatggaccctctattatgcaagctggaagagagtggcaaaggataccaccgaggacagagcagcatcacagcgatggcatttgcagacgatctggttttgctgagcgactcctgggaaaatatgaatacaaatattagcatactggagaccttctgcaatctgaccggactcaaaacacaggggcaaaagtgccacggcttttacatcaagccgacaaagaagtcttacaccatcaatgactgcgctgcctggactatcaacggcacacccctgaacatgatcgaccccggcgaatctgagaaatacctcggcctgcagtttgacccgtggattggaatagcaaggtccggtctctccacaaaactagatttttggcttcagcggatcgatcaagcaccacttaaacctctgcagaaaactgatattctcaaaacatacaccatccctcggctgatctacatagctgaccactcagaagtgaaaagcgcactactcgaaacccttgaccagaagatccggacagcggtcaaggaatggcttcacctacctccgtgcacctgcgatgccatcctgtactcgagcacgagagacggcggtttgggcatcaccaaattggcaggactgatccccagcgtgcaggcccgtagactgcatcggatcgcacagtcatctgacgatacgatgaaatgcttcatggaaaaagagaaaatggaacagctgcataagaaattgtggattcaagctggaggggacagagagaacataccctcgatttgggaagcaccaccgtcgagtgaaccaccaaacaacgtgagcacaaattcggaatgggaaagaccgacccagaaagataaatttccaaagccttgcaattggaggaaaaacgaattcaaaaaatggaccaaattggcatcccaaggccgcggaattgtaaattttgaaagagacaaaattagtaaccattggatccaatactacagacgcatacctcacaggaaactcctcactgcactacaactcagggccaacgtttaccccacgagagaatttctagccaggggtagacaagaccaatacatcaaggcgtgtaggcactgcgatgcggacaacgaatcctgcgcccacatcatcggcaactgcccagtgacacaggacgcccgaatcaagaggcacaattacatctgcgaactgcttctcgaggaggcgaagaagaaggactgggtagtgttcaaggaaccgcacataagggattccaacaaggaactgtacaaacctgacctgatatttgtgaaggatgggcgtgcacttgtcgtggatgtgacagtacggtatgaagcagccaaatcatcgctggaggaagccgctgcagagaaagtgagaaagtacaaacacctggaaacggaagtaagacatctcacgaatgcaaaggacgttacttttgtgggctttcccctaggagcgcgggggaaatggcaccaagataactttaaacttttgactgagcttggcctctccaaatcgaggcaagtgaaaatggcagagactttttccacagtagcgctcttttcatctgtggacattgtacatatgtttgccagtagggccagaaaatctatggttatgtgataataggctgccttctgcggggcttgccttctggccatgcccttcttctctcccttgcacctgtacctcttggtctttgaataaagcctgagtaggaaggaccggtaaaaaaaaaaaaaaaaaaaaaaaaaaaaaaacgttgactaaaaaaaaaaaaaaaaaaaaaaaaaaaaaaaaaaaaaaaaaaaaaaaaaaaaaaaaaaaaaaaaaaaaaa

SEQ ID NO: 11000 - DNA, 5264 bp, synthetic construct
  source 1..5264: mol_type = other DNA
gaaataagagagaaaagaagagtaagaagaaatataagagaattcgccaccatggcccctaagaaaaagcggaaggtgaatatcagcggctctagctgcggcagccccaacagcgccgacaccagcagcgacttcaaggacctgtggaccaagctgaaggaatgccacgaccgggaagtgcagggactccaggtgaaggtcaccaaactcaagcaagaaagaatcctggacgcccagagactggaagaattcttcaccaagaaccagcagctgagagagcagcagaaagtgctgcacgagacaatcaaggttctggaagatagactgcgggccggcctgtgcgacagatgcgccgtgaccgaggaacacatgcgcaaaaagcagcaggagttcgagaacattagacagcaaaatctgaaattgatcacagagctgatgaacgagagaaacacactgcaggaggagaacaagaagctgagcgagcagctgcaacagaagatcgagaatgatcagcaacaccaggccgctgagctggaatgtgaagaggacgtgatccccgacagcccaatcacagctttcagcttttctggcgtgaacagactgaggcggaaggaaaacccccacgtgcggtacatcgagcagacccataccaagctggaacacagcgtgtgtgccaacgagatgagaaaggtgtccaagtcctccacccatccccagcacaaccctaacgaaaatgagatcctggtggctgatacctacgaccagtctcagagccctatggccaaggcccacggcaccagctcttatacccctgataagagctccttcaacctggccaccgtggtggccgagacactgggcctgggcgtgcaggaggaaagcgagacacagggcccaatgagccctctgggagatgagctgtaccactgcctggaaggcaaccacaagaaacagccttttgagtccggctccgagactcctggaacaagcgagagcgctacacctgagggcagccctaagagaaaggtgtccagcgccgagggcgctgccaaggaagagcctaaacggagaagcgccagactgagcgccaagccccccgccaaggtggaagccaagcctaagaaggccgccgctaaggacaagagcagcgataagaaagtccagaccaagggcaagcggggcgccaaaggcaaacaggccgaggtggccaaccaggagacaaaggaagatctgcctgctgagaacggcgaaaccaagaccgaggaatctccagcttctgacgaggccggagagaaggaggccaaaagcgacagcggctctgagacacctggaacaagcgagagcgccaccccggaatcctatgaacaacttgcaccacaaccgtgtgtgggagaaactttacattctagcctcccacgagacagtgaactgtttgtgcctgaagaggggagcagcgagaaggagagcgaggacgcgccaaaaacatctcctccgacgcctgggaaacatggtttggaacagactggggaggaaaaagtgatggtgactgttcctgacaaaaatccaccttgtccttgctgtggtacccgggtaaactctgtgttgaatctgattgaacatctgaaagtgtcacacgggaaaaggggggtttgttttcggtgtgcaaaatgtggaaaggaaaatagtaactatcacagtgttgtttgtcattttaagaaatgcaggggtccagagacggagaaagccccagctggggagtggatttgtgaggtatgcaacagagattttacaaccaaaattggcctgggacaacacaagagattggcacacccagcagtgagaaatcaggaaaggatcgttgcttcccaaccgaaagaaacatcaaatagaggtgctcacaaaaggtgctggacaaaggaggaggaagaattactaataagactggaggctcagttcgagggaaacaaaaatattaataagcttattgcagaacacataaccaccaaaacagctaagcagatcagtgacaaaaggcgattgctgtccagaaagccagcagaggagccacgtgaggagcctggaacgtgtcatcacaccaggagagcagctgcgagcctgagaacggagcctgagatgagtcatcacgcccaggcagaggacagagataatggacctgggagacgccctctgccaggcagggcagctgccggagggagaacaatggacgagataagacgccaccctgataagggcaacggacagcagagacccaccaagcaaaaatcagaagaacagctgcaggcttactataaaaagacactagaggaacgactttcagctggggcacttaacaccttcccccgagcattcaagcaggtaatggaaggccgggatataaagctagtaatcaatcagacagcgcaggactgcttcggatgcctggaatccataagccaaataagaacggcaacccgagataaaaaggacacggtgacccgggagaaacacccaaagaaaccttttcagaagtggatgaagaagagagcaatcaaaaaaggtaattatcttcggttccagcgtttattttatcttgatagagggaaactggctaaaatcattttagatgatattgaatgcttgtcttgtgacataccactcagtgaaatttattcggtttttaaaacaagatgggaaacaactggtagctttaaaagccttggggactttaaaacttacgggaaggctgacaacactgccttcagagaattaattacggctaaagaaattgagaaaaatgtgcaggaaatgagcaaaggctcggctcccggtccagacgggattactcttggggacgtcgtaaagatggatcccgagttttcccggaccatggagattttcaatttatggttaacaactggtaaaatcccggacatggtgagggggtgcagaaccgttttgattccaaaatcatcaaagccggatcgtttgaaagacattaataactggagacctatcacgatcggttccatcttgctgagactgttctccaggattgtaacagctaggctgagcaaagcgtgccccctgaacccaaggcaaagaggctttatcagagcggcgggatgctctgaaaacttaaaactcctgcaaactataatttggtcggccaaaagagaacacagaccactgggtgttgtattcgtggacatcgccaaggcttttgacaccgtaagccaccagcacatcattcatgctttgcagcaaagagaggtggatccccacatcgtcggtctggtgagcaatatgtacgagaacatcagtacgtatatcaccacaaagaggaacacacacacagacaaaatccagatccgggttggagtaaagcagggtagaccgatgtcgccccttttatttaacctggcaatggaccctctattatgcaagctggaagagagtggcaaaggataccaccgaggacagagcagcatcacagcgatggcatttgcagacgatctggttttgctgagcgactcctgggaaaatatgaatacaaatattagcatactggagaccttctgcaatctgaccggactcaaaacacaggggcaaaagtgccacggcttttacatcaagccgacaaagaagtcttacaccatcaatgactgcgctgcctggactatcaacggcacacccctgaacatgatcgaccccggcgaatctgagaaatacctcggcctgcagtttgacccgtggattggaatagcaaggtccggtctctccacaaaactagatttttggcttcagcggatcgatcaagcaccacttaaacctctgcagaaaactgatattctcaaaacatacaccatccctcggctgatctacatagctgaccactcagaagtgaaaagcgcactactcgaaacccttgaccagaagatccggacagcggtcaaggaatggcttcacctacctccgtgcacctgcgatgccatcctgtactcgagcacgagagacggcggtttgggcatcaccaaattggcaggactgatccccagcgtgcaggcccgtagactgcatcggatcgcacagtcatctgacgatacgatgaaatgcttcatggaaaaagagaaaatggaacagctgcataagaaattgtggattcaagctggaggggacagagagaacataccctcgatttgggaagcaccaccgtcgagtgaaccaccaaacaacgtgagcacaaattcggaatgggaagcaccgacccagaaagataaatttccaaagccttgcaattggaggaaaaacgaattcaaaaaatggaccaaattggcatcccaaggccgcggaattgtaaattttgaaagagacaaaattagtaaccattggatccaatactacagacgcatacctcacaggaaactcctcactgcactacaactcagggccaacgtttaccccacgagagaatttctagccaggggtagacaagaccaatacatcaaggcgtgtaggcactgcgatgcggacaacgaatcctgcgcccacatcatcggcaactgcccagtgacacaggacgcccgaatcaagaggcacaattacatctgcgaactgcttctcgaggaggcgaagaagaaggactgggtagtgttcaaggaaccgcacataagggattccaacaaggaactgtacaaacctgacctgatatttgtgaaggatgggcgtgcacttgtcgtggatgtgacagtacggtatgaagcagccaaatcatcgctggaggaagccgctgcagagaaagtgagaaagtacaaacacctggaaacggaagtaagacatctcacgaatgcaaaggacgttacttttgtgggctttcccctaggagcgcgggggaaatggcaccaagataactttaaacttttgactgagcttggcctctccaaatcgaggcaagtgaaaatggcagagactttttccacagtagcgctcttttcatctgtggacattgtacatatgtttgccagtagggccagaaaatctatggttatgtgataataggctgccttctgcggggcttgccttctggccatgcccttcttctctcccttgcacctgtacctcttggtctttgaataaagcctgagtaggaaggaccggtaaaaaaaaaaaaaaaaaaaaaaaaaaaaaaacgttgactaaaaaaaaaaaaaaaaaaaaaaaaaaaaaaaaaaaaaaaaaaaaaaaaaaaaaaaaaaaaaaaaaaaaaa

SEQ ID NO: 11001 - DNA, 5264 bp, synthetic construct
  source 1..5264: mol_type = other DNA
gaaataagagagaaaagaagagtaagaagaaatataagagaattcgccaccatggcccctaagaaaaagcggaaggtgaatatcagcggctctagctgcggcagccccaacagcgccgacaccagcagcgacttcaaggacctgtggaccaagctgaaggaatgccacgaccgggaagtgcagggactccaggtgaaggtcaccaaactcaagcaagaaagaatcctggacgcccagagactggaagaattcttcaccaagaaccagcagctgagagagcagcagaaagtgctgcacgagacaatcaaggttctggaagatagactgcgggccggcctgtgcgacagatgcgccgtgaccgaggaacacatgcgcaaaaagcagcaggagttcgagaacattagacagcaaaatctgaaattgatcacagagctgatgaacgagagaaacacactgcaggaggagaacaagaagctgagcgagcagctgcaacagaagatcgagaatgatcagcaacaccaggccgctgagctggaatgtgaagaggacgtgatccccgacagcccaatcacagctttcagcttttctggcgtgaacagactgaggcggaaggaaaacccccacgtgcggtacatcgagcagacccataccaagctggaacacagcgtgtgtgccaacgagatgagaaaggtgtccaagtcctccacccatccccagcacaaccctaacgaaaatgagatcctggtggctgatacctacgaccagtctcagagccctatggccaaggcccacggcaccagctcttatacccctgataagagctccttcaacctggccaccgtggtggccgagacactgggcctgggcgtgcaggaggaaagcgagacacagggcccaatgagccctctgggagatgagctgtaccactgcctggaaggcaaccacaagaaacagccttttgagtccggctccgagactcctggaacaagcgagagcgctacacctgagggcagccctaagagaaaggtgtccagcgccgagggcgctgccaaggaagagcctaaacggagaagcgccagactgagcgccaagccccccgccaaggtggaagccaagcctaagaaggccgccgctaaggacaagagcagcgataagaaagtccagaccaagggcaagcggggcgccaaaggcaaacaggccgaggtggccaaccaggagacaaaggaagatctgcctgctgagaacggcgaaaccaagaccgaggaatctccagcttctgacgaggccggagagaaggaggccaaaagcgacagcggctctgagacacctggaacaagcgagagcgccaccccggaatcctatgaacaacttgcaccacaaccgtgtgtgggagaaactttacattctagcctcccacgagacagtgaactgtttgtgcctgaagaggggagcagcgagaaggagagcgaggacgcgccaaaaacatctcctccgacgcctgggaaacatggtttggaacagactggggaggaaaaagtgatggtgactgttcctgacaaaaatccaccttgtccttgctgtggtacccgggtaaactctgtgttgaatctgattgaacatctgaaagtgtcacacgggaaaaggggggtttgttttcggtgtgcaaaatgtggaaaggaaaatagtaactatcacagtgttgtttgtcattttaagaaatgcaggggtccaaagacggagaaagccccagctggggagtggatttgtgaggtatgcaacagagattttacaaccaaaattggcctgggacaacacaagagattggcacacccagcagtgagaaatcaggaaaggatcgttgcttcccaaccgaaagaaacatcaaatagaggtgctcacaaaaggtgctggacaaaggaggaggaagaattactaataagactggaggctcagttcgagggaaacaaaaatattaataagcttattgcagaacacataaccaccaaaacagctaagcagatcagtgacaaaaggcgattgctgtccagaaagccagcagaggagccacgtgaggagcctggaacgtgtcatcacaccaggagagcagctgcgagcctgagaacggagcctgagatgagtcatcacgcccaggcagaggacagagataatggacctgggagacgccctctgccaggcagggcagctgccggagggagaacaatggacgagataagacgccaccctgataagggcaacggacagcagagacccaccaagcaaaaatcagaagaacagctgcaggcttactataaaaagacactagaggaacgactttcagctggggcacttaacaccttcccccgagcattcaagcaggtaatggaaggccgggatataaagctagtaatcaatcagacagcgcaggactgcttcggatgcctggaatccataagccaaataagaacggcaacccgagataaaaaggacacggtgacccgggagaaacacccaaagaaaccttttcagaagtggatgaagaagagagcaatcaaaaaaggtaattatcttcggttccagcgtttattttatcttgatagagggaaactggctaaaatcattttagatgatattgaatgcttgtcttgtgacataccactcagtgaaatttattcggtttttaaaacaagatgggaaacaactggtagctttaaaagccttggggactttaaaacttacgggaaggctgacaacactgccttcagagaattaattacggctaaagaaattgagaaaaatgtgcaggaaatgagcaaaggctcggctcccggtccagacgggattactcttggggacgtcgtaaagatggatcccgagttttcccggaccatggagattttcaatttatggttaacaactggtaaaatcccggacatggtgagggggtgcagaaccgttttgattccaaaatcatcaaagccggatcgtttgaaagacattaataactggagacctatcacgatcggttccatcttgctgagactgttctccaggattgtaacagctaggctgagcaaagcgtgccccctgaacccaaggcaaagaggctttatcagagcggcgggatgctctgaaaacttaaaactcctgcaaactataatttggtcggccaaaagagaacacagaccactgggtgttgtattcgtggacatcgccaaggcttttgacaccgtaagccaccagcacatcattcatgctttgcagcaaagagaggtggatccccacatcgtcggtctggtgagcaatatgtacgagaacatcagtacgtatatcaccacaaagaggaacacacacacagacaaaatccagatccgggttggagtaaagcagggtgacccgatgtcgccccttttatttaacctggcaatggaccctctattatgcaagctggaagagagtggcaaaggataccaccgaggacagagcagcatcacagcgatggcatttgcagacgatctggttttgctgagcgactcctgggaaaatatgaatacaaatattagcatactggagaccttctgcaatctgaccggactcaaaacacaggggcaaaagtgccacggcttttacatcaagccgacaaagaagtcttacaccatcaatgactgcgctgcctggactatcaacggcacacccctgaacatgatcgaccccggcgaatctgagaaatacctcggcctgcagtttgacccgtggattggaatagcaaggtccggtctctccacaaaactagatttttggcttcagcggatcgatcaagcaccacttaaacctctgcagaaaactgatattctcaaaacatacaccatccctcggctgatctacatagctgaccactcagaagtgaaaagcgcactactcgaaacccttgaccagaagatccggacagcggtcaaggaatggcttcacctacctccgtgcacctgcgatgccatcctgtactcgagcacgagagacggcggtttgggcatcaccaaattggcaggactgatccccagcgtgcaggcccgtagactgcatcggatcgcacagtcatctgacgatacgatgaaatgcttcatggaaaaagagaaaatggaacagctgcataagaaattgtggattcaagctggaggggacagagagaacataccctcgatttgggaagcaccaccgtcgagtgaaccaccaaacaacgtgagcacaaattcggaatgggaagcaccgacccagaaagataaatttccaaagccttgcaattggaggaaaaacgaattcaaaaaatggaccaaattggcatcccaaggccgcggaattgtaaattttgaaagagacaaaattagtaaccattggatccaatactacagacgcatacctcacaggaaactcctcactgcactacaactcagggccaacgtttaccccacgagagaatttctagccaggggtagacaagaccaatacatcaaggcgtgtaggcactgcgatgcggacaacgaatcctgcgcccacatcatcggcaactgcccagtgacacaggacgcccgaatcaagaggcacaattacatctgcgaactgcttctcgaggaggcgaagaagaaggactgggtagtgttcaaggaaccgcacataagggattccaacaaggaactgtacaaacctgacctgatatttgtgaaggatgggcgtgcacttgtcgtggatgtgacagtacggtatgaagcagccaaatcatcgctggaggaagccgctgcagagaaagtgagaaagtacaaacacctggaaacggaagtaagacatctcacgaatgcaaaggacgttacttttgtgggctttcccctaggagcgcgggggaaatggcaccaagataactttaaacttttgactgagcttggcctctccaaatcgaggcaagtgaaaatggcagagactttttccacagtagcgctcttttcatctgtggacattgtacatatgtttgccagtagggccagaaaatctatggttatgtgataataggctgccttctgcggggcttgccttctggccatgcccttcttctctcccttgcacctgtacctcttggtctttgaataaagcctgagtaggaaggaccggtaaaaaaaaaaaaaaaaaaaaaaaaaaaaaaacgttgactaaaaaaaaaaaaaaaaaaaaaaaaaaaaaaaaaaaaaaaaaaaaaaaaaaaaaaaaaaaaaaaaaaaaaa

SEQ ID NO: 11002 - DNA, 5264 bp, synthetic construct
  source 1..5264: mol_type = other DNA
gaaataagagagaaaagaagagtaagaagaaatataagagaattcgccaccatggcccctaagaaaaagcggaaggtgaatatcagcggctctagctgcggcagccccaacagcgccgacaccagcagcgacttcaaggacctgtggaccaagctgaaggaatgccacgaccgggaagtgcagggactccaggtgaaggtcaccaaactcaagcaagaaagaatcctggacgcccagagactggaagaattcttcaccaagaaccagcagctgagagagcagcagaaagtgctgcacgagacaatcaaggttctggaagatagactgcgggccggcctgtgcgacagatgcgccgtgaccgaggaacacatgcgcaaaaagcagcaggagttcgagaacattagacagcaaaatctgaaattgatcacagagctgatgaacgagagaaacacactgcaggaggagaacaagaagctgagcgagcagctgcaacagaagatcgagaatgatcagcaacaccaggccgctgagctggaatgtgaagaggacgtgatccccgacagcccaatcacagctttcagcttttctggcgtgaacagactgaggcggaaggaaaacccccacgtgcggtacatcgagcagacccataccaagctggaacacagcgtgtgtgccaacgagatgagaaaggtgtccaagtcctccacccatccccagcacaaccctaacgaaaatgagatcctggtggctgatacctacgaccagtctcagagccctatggccaaggcccacggcaccagctcttatacccctgataagagctccttcaacctggccaccgtggtggccgagacactgggcctgggcgtgcaggaggaaagcgagacacagggcccaatgagccctctgggagatgagctgtaccactgcctggaaggcaaccacaagaaacagccttttgagtccggctccgagactcctggaacaagcgagagcgctacacctgagggcagccctaagagaaaggtgtccagcgccgagggcgctgccaaggaagagcctaaacggagaagcgccagactgagcgccaagccccccgccaaggtggaagccaagcctaagaaggccgccgctaaggacaagagcagcgataagaaagtccagaccaagggcaagcggggcgccaaaggcaaacaggccgaggtggccaaccaggagacaaaggaagatctgcctgctgagaacggcgaaaccaagaccgaggaatctccagcttctgacgaggccggagagaaggaggccaaaagcgacagcggctctgagacacctggaacaagcgagagcgccaccccggaatcctatgaacaacttgcaccacaaccgtgtgtgggagaaactttacattctagcctcccacgagacagtgaactgtttgtgcctgaagaggggagcagcgagaaggagagcgaggacgcgccaaaaacatctcctccgacgcctgggaaacatggtttggaacagactggggaggaaaaagtgatggtgactgttcctgacaaaaatccaccttgtccttgctgtggtacccgggtaaactctgtgttgaatctgattgaacatctgaaagtgtcacacgggaaaaggggggtttgttttcggtgtgcaaaatgtggaaaggaaaatagtaactatcacagtgttgtttgtcattttaagaaatgcaggggtccagagacggagaaagccccagctggggagtggatttgtgaggtatgcaacagagattttacaaccaaaattggcctgggacaacacaagagattggcacacccagcagtgagaaatcaggaaaggatcgttgcttcccaaccgaaagaaacatcaaatagaggtgctcacaaaaggtgctggacaaaggaggaggaagaattactaataagactggaggctcagttcgagggaaacaaaaatattaataagcttattgcagaacacataaccaccaaaacagctaagcagatcagtgacaaaaggcgattgctgtccagaaagccagcagaggagccacgtgaggagcctggaacgtgtcatcacaccaggagagcagctgcgagcctgagaacggagcctgagatgagtcatcacgcccaggcagaggacagagataatggacctgggagacgccctctgccaggcagggcagctgccggagggagaacaatggacgagataagacgccaccctgataagggcaacggacagcagagacccaccaagcaaaaatcagaagaacagctgcaggcttactataaaaagacactagaggaacgactttcagctggggcacttaacaccttcccccgagcattcaagcaggtaatggaaggccgggatataaagctagtaatcaatcagacagcgcaggactgcttcggatgcctggaatccataagccaaataagaacggcaaagcgagataaaaaggacacggtgacccgggagaaacacccaaagaaaccttttcagaagtggatgaagaagagagcaatcaaaaaaggtaattatcttcggttccagcgtttattttatcttgatagagggaaactggctaaaatcattttagatgatattgaatgcttgtcttgtgacataccactcagtgaaatttattcggtttttaaaacaagatgggaaacaactggtagctttaaaagccttggggactttaaaacttacgggaaggctgacaacactgccttcagagaattaattacggctaaagaaattgagaaaaatgtgcaggaaatgagcaaaggctcggctcccggtccagacgggattactcttggggacgtcgtaaagatggatcccgagttttcccggaccatggagattttcaatttatggttaacaactggtaaaatcccggacatggtgagggggtgcagaaccgttttgattccaaaatcatcaaagccggatcgtttgaaagacattaataactggagacctatcacgatcggttccatcttgctgagactgttctccaggattgtaacagctaggctgagcaaagcgtgccccctgaacccaaggcaaagaggctttatcagagcggcgggatgctctgaaaacttaaaactcctgcaaactataatttggtcggccaaaagagaacacagaccactgggtgttgtattcgtggacatcgccaaggcttttgacaccgtaagccaccagcacatcattcatgctttgcagcaaagagaggtggatccccacatcgtcggtctggtgagcaatatgtacgagaacatcagtacgtatatcaccacaaagaggaacacacacacagacaaaatccagatccgggttggagtaaagcagggtgacccgatgtcgccccttttatttaacctggcaatggaccctctattatgcaagctggaagagagtggcaaaggataccaccgaggacagagcagcatcacagcgatggcatttgcagacgatctggttttgctgagcgactcctgggaaaatatgaatacaaatattagcatactggagaccttctgcaatctgaccggactcaaaacacaggggcaaaagtgccacggcttttacatcaagccgacaaagaagtcttacaccatcaatgactgcgctgcctggactatcaacggcacacccctgaacatgatcgaccccggcgaatctgagaaatacctcggcctgcagtttgacccgtggattggaatagcaaggtccggtctctccacaaaactagatttttggcttcagcggatcgatcaagcaccacttaaacctctgcagaaaactgatattctcaaaacatacaccatccctcggctgatctacatagctgaccactcagaagtgaaaagcgcactactcgaaacccttgaccagaagatccggacagcggtcaaggaatggcttcacctacctccgtgcacctgcgatgccatcctgtactcgagcacgagagacggcggtttgggcatcaccaaattggcaggactgatccccagcgtgcaggcccgtagactgcatcggatcgcacagtcatctgacgatacgatgaaatgcttcatggaaaaagagaaaatggaacagctgcataagaaattgtggattcaagctggaggggacagagagaacataccctcgatttgggaagcaccaccgtcgagtgaaccaccaaacaacgtgagcacaaattcggaatgggaagcaccgacccagaaagataaatttccaaagccttgcaattggaggaaaaacgaattcaaaaaatggaccaaattggcatcccaaggccgcggaattgtaaattttgaaagagacaaaattagtaaccattggatccaatactacagacgcatacctcacaggaaactcctcactgcactacaactcagggccaacgtttaccccacgagagaatttctagccaggggtagacaagaccaatacatcaaggcgtgtaggcactgcgatgcggacaacgaatcctgcgcccacatcatcggcaactgcccagtgacacaggacgcccgaatcaagaggcacaattacatctgcgaactgcttctcgaggaggcgaagaagaaggactgggtagtgttcaaggaaccgcacataagggattccaacaaggaactgtacaaacctgacctgatatttgtgaaggatgggcgtgcacttgtcgtggatgtgacagtacggtatgaagcagccaaatcatcgctggaggaagccgctgcagagaaagtgagaaagtacaaacacctggaaacggaagtaagacatctcacgaatgcaaaggacgttacttttgtgggctttcccctaggagcgcgggggaaatggcaccaagataactttaaacttttgactgagcttggcctctccaaatcgaggcaagtgaaaatggcagagactttttccacagtagcgctcttttcatctgtggacattgtacatatgtttgccagtagggccagaaaatctatggttatgtgataataggctgccttctgcggggcttgccttctggccatgcccttcttctctcccttgcacctgtacctcttggtctttgaataaagcctgagtaggaaggaccggtaaaaaaaaaaaaaaaaaaaaaaaaaaaaaaacgttgactaaaaaaaaaaaaaaaaaaaaaaaaaaaaaaaaaaaaaaaaaaaaaaaaaaaaaaaaaaaaaaaaaaaaaa

SEQ ID NO: 11003 - DNA, 5264 bp, synthetic construct
  source 1..5264: mol_type = other DNA
gaaataagagagaaaagaagagtaagaagaaatataagagaattcgccaccatggcccctaagaaaaagcggaaggtgaatatcagcggctctagctgcggcagccccaacagcgccgacaccagcagcgacttcaaggacctgtggaccaagctgaaggaatgccacgaccgggaagtgcagggactccaggtgaaggtcaccaaactcaagcaagaaagaatcctggacgcccagagactggaagaattcttcaccaagaaccagcagctgagagagcagcagaaagtgctgcacgagacaatcaaggttctggaagatagactgcgggccggcctgtgcgacagatgcgccgtgaccgaggaacacatgcgcaaaaagcagcaggagttcgagaacattagacagcaaaatctgaaattgatcacagagctgatgaacgagagaaacacactgcaggaggagaacaagaagctgagcgagcagctgcaacagaagatcgagaatgatcagcaacaccaggccgctgagctggaatgtgaagaggacgtgatccccgacagcccaatcacagctttcagcttttctggcgtgaacagactgaggcggaaggaaaacccccacgtgcggtacatcgagcagacccataccaagctggaacacagcgtgtgtgccaacgagatgagaaaggtgtccaagtcctccacccatccccagcacaaccctaacgaaaatgagatcctggtggctgatacctacgaccagtctcagagccctatggccaaggcccacggcaccagctcttatacccctgataagagctccttcaacctggccaccgtggtggccgagacactgggcctgggcgtgcaggaggaaagcgagacacagggcccaatgagccctctgggagatgagctgtaccactgcctggaaggcaaccacaagaaacagccttttgagtccggctccgagactcctggaacaagcgagagcgctacacctgagggcagccctaagagaaaggtgtccagcgccgagggcgctgccaaggaagagcctaaacggagaagcgccagactgagcgccaagccccccgccaaggtggaagccaagcctaagaaggccgccgctaaggacaagagcagcgataagaaagtccagaccaagggcaagcggggcgccaaaggcaaacaggccgaggtggccaaccaggagacaaaggaagatctgcctgctgagaacggcgaaaccaagaccgaggaatctccagcttctgacgaggccggagagaaggaggccaaaagcgacagcggctctgagacacctggaacaagcgagagcgccaccccggaatcctatgaacaacttgcaccacaaccgtgtgtgggagaaactttacattctagcctcccacgagacagtgaactgtttgtgcctgaagaggggagcagcgagaaggagagcgaggacgcgccaaaaacatctcctccgacgcctgggaaacatggtttggaacagactggggaggaaaaagtgatggtgactgttcctgacaaaaatccaccttgtccttgctgtggtacccgggtaaactctgtgttgaatctgattgaacatctgaaagtgtcacacgggaaaaggggggtttgttttcggtgtgcaaaatgtggaaaggaaaatagtaactatcacagtgttgtttgtcattttaagaaatgcaggggtccagagacggagaaagccccagctggggagtggatttgtgaggtatgcaacagagattttacaaccaaaattggcctgggacaacacaagagattggcacacccagcagtgagaaatcaggaaaggatcgttgcttcccaaccgaaagaaacatcaaatagaggtgctcacaaaaggtgctggacaaaggaggaggaagaattactaataagactggaggctcagttcgagggaaacaaaaatattaataagcttattgcagaacacataaccaccaaaacagctaagcagatcagtgacaaaaggcgattgctgtccagaaagccagcagaggagccacgtgaggagcctggaacgtgtcatcacaccaggagagcagctgcgagcctgagaacggagcctgagatgagtcatcacgcccaggcagaggacagagataatggacctgggagacgccctctgccaggcagggcagctgccggagggagaacaatggacgagataagacgccaccctgataagggcaacggacagcagagacccaccaagcaaaaatcagaagaacagctgcaggcttactataaaaagacactagaggaacgactttcagctggggcacttaacaccttcccccgagcattcaagcaggtaatggaaggccgggatataaagctagtaatcaatcagacagcgcaggactgcttcggatgcctggaatccataagccaaataagaacggcaacccgagataaaaaggacacggtgacccgggagaaacacccaaagaaaccttttcagaagtggatgaagaagagagcaatcaaaaaaggtaattatcttcggttccagcgtagattttatcttgatagagggaaactggctaaaatcattttagatgatattgaatgcttgtcttgtgacataccactcagtgaaatttattcggtttttaaaacaagatgggaaacaactggtagctttaaaagccttggggactttaaaacttacgggaaggctgacaacactgccttcagagaattaattacggctaaagaaattgagaaaaatgtgcaggaaatgagcaaaggctcggctcccggtccagacgggattactcttggggacgtcgtaaagatggatcccgagttttcccggaccatggagattttcaatttatggttaacaactggtaaaatcccggacatggtgagggggtgcagaaccgttttgattccaaaatcatcaaagccggatcgtttgaaagacattaataactggagacctatcacgatcggttccatcttgctgagactgttctccaggattgtaacagctaggctgagcaaagcgtgccccctgaacccaaggcaaagaggctttatcagagcggcgggatgctctgaaaacttaaaactcctgcaaactataatttggtcggccaaaagagaacacagaccactgggtgttgtattcgtggacatcgccaaggcttttgacaccgtaagccaccagcacatcattcatgctttgcagcaaagagaggtggatccccacatcgtcggtctggtgagcaatatgtacgagaacatcagtacgtatatcaccacaaagaggaacacacacacagacaaaatccagatccgggttggagtaaagcagggtgacccgatgtcgccccttttatttaacctggcaatggaccctctattatgcaagctggaagagagtggcaaaggataccaccgaggacagagcagcatcacagcgatggcatttgcagacgatctggttttgctgagcgactcctgggaaaatatgaatacaaatattagcatactggagaccttctgcaatctgaccggactcaaaacacaggggcaaaagtgccacggcttttacatcaagccgacaaagaagtcttacaccatcaatgactgcgctgcctggactatcaacggcacacccctgaacatgatcgaccccggcgaatctgagaaatacctcggcctgcagtttgacccgtggattggaatagcaaggtccggtctctccacaaaactagatttttggcttcagcggatcgatcaagcaccacttaaacctctgcagaaaactgatattctcaaaacatacaccatccctcggctgatctacatagctgaccactcagaagtgaaaagcgcactactcgaaacccttgaccagaagatccggacagcggtcaaggaatggcttcacctacctccgtgcacctgcgatgccatcctgtactcgagcacgagagacggcggtttgggcatcaccaaattggcaggactgatccccagcgtgcaggcccgtagactgcatcggatcgcacagtcatctgacgatacgatgaaatgcttcatggaaaaagagaaaatggaacagctgcataagaaattgtggattcaagctggaggggacagagagaacataccctcgatttgggaagcaccaccgtcgagtgaaccaccaaacaacgtgagcacaaattcggaatgggaagcaccgacccagaaagataaatttccaaagccttgcaattggaggaaaaacgaattcaaaaaatggaccaaattggcatcccaaggccgcggaattgtaaattttgaaagagacaaaattagtaaccattggatccaatactacagacgcatacctcacaggaaactcctcactgcactacaactcagggccaacgtttaccccacgagagaatttctagccaggggtagacaagaccaatacatcaaggcgtgtaggcactgcgatgcggacaacgaatcctgcgcccacatcatcggcaactgcccagtgacacaggacgcccgaatcaagaggcacaattacatctgcgaactgcttctcgaggaggcgaagaagaaggactgggtagtgttcaaggaaccgcacataagggattccaacaaggaactgtacaaacctgacctgatatttgtgaaggatgggcgtgcacttgtcgtggatgtgacagtacggtatgaagcagccaaatcatcgctggaggaagccgctgcagagaaagtgagaaagtacaaacacctggaaacggaagtaagacatctcacgaatgcaaaggacgttacttttgtgggctttcccctaggagcgcgggggaaatggcaccaagataactttaaacttttgactgagcttggcctctccaaatcgaggcaagtgaaaatggcagagactttttccacagtagcgctcttttcatctgtggacattgtacatatgtttgccagtagggccagaaaatctatggttatgtgataataggctgccttctgcggggcttgccttctggccatgcccttcttctctcccttgcacctgtacctcttggtctttgaataaagcctgagtaggaaggaccggtaaaaaaaaaaaaaaaaaaaaaaaaaaaaaaacgttgactaaaaaaaaaaaaaaaaaaaaaaaaaaaaaaaaaaaaaaaaaaaaaaaaaaaaaaaaaaaaaaaaaaaaaa

SEQ ID NO: 11004 - DNA, 5264 bp, synthetic construct
  source 1..5264: mol_type = other DNA
gaaataagagagaaaagaagagtaagaagaaatataagagaattcgccaccatggcccctaagaaaaagcggaaggtgaatatcagcggctctagctgcggcagccccaacagcgccgacaccagcagcgacttcaaggacctgtggaccaagctgaaggaatgccacgaccgggaagtgcagggactccaggtgaaggtcaccaaactcaagcaagaaagaatcctggacgcccagagactggaagaattcttcaccaagaaccagcagctgagagagcagcagaaagtgctgcacgagacaatcaaggttctggaagatagactgcgggccggcctgtgcgacagatgcgccgtgaccgaggaacacatgcgcaaaaagcagcaggagttcgagaacattagacagcaaaatctgaaattgatcacagagctgatgaacgagagaaacacactgcaggaggagaacaagaagctgagcgagcagctgcaacagaagatcgagaatgatcagcaacaccaggccgctgagctggaatgtgaagaggacgtgatccccgacagcccaatcacagctttcagcttttctggcgtgaacagactgaggcggaaggaaaacccccacgtgcggtacatcgagcagacccataccaagctggaacacagcgtgtgtgccaacgagatgagaaaggtgtccaagtcctccacccatccccagcacaaccctaacgaaaatgagatcctggtggctgatacctacgaccagtctcagagccctatggccaaggcccacggcaccagctcttatacccctgataagagctccttcaacctggccaccgtggtggccgagacactgggcctgggcgtgcaggaggaaagcgagacacagggcccaatgagccctctgggagatgagctgtaccactgcctggaaggcaaccacaagaaacagccttttgagtccggctccgagactcctggaacaagcgagagcgctacacctgagggcagccctaagagaaaggtgtccagcgccgagggcgctgccaaggaagagcctaaacggagaagcgccagactgagcgccaagccccccgccaaggtggaagccaagcctaagaaggccgccgctaaggacaagagcagcgataagaaagtccagaccaagggcaagcggggcgccaaaggcaaacaggccgaggtggccaaccaggagacaaaggaagatctgcctgctgagaacggcgaaaccaagaccgaggaatctccagcttctgacgaggccggagagaaggaggccaaaagcgacagcggctctgagacacctggaacaagcgagagcgccaccccggaatcctatgaacaacttgcaccacaaccgtgtgtgggagaaactttacattctagcctcccacgagacagtgaactgtttgtgcctgaagaggggagcagcgagaaggagagcgaggacgcgccaaaaacatctcctccgacgcctgggaaacatggtttggaacagactggggaggaaaaagtgatggtgactgttcctgacaaaaatccaccttgtccttgctgtggtacccgggtaaactctgtgttgaatctgattgaacatctgaaagtgtcacacgggaaaaggggggtttgttttcggtgtgcaaaatgtggaaaggaaaatagtaactatcacagtgttgtttgtcattttaagaaatgcaggggtccagagacggagaaagccccagctggggagtggatttgtgaggtatgcaacagagattttacaaccaaaattggcctgggacaacacaagagattggcacacccagcagtgagaaatcaggaaaggatcgttgcttcccaaccgaaagaaacatcaaatagaggtgctcacaaaaggtgctggacaaaggaggaggaagaattactaataagactggaggctcagttcgagggaaacaaaaatattaataagcttattgcagaacacataaccaccaaaacagctaagcagatcagtgacaaaaggcgattgctgtccagaaagccagcagaggagccacgtgaggagcctggaacgtgtcatcacaccaggagagcagctgcgagcctgagaacggagcctgagatgagtcatcacgcccaggcagaggacagagataatggacctgggagacgccctctgccaggcagggcagctgccggagggagaacaatggacgagataagacgccaccctgataagggcaacggacagcagagacccaccaagcaaaaatcagaagaacagctgcaggcttactataaaaagacactagaggaacgactttcagctggggcacttaacaccttcccccgagcattcaagcaggtaatggaaggccgggatataaagctagtaatcaatcagacagcgcaggactgcttcggatgcctggaatccataagccaaataagaacggcaacccgagataaaaaggacacggtgacccgggagaaacacccaaagaaaccttttcagaagtggatgaagaagagagcaatcaaaaaaggtaattatcttcggttccagcgtttattttatcttgatagagggaaactggctaaaatcattttagatgatattgaatgcttgagatgtgacataccactcagtgaaatttattcggtttttaaaacaagatgggaaacaactggtagctttaaaagccttggggactttaaaacttacgggaaggctgacaacactgccttcagagaattaattacggctaaagaaattgagaaaaatgtgcaggaaatgagcaaaggctcggctcccggtccagacgggattactcttggggacgtcgtaaagatggatcccgagttttcccggaccatggagattttcaatttatggttaacaactggtaaaatcccggacatggtgagggggtgcagaaccgttttgattccaaaatcatcaaagccggatcgtttgaaagacattaataactggagacctatcacgatcggttccatcttgctgagactgttctccaggattgtaacagctaggctgagcaaagcgtgccccctgaacccaaggcaaagaggctttatcagagcggcgggatgctctgaaaacttaaaactcctgcaaactataatttggtcggccaaaagagaacacagaccactgggtgttgtattcgtggacatcgccaaggcttttgacaccgtaagccaccagcacatcattcatgctttgcagcaaagagaggtggatccccacatcgtcggtctggtgagcaatatgtacgagaacatcagtacgtatatcaccacaaagaggaacacacacacagacaaaatccagatccgggttggagtaaagcagggtgacccgatgtcgccccttttatttaacctggcaatggaccctctattatgcaagctggaagagagtggcaaaggataccaccgaggacagagcagcatcacagcgatggcatttgcagacgatctggttttgctgagcgactcctgggaaaatatgaatacaaatattagcatactggagaccttctgcaatctgaccggactcaaaacacaggggcaaaagtgccacggcttttacatcaagccgacaaagaagtcttacaccatcaatgactgcgctgcctggactatcaacggcacacccctgaacatgatcgaccccggcgaatctgagaaatacctcggcctgcagtttgacccgtggattggaatagcaaggtccggtctctccacaaaactagatttttggcttcagcggatcgatcaagcaccacttaaacctctgcagaaaactgatattctcaaaacatacaccatccctcggctgatctacatagctgaccactcagaagtgaaaagcgcactactcgaaacccttgaccagaagatccggacagcggtcaaggaatggcttcacctacctccgtgcacctgcgatgccatcctgtactcgagcacgagagacggcggtttgggcatcaccaaattggcaggactgatccccagcgtgcaggcccgtagactgcatcggatcgcacagtcatctgacgatacgatgaaatgcttcatggaaaaagagaaaatggaacagctgcataagaaattgtggattcaagctggaggggacagagagaacataccctcgatttgggaagcaccaccgtcgagtgaaccaccaaacaacgtgagcacaaattcggaatgggaagcaccgacccagaaagataaatttccaaagccttgcaattggaggaaaaacgaattcaaaaaatggaccaaattggcatcccaaggccgcggaattgtaaattttgaaagagacaaaattagtaaccattggatccaatactacagacgcatacctcacaggaaactcctcactgcactacaactcagggccaacgtttaccccacgagagaatttctagccaggggtagacaagaccaatacatcaaggcgtgtaggcactgcgatgcggacaacgaatcctgcgcccacatcatcggcaactgcccagtgacacaggacgcccgaatcaagaggcacaattacatctgcgaactgcttctcgaggaggcgaagaagaaggactgggtagtgttcaaggaaccgcacataagggattccaacaaggaactgtacaaacctgacctgatatttgtgaaggatgggcgtgcacttgtcgtggatgtgacagtacggtatgaagcagccaaatcatcgctggaggaagccgctgcagagaaagtgagaaagtacaaacacctggaaacggaagtaagacatctcacgaatgcaaaggacgttacttttgtgggctttcccctaggagcgcgggggaaatggcaccaagataactttaaacttttgactgagcttggcctctccaaatcgaggcaagtgaaaatggcagagactttttccacagtagcgctcttttcatctgtggacattgtacatatgtttgccagtagggccagaaaatctatggttatgtgataataggctgccttctgcggggcttgccttctggccatgcccttcttctctcccttgcacctgtacctcttggtctttgaataaagcctgagtaggaaggaccggtaaaaaaaaaaaaaaaaaaaaaaaaaaaaaaacgttgactaaaaaaaaaaaaaaaaaaaaaaaaaaaaaaaaaaaaaaaaaaaaaaaaaaaaaaaaaaaaaaaaaaaaaa

SEQ ID NO: 11005 - DNA, 5264 bp, synthetic construct
  source 1..5264: mol_type = other DNA
gaaataagagagaaaagaagagtaagaagaaatataagagaattcgccaccatggcccctaagaaaaagcggaaggtgaatatcagcggctctagctgcggcagccccaacagcgccgacaccagcagcgacttcaaggacctgtggaccaagctgaaggaatgccacgaccgggaagtgcagggactccaggtgaaggtcaccaaactcaagcaagaaagaatcctggacgcccagagactggaagaattcttcaccaagaaccagcagctgagagagcagcagaaagtgctgcacgagacaatcaaggttctggaagatagactgcgggccggcctgtgcgacagatgcgccgtgaccgaggaacacatgcgcaaaaagcagcaggagttcgagaacattagacagcaaaatctgaaattgatcacagagctgatgaacgagagaaacacactgcaggaggagaacaagaagctgagcgagcagctgcaacagaagatcgagaatgatcagcaacaccaggccgctgagctggaatgtgaagaggacgtgatccccgacagcccaatcacagctttcagcttttctggcgtgaacagactgaggcggaaggaaaacccccacgtgcggtacatcgagcagacccataccaagctggaacacagcgtgtgtgccaacgagatgagaaaggtgtccaagtcctccacccatccccagcacaaccctaacgaaaatgagatcctggtggctgatacctacgaccagtctcagagccctatggccaaggcccacggcaccagctcttatacccctgataagagctccttcaacctggccaccgtggtggccgagacactgggcctgggcgtgcaggaggaaagcgagacacagggcccaatgagccctctgggagatgagctgtaccactgcctggaaggcaaccacaagaaacagccttttgagtccggctccgagactcctggaacaagcgagagcgctacacctgagggcagccctaagagaaaggtgtccagcgccgagggcgctgccaaggaagagcctaaacggagaagcgccagactgagcgccaagccccccgccaaggtggaagccaagcctaagaaggccgccgctaaggacaagagcagcgataagaaagtccagaccaagggcaagcggggcgccaaaggcaaacaggccgaggtggccaaccaggagacaaaggaagatctgcctgctgagaacggcgaaaccaagaccgaggaatctccagcttctgacgaggccggagagaaggaggccaaaagcgacagcggctctgagacacctggaacaagcgagagcgccaccccggaatcctatgaacaacttgcaccacaaccgtgtgtgggagaaactttacattctagcctcccacgagacagtgaactgtttgtgcctgaagaggggagcagcgagaaggagagcgaggacgcgccaaaaacatctcctccgacgcctgggaaacatggtttggaacagactggggaggaaaaagtgatggtgactgttcctgacaaaaatccaccttgtccttgctgtggtacccgggtaaactctgtgttgaatctgattgaacatctgaaagtgtcacacgggaaaaggggggtttgttttcggtgtgcaaaatgtggaaaggaaaatagtaactatcacagtgttgtttgtcattttaagaaatgcaggggtccagagacggagaaagccccagctggggagtggatttgtgaggtatgcaacagagattttacaaccaaaattggcctgggacaacacaagagattggcacacccagcagtgagaaatcaggaaaggatcgttgcttcccaaccgaaagaaacatcaaatagaggtgctcacaaaaggtgctggacaaaggaggaggaagaattactaataagactggaggctcagttcgagggaaacaaaaatattaataagcttattgcagaacacataaccaccaaaacagctaagcagatcagtgacaaaaggcgattgctgtccagaaagccagcagaggagccacgtgaggagcctggaacgtgtcatcacaccaggagagcagctgcgagcctgagaacggagcctgagatgagtcatcacgcccaggcagaggacagagataatggacctgggagacgccctctgccaggcagggcagctgccggagggagaacaatggacgagataagacgccaccctgataagggcaacggacagcagagacccaccaagcaaaaatcagaagaacagctgcaggcttactataaaaagacactagaggaacgactttcagctggggcacttaacaccttcccccgagcattcaagcaggtaatggaaggccgggatataaagctagtaatcaatcagacagcgcaggactgcttcggatgcctggaatccataagccaaataagaacggcaacccgagataaaaaggacacggtgacccgggagaaacacccaaagaaaccttttcagaagtggatgaagaagagagcaatcaaaaaaggtaattatcttcggttccagcgtttattttatcttgatagagggaaactggctaaaatcattttagatgatattgaatgcttgtcttgtgacataccactcagtgaaatttattcggtttttaaaacaagatgggaaacaactggtagctacaaaagccttggggactttaaaacttacgggaaggctgacaacactgccttcagagaattaattacggctaaagaaattgagaaaaatgtgcaggaaatgagcaaaggctcggctcccggtccagacgggattactcttggggacgtcgtaaagatggatcccgagttttcccggaccatggagattttcaatttatggttaacaactggtaaaatcccggacatggtgagggggtgcagaaccgttttgattccaaaatcatcaaagccggatcgtttgaaagacattaataactggagacctatcacgatcggttccatcttgctgagactgttctccaggattgtaacagctaggctgagcaaagcgtgccccctgaacccaaggcaaagaggctttatcagagcggcgggatgctctgaaaacttaaaactcctgcaaactataatttggtcggccaaaagagaacacagaccactgggtgttgtattcgtggacatcgccaaggcttttgacaccgtaagccaccagcacatcattcatgctttgcagcaaagagaggtggatccccacatcgtcggtctggtgagcaatatgtacgagaacatcagtacgtatatcaccacaaagaggaacacacacacagacaaaatccagatccgggttggagtaaagcagggtgacccgatgtcgccccttttatttaacctggcaatggaccctctattatgcaagctggaagagagtggcaaaggataccaccgaggacagagcagcatcacagcgatggcatttgcagacgatctggttttgctgagcgactcctgggaaaatatgaatacaaatattagcatactggagaccttctgcaatctgaccggactcaaaacacaggggcaaaagtgccacggcttttacatcaagccgacaaagaagtcttacaccatcaatgactgcgctgcctggactatcaacggcacacccctgaacatgatcgaccccggcgaatctgagaaatacctcggcctgcagtttgacccgtggattggaatagcaaggtccggtctctccacaaaactagatttttggcttcagcggatcgatcaagcaccacttaaacctctgcagaaaactgatattctcaaaacatacaccatccctcggctgatctacatagctgaccactcagaagtgaaaagcgcactactcgaaacccttgaccagaagatccggacagcggtcaaggaatggcttcacctacctccgtgcacctgcgatgccatcctgtactcgagcacgagagacggcggtttgggcatcaccaaattggcaggactgatccccagcgtgcaggcccgtagactgcatcggatcgcacagtcatctgacgatacgatgaaatgcttcatggaaaaagagaaaatggaacagctgcataagaaattgtggattcaagctggaggggacagagagaacataccctcgatttgggaagcaccaccgtcgagtgaaccaccaaacaacgtgagcacaaattcggaatgggaagcaccgacccagaaagataaatttccaaagccttgcaattggaggaaaaacgaattcaaaaaatggaccaaattggcatcccaaggccgcggaattgtaaattttgaaagagacaaaattagtaaccattggatccaatactacagacgcatacctcacaggaaactcctcactgcactacaactcagggccaacgtttaccccacgagagaatttctagccaggggtagacaagaccaatacatcaaggcgtgtaggcactgcgatgcggacaacgaatcctgcgcccacatcatcggcaactgcccagtgacacaggacgcccgaatcaagaggcacaattacatctgcgaactgcttctcgaggaggcgaagaagaaggactgggtagtgttcaaggaaccgcacataagggattccaacaaggaactgtacaaacctgacctgatatttgtgaaggatgggcgtgcacttgtcgtggatgtgacagtacggtatgaagcagccaaatcatcgctggaggaagccgctgcagagaaagtgagaaagtacaaacacctggaaacggaagtaagacatctcacgaatgcaaaggacgttacttttgtgggctttcccctaggagcgcgggggaaatggcaccaagataactttaaacttttgactgagcttggcctctccaaatcgaggcaagtgaaaatggcagagactttttccacagtagcgctcttttcatctgtggacattgtacatatgtttgccagtagggccagaaaatctatggttatgtgataataggctgccttctgcggggcttgccttctggccatgcccttcttctctcccttgcacctgtacctcttggtctttgaataaagcctgagtaggaaggaccggtaaaaaaaaaaaaaaaaaaaaaaaaaaaaaaacgttgactaaaaaaaaaaaaaaaaaaaaaaaaaaaaaaaaaaaaaaaaaaaaaaaaaaaaaaaaaaaaaaaaaaaaaa

SEQ ID NO: 11006 - DNA, 5264 bp, synthetic construct
  source 1..5264: mol_type = other DNA
gaaataagagagaaaagaagagtaagaagaaatataagagaattcgccaccatggcccctaagaaaaagcggaaggtgaatatcagcggctctagctgcggcagccccaacagcgccgacaccagcagcgacttcaaggacctgtggaccaagctgaaggaatgccacgaccgggaagtgcagggactccaggtgaaggtcaccaaactcaagcaagaaagaatcctggacgcccagagactggaagaattcttcaccaagaaccagcagctgagagagcagcagaaagtgctgcacgagacaatcaaggttctggaagatagactgcgggccggcctgtgcgacagatgcgccgtgaccgaggaacacatgcgcaaaaagcagcaggagttcgagaacattagacagcaaaatctgaaattgatcacagagctgatgaacgagagaaacacactgcaggaggagaacaagaagctgagcgagcagctgcaacagaagatcgagaatgatcagcaacaccaggccgctgagctggaatgtgaagaggacgtgatccccgacagcccaatcacagctttcagcttttctggcgtgaacagactgaggcggaaggaaaacccccacgtgcggtacatcgagcagacccataccaagctggaacacagcgtgtgtgccaacgagatgagaaaggtgtccaagtcctccacccatccccagcacaaccctaacgaaaatgagatcctggtggctgatacctacgaccagtctcagagccctatggccaaggcccacggcaccagctcttatacccctgataagagctccttcaacctggccaccgtggtggccgagacactgggcctgggcgtgcaggaggaaagcgagacacagggcccaatgagccctctgggagatgagctgtaccactgcctggaaggcaaccacaagaaacagccttttgagtccggctccgagactcctggaacaagcgagagcgctacacctgagggcagccctaagagaaaggtgtccagcgccgagggcgctgccaaggaagagcctaaacggagaagcgccagactgagcgccaagccccccgccaaggtggaagccaagcctaagaaggccgccgctaaggacaagagcagcgataagaaagtccagaccaagggcaagcggggcgccaaaggcaaacaggccgaggtggccaaccaggagacaaaggaagatctgcctgctgagaacggcgaaaccaagaccgaggaatctccagcttctgacgaggccggagagaaggaggccaaaagcgacagcggctctgagacacctggaacaagcgagagcgccaccccggaatcctatgaacaacttgcaccacaaccgtgtgtgggagaaactttacattctagcctcccacgagacagtgaactgtttgtgcctgaagaggggagcagcgagaaggagagcgaggacgcgccaaaaacatctcctccgacgcctgggaaacatggtttggaacagactggggaggaaaaagtgatggtgactgttcctgacaaaaatccaccttgtccttgctgtggtacccgggtaaactctgtgttgaatctgattgaacatctgaaagtgtcacacgggaaaaggggggtttgttttcggtgtgcaaaatgtggaaaggaaaatagtaactatcacagtgttgtttgtcattttaagaaatgcaggggtccagagacggagaaagccccagctggggagtggatttgtgaggtatgcaacagagattttacaaccaaaattggcctgggacaacacaagagattggcacacccagcagtgagaaatcaggaaaggatcgttgcttcccaaccgaaagaaacatcaaatagaggtgctcacaaaaggtgctggacaaaggaggaggaagaattactaataagactggaggctcagttcgagggaaacaaaaatattaataagcttattgcagaacacataaccaccaaaacagctaagcagatcagtgacaaaaggcgattgctgtccagaaagccagcagaggagccacgtgaggagcctggaacgtgtcatcacaccaggagagcagctgcgagcctgagaacggagcctgagatgagtcatcacgcccaggcagaggacagagataatggacctgggagacgccctctgccaggcagggcagctgccggagggagaacaatggacgagataagacgccaccctgataagggcaacggacagcagagacccaccaagcaaaaatcagaagaacagctgcaggcttactataaaaagacactagaggaacgactttcagctggggcacttaacaccttcccccgagcattcaagcaggtaatggaaggccgggatataaagctagtaatcaatcagacagcgcaggactgcttcggatgcctggaatccataagccaaataagaacggcaacccgagataaaaaggacacggtgacccgggagaaacacccaaagaaaccttttcagaagtggatgaagaagagagcaatcaaaaaaggtaattatcttcggttccagcgtttattttatcttgatagagggaaactggctaaaatcattttagatgatattgaatgcttgtcttgtgacataccactcagtgaaatttattcggtttttaaaacaagatgggaaacaactggtagctttaaaagccttggggactttaaaacttacgggaaggctgacaacactgccttcagagaattaattacggctaaagaaattgagaaaaatgtgcaggaaatgagcaaaggctcggctcccggtccagacgggattactcttggggacgtcgtaaagatggatcccgagttttcccggaccatggagattttcaatttatggttaacaactggtaaaatcccggacatggtgagggggtgcagaaccgttttgattccaaaatcatcaaagccggatcgtttgaaagacattaataactggagacctatcacgatcggttccatcttgctgagactgttctccaggattgtaacagctaggctgagcaaagcgtgccccctgaacccaaggagaagaggctttatcagagcggcgggatgctctgaaaacttaaaactcctgcaaactataatttggtcggccaaaagagaacacagaccactgggtgttgtattcgtggacatcgccaaggcttttgacaccgtaagccaccagcacatcattcatgctttgcagcaaagagaggtggatccccacatcgtcggtctggtgagcaatatgtacgagaacatcagtacgtatatcaccacaaagaggaacacacacacagacaaaatccagatccgggttggagtaaagcagggtgacccgatgtcgccccttttatttaacctggcaatggaccctctattatgcaagctggaagagagtggcaaaggataccaccgaggacagagcagcatcacagcgatggcatttgcagacgatctggttttgctgagcgactcctgggaaaatatgaatacaaatattagcatactggagaccttctgcaatctgaccggactcaaaacacaggggcaaaagtgccacggcttttacatcaagccgacaaagaagtcttacaccatcaatgactgcgctgcctggactatcaacggcacacccctgaacatgatcgaccccggcgaatctgagaaatacctcggcctgcagtttgacccgtggattggaatagcaaggtccggtctctccacaaaactagatttttggcttcagcggatcgatcaagcaccacttaaacctctgcagaaaactgatattctcaaaacatacaccatccctcggctgatctacatagctgaccactcagaagtgaaaagcgcactactcgaaacccttgaccagaagatccggacagcggtcaaggaatggcttcacctacctccgtgcacctgcgatgccatcctgtactcgagcacgagagacggcggtttgggcatcaccaaattggcaggactgatccccagcgtgcaggcccgtagactgcatcggatcgcacagtcatctgacgatacgatgaaatgcttcatggaaaaagagaaaatggaacagctgcataagaaattgtggattcaagctggaggggacagagagaacataccctcgatttgggaagcaccaccgtcgagtgaaccaccaaacaacgtgagcacaaattcggaatgggaagcaccgacccagaaagataaatttccaaagccttgcaattggaggaaaaacgaattcaaaaaatggaccaaattggcatcccaaggccgcggaattgtaaattttgaaagagacaaaattagtaaccattggatccaatactacagacgcatacctcacaggaaactcctcactgcactacaactcagggccaacgtttaccccacgagagaatttctagccaggggtagacaagaccaatacatcaaggcgtgtaggcactgcgatgcggacaacgaatcctgcgcccacatcatcggcaactgcccagtgacacaggacgcccgaatcaagaggcacaattacatctgcgaactgcttctcgaggaggcgaagaagaaggactgggtagtgttcaaggaaccgcacataagggattccaacaaggaactgtacaaacctgacctgatatttgtgaaggatgggcgtgcacttgtcgtggatgtgacagtacggtatgaagcagccaaatcatcgctggaggaagccgctgcagagaaagtgagaaagtacaaacacctggaaacggaagtaagacatctcacgaatgcaaaggacgttacttttgtgggctttcccctaggagcgcgggggaaatggcaccaagataactttaaacttttgactgagcttggcctctccaaatcgaggcaagtgaaaatggcagagactttttccacagtagcgctcttttcatctgtggacattgtacatatgtttgccagtagggccagaaaatctatggttatgtgataataggctgccttctgcggggcttgccttctggccatgcccttcttctctcccttgcacctgtacctcttggtctttgaataaagcctgagtaggaaggaccggtaaaaaaaaaaaaaaaaaaaaaaaaaaaaaaacgttgactaaaaaaaaaaaaaaaaaaaaaaaaaaaaaaaaaaaaaaaaaaaaaaaaaaaaaaaaaaaaaaaaaaaaaa

SEQ ID NO: 11007 - DNA, 5264 bp, synthetic construct
  source 1..5264: mol_type = other DNA
gaaataagagagaaaagaagagtaagaagaaatataagagaattcgccaccatggcccctaagaaaaagcggaaggtgaatatcagcggctctagctgcggcagccccaacagcgccgacaccagcagcgacttcaaggacctgtggaccaagctgaaggaatgccacgaccgggaagtgcagggactccaggtgaaggtcaccaaactcaagcaagaaagaatcctggacgcccagagactggaagaattcttcaccaagaaccagcagctgagagagcagcagaaagtgctgcacgagacaatcaaggttctggaagatagactgcgggccggcctgtgcgacagatgcgccgtgaccgaggaacacatgcgcaaaaagcagcaggagttcgagaacattagacagcaaaatctgaaattgatcacagagctgatgaacgagagaaacacactgcaggaggagaacaagaagctgagcgagcagctgcaacagaagatcgagaatgatcagcaacaccaggccgctgagctggaatgtgaagaggacgtgatccccgacagcccaatcacagctttcagcttttctggcgtgaacagactgaggcggaaggaaaacccccacgtgcggtacatcgagcagacccataccaagctggaacacagcgtgtgtgccaacgagatgagaaaggtgtccaagtcctccacccatccccagcacaaccctaacgaaaatgagatcctggtggctgatacctacgaccagtctcagagccctatggccaaggcccacggcaccagctcttatacccctgataagagctccttcaacctggccaccgtggtggccgagacactgggcctgggcgtgcaggaggaaagcgagacacagggcccaatgagccctctgggagatgagctgtaccactgcctggaaggcaaccacaagaaacagccttttgagtccggctccgagactcctggaacaagcgagagcgctacacctgagggcagccctaagagaaaggtgtccagcgccgagggcgctgccaaggaagagcctaaacggagaagcgccagactgagcgccaagccccccgccaaggtggaagccaagcctaagaaggccgccgctaaggacaagagcagcgataagaaagtccagaccaagggcaagcggggcgccaaaggcaaacaggccgaggtggccaaccaggagacaaaggaagatctgcctgctgagaacggcgaaaccaagaccgaggaatctccagcttctgacgaggccggagagaaggaggccaaaagcgacagcggctctgagacacctggaacaagcgagagcgccaccccggaatcctatgaacaacttgcaccacaaccgtgtgtgggagaaactttacattctagcctcccacgagacagtgaactgtttgtgcctgaagaggggagcagcgagaaggagagcgaggacgcgccaaaaacatctcctccgacgcctgggaaacatggtttggaacagactggggaggaaaaagtgatggtgactgttcctgacaaaaatccaccttgtccttgctgtggtacccgggtaaactctgtgttgaatctgattgaacatctgaaagtgtcacacgggaaaaggggggtttgttttcggtgtgcaaaatgtggaaaggaaaatagtaactatcacagtgttgtttgtcattttaagaaatgcaggggtccagagacggagaaagccccagctggggagtggatttgtgaggtatgcaacagagattttacaaccaaaattggcctgggacaacacaagagattggcacacccagcagtgagaaatcaggaaaggatcgttgcttcccaaccgaaagaaacatcaaatagaggtgctcacaaaaggtgctggacaaaggaggaggaagaattactaataagactggaggctcagttcgagggaaacaaaaatattaataagcttattgcagaacacataaccaccaaaacagctaagcagatcagtgacaaaaggcgattgctgtccagaaagccagcagaggagccacgtgaggagcctggaacgtgtcatcacaccaggagagcagctgcgagcctgagaacggagcctgagatgagtcatcacgcccaggcagaggacagagataatggacctgggagacgccctctgccaggcagggcagctgccggagggagaacaatggacgagataagacgccaccctgataagggcaacggacagcagagacccaccaagcaaaaatcagaagaacagctgcaggcttactataaaaagacactagaggaacgactttcagctggggcacttaacaccttcccccgagcattcaagcaggtaatggaaggccgggatataaagctagtaatcaatcagacagcgcaggactgcttcggatgcctggaatccataagccaaataagaacggcaacccgagataaaaaggacacggtgacccgggagaaacacccaaagaaaccttttcagaagtggatgaagaagagagcaatcaaaaaaggtaattatcttcggttccagcgtttattttatcttgatagagggaaactggctaaaatcattttagatgatattgaatgcttgtcttgtgacataccactcagtgaaatttattcggtttttaaaacaagatgggaaacaactggtagctttaaaagccttggggactttaaaacttacgggaaggctgacaacactgccttcagagaattaattacggctaaagaaattgagaaaaatgtgcaggaaatgagcaaaggctcggctcccggtccagacgggattactcttggggacgtcgtaaagatggatcccgagttttcccggaccatggagattttcaatttatggttaacaactggtaaaatcccggacatggtgagggggtgcagaaccgttttgattccaaaatcatcaaagccggatcgtttgaaagacattaataactggagacctatcacgatcggttccatcttgctgagactgttctccaggattgtaacagctaggctgagcaaagcgtgccccctgaacccaaggcaaagaggctttatcagagcggcgggatgctctgaaaacttaaaactcctgcaaactataatttggtcggccaaaagagaaaggagaccactgggtgttgtattcgtggacatcgccaaggcttttgacaccgtaagccaccagcacatcattcatgctttgcagcaaagagaggtggatccccacatcgtcggtctggtgagcaatatgtacgagaacatcagtacgtatatcaccacaaagaggaacacacacacagacaaaatccagatccgggttggagtaaagcagggtgacccgatgtcgccccttttatttaacctggcaatggaccctctattatgcaagctggaagagagtggcaaaggataccaccgaggacagagcagcatcacagcgatggcatttgcagacgatctggttttgctgagcgactcctgggaaaatatgaatacaaatattagcatactggagaccttctgcaatctgaccggactcaaaacacaggggcaaaagtgccacggcttttacatcaagccgacaaagaagtcttacaccatcaatgactgcgctgcctggactatcaacggcacacccctgaacatgatcgaccccggcgaatctgagaaatacctcggcctgcagtttgacccgtggattggaatagcaaggtccggtctctccacaaaactagatttttggcttcagcggatcgatcaagcaccacttaaacctctgcagaaaactgatattctcaaaacatacaccatccctcggctgatctacatagctgaccactcagaagtgaaaagcgcactactcgaaacccttgaccagaagatccggacagcggtcaaggaatggcttcacctacctccgtgcacctgcgatgccatcctgtactcgagcacgagagacggcggtttgggcatcaccaaattggcaggactgatccccagcgtgcaggcccgtagactgcatcggatcgcacagtcatctgacgatacgatgaaatgcttcatggaaaaagagaaaatggaacagctgcataagaaattgtggattcaagctggaggggacagagagaacataccctcgatttgggaagcaccaccgtcgagtgaaccaccaaacaacgtgagcacaaattcggaatgggaagcaccgacccagaaagataaatttccaaagccttgcaattggaggaaaaacgaattcaaaaaatggaccaaattggcatcccaaggccgcggaattgtaaattttgaaagagacaaaattagtaaccattggatccaatactacagacgcatacctcacaggaaactcctcactgcactacaactcagggccaacgtttaccccacgagagaatttctagccaggggtagacaagaccaatacatcaaggcgtgtaggcactgcgatgcggacaacgaatcctgcgcccacatcatcggcaactgcccagtgacacaggacgcccgaatcaagaggcacaattacatctgcgaactgcttctcgaggaggcgaagaagaaggactgggtagtgttcaaggaaccgcacataagggattccaacaaggaactgtacaaacctgacctgatatttgtgaaggatgggcgtgcacttgtcgtggatgtgacagtacggtatgaagcagccaaatcatcgctggaggaagccgctgcagagaaagtgagaaagtacaaacacctggaaacggaagtaagacatctcacgaatgcaaaggacgttacttttgtgggctttcccctaggagcgcgggggaaatggcaccaagataactttaaacttttgactgagcttggcctctccaaatcgaggcaagtgaaaatggcagagactttttccacagtagcgctcttttcatctgtggacattgtacatatgtttgccagtagggccagaaaatctatggttatgtgataataggctgccttctgcggggcttgccttctggccatgcccttcttctctcccttgcacctgtacctcttggtctttgaataaagcctgagtaggaaggaccggtaaaaaaaaaaaaaaaaaaaaaaaaaaaaaaacgttgactaaaaaaaaaaaaaaaaaaaaaaaaaaaaaaaaaaaaaaaaaaaaaaaaaaaaaaaaaaaaaaaaaaaaaa

SEQ ID NO: 11008 - DNA, 5264 bp, synthetic construct
  source 1..5264: mol_type = other DNA
gaaataagagagaaaagaagagtaagaagaaatataagagaattcgccaccatggcccctaagaaaaagcggaaggtgaatatcagcggctctagctgcggcagccccaacagcgccgacaccagcagcgacttcaaggacctgtggaccaagctgaaggaatgccacgaccgggaagtgcagggactccaggtgaaggtcaccaaactcaagcaagaaagaatcctggacgcccagagactggaagaattcttcaccaagaaccagcagctgagagagcagcagaaagtgctgcacgagacaatcaaggttctggaagatagactgcgggccggcctgtgcgacagatgcgccgtgaccgaggaacacatgcgcaaaaagcagcaggagttcgagaacattagacagcaaaatctgaaattgatcacagagctgatgaacgagagaaacacactgcaggaggagaacaagaagctgagcgagcagctgcaacagaagatcgagaatgatcagcaacaccaggccgctgagctggaatgtgaagaggacgtgatccccgacagcccaatcacagctttcagcttttctggcgtgaacagactgaggcggaaggaaaacccccacgtgcggtacatcgagcagacccataccaagctggaacacagcgtgtgtgccaacgagatgagaaaggtgtccaagtcctccacccatccccagcacaaccctaacgaaaatgagatcctggtggctgatacctacgaccagtctcagagccctatggccaaggcccacggcaccagctcttatacccctgataagagctccttcaacctggccaccgtggtggccgagacactgggcctgggcgtgcaggaggaaagcgagacacagggcccaatgagccctctgggagatgagctgtaccactgcctggaaggcaaccacaagaaacagccttttgagtccggctccgagactcctggaacaagcgagagcgctacacctgagggcagccctaagagaaaggtgtccagcgccgagggcgctgccaaggaagagcctaaacggagaagcgccagactgagcgccaagccccccgccaaggtggaagccaagcctaagaaggccgccgctaaggacaagagcagcgataagaaagtccagaccaagggcaagcggggcgccaaaggcaaacaggccgaggtggccaaccaggagacaaaggaagatctgcctgctgagaacggcgaaaccaagaccgaggaatctccagcttctgacgaggccggagagaaggaggccaaaagcgacagcggctctgagacacctggaacaagcgagagcgccaccccggaatcctatgaacaacttgcaccacaaccgtgtgtgggagaaactttacattctagcctcccacgagacagtgaactgtttgtgcctgaagaggggagcagcgagaaggagagcgaggacgcgccaaaaacatctcctccgacgcctgggaaacatggtttggaacagactggggaggaaaaagtgatggtgactgttcctgacaaaaatccaccttgtccttgctgtggtacccgggtaaactctgtgttgaatctgattgaacatctgaaagtgtcacacgggaaaaggggggtttgttttcggtgtgcaaaatgtggaaaggaaaatagtaactatcacagtgttgtttgtcattttaagaaatgcaggggtccagagacggagaaagccccagctggggagtggatttgtgaggtatgcaacagagattttacaaccaaaattggcctgggacaacacaagagattggcacacccagcagtgagaaatcaggaaaggatcgttgcttcccaaccgaaagaaacatcaaatagaggtgctcacaaaaggtgctggacaaaggaggaggaagaattactaataagactggaggctcagttcgagggaaacaaaaatattaataagcttattgcagaacacataaccaccaaaacagctaagcagatcagtgacaaaaggcgattgctgtccagaaagccagcagaggagccacgtgaggagcctggaacgtgtcatcacaccaggagagcagctgcgagcctgagaacggagcctgagatgagtcatcacgcccaggcagaggacagagataatggacctgggagacgccctctgccaggcagggcagctgccggagggagaacaatggacgagataagacgccaccctgataagggcaacggacagcagagacccaccaagcaaaaatcagaagaacagctgcaggcttactataaaaagacactagaggaacgactttcagctggggcacttaacaccttcccccgagcattcaagcaggtaatggaaggccgggatataaagctagtaatcaatcagacagcgcaggactgcttcggatgcctggaatccataagccaaataagaacggcaacccgagataaaaaggacacggtgacccgggagaaacacccaaagaaaccttttcagaagtggatgaagaagagagcaatcaaaaaaggtaattatcttcggttccagcgtttattttatcttgatagagggaaactggctaaaatcattttagatgatattgaatgcttgtcttgtgacataccactcagtgaaatttattcggtttttaaaacaagatgggaaacaactggtagctttaaaagccttggggactttaaaacttacgggaaggctgacaacactgccttcagagaattaattacggctaaagaaattgagaaaaatgtgcaggaaatgagcaaaggctcggctcccggtccagacgggattactcttggggacgtcgtaaagatggatcccgagttttcccggaccatggagattttcaatttatggttaacaactggtaaaatcccggacatggtgagggggtgcagaaccgttttgattccaaaatcatcaaagccggatcgtttgaaagacattaataactggagacctatcacgatcggttccatcttgctgagactgttctccaggattgtaacagctaggctgagcaaagcgtgccccctgaacccaaggcaaagaggctttatcagagcggcgggatgctctgaaaacttaaaactcctgcaaactataatttggtcggccaaaagagaacacagaccactgggtgttgtattcgtggacatcgccaaggcttttgacaccgtaagccaccagcacatcattcatgctttgcagcaaagagaggtggatccccacatcgtcggtctggtgagcaatatgtacgagaacatcagtacgtatatcaccacaaagaggaacacacacacagacaaaatccagatccgggttggagtaaagcagggtgacccgatgtcgccccttttatttaacctggcaatggaccctctattatgcaagctggaagagagtggcaaaggataccaccgaggacagagcagcatcacagcgatggcatttgcagacgatctggttttgctgagcgactcctgggaaaatatgaatacaaatattagcatactggagaccttctgcaatctgaccggactcaaaacacaggggcaaaagtgccacggcttttacatcaagccgacaaagaagtcttacaccatcaatgactgcgctgcctggactatcaacggcacacccctgaacatgatcgaccccggcgaatctgagaaatacctcggcctgcagtttgacccgtggattggaatagcaaggtccggtctctccacaaaactagatttttggcttcagcggatcgatcaagcaccacttaaacctctgcagaaaactgatattctcaaaacatacaccatccctcggctgatctacatagctgaccactcagaagtgaaaagcgcactactcgaaacccttgaccagaagatccggacagcggtcaaggaatggcttcacctacctccgtgcacctgcgatgccatcctgtactcgagcacgagagacggcggtttgggcatcaccaaattggcaggactgatccccagcgtgcagctgcgtagactgcatcggatcgcacagtcatctgacgatacgatgaaatgcttcatggaaaaagagaaaatggaacagctgcataagaaattgtggattcaagctggaggggacagagagaacataccctcgatttgggaagcaccaccgtcgagtgaaccaccaaacaacgtgagcacaaattcggaatgggaagcaccgacccagaaagataaatttccaaagccttgcaattggaggaaaaacgaattcaaaaaatggaccaaattggcatcccaaggccgcggaattgtaaattttgaaagagacaaaattagtaaccattggatccaatactacagacgcatacctcacaggaaactcctcactgcactacaactcagggccaacgtttaccccacgagagaatttctagccaggggtagacaagaccaatacatcaaggcgtgtaggcactgcgatgcggacaacgaatcctgcgcccacatcatcggcaactgcccagtgacacaggacgcccgaatcaagaggcacaattacatctgcgaactgcttctcgaggaggcgaagaagaaggactgggtagtgttcaaggaaccgcacataagggattccaacaaggaactgtacaaacctgacctgatatttgtgaaggatgggcgtgcacttgtcgtggatgtgacagtacggtatgaagcagccaaatcatcgctggaggaagccgctgcagagaaagtgagaaagtacaaacacctggaaacggaagtaagacatctcacgaatgcaaaggacgttacttttgtgggctttcccctaggagcgcgggggaaatggcaccaagataactttaaacttttgactgagcttggcctctccaaatcgaggcaagtgaaaatggcagagactttttccacagtagcgctcttttcatctgtggacattgtacatatgtttgccagtagggccagaaaatctatggttatgtgataataggctgccttctgcggggcttgccttctggccatgcccttcttctctcccttgcacctgtacctcttggtctttgaataaagcctgagtaggaaggaccggtaaaaaaaaaaaaaaaaaaaaaaaaaaaaaaacgttgactaaaaaaaaaaaaaaaaaaaaaaaaaaaaaaaaaaaaaaaaaaaaaaaaaaaaaaaaaaaaaaaaaaaaaa

SEQ ID NO: 11009 - DNA, 5264 bp, synthetic construct
  source 1..5264: mol_type = other DNA
gaaataagagagaaaagaagagtaagaagaaatataagagaattcgccaccatggcccctaagaaaaagcggaaggtgaatatcagcggctctagctgcggcagccccaacagcgccgacaccagcagcgacttcaaggacctgtggaccaagctgaaggaatgccacgaccgggaagtgcagggactccaggtgaaggtcaccaaactcaagcaagaaagaatcctggacgcccagagactggaagaattcttcaccaagaaccagcagctgagagagcagcagaaagtgctgcacgagacaatcaaggttctggaagatagactgcgggccggcctgtgcgacagatgcgccgtgaccgaggaacacatgcgcaaaaagcagcaggagttcgagaacattagacagcaaaatctgaaattgatcacagagctgatgaacgagagaaacacactgcaggaggagaacaagaagctgagcgagcagctgcaacagaagatcgagaatgatcagcaacaccaggccgctgagctggaatgtgaagaggacgtgatccccgacagcccaatcacagctttcagcttttctggcgtgaacagactgaggcggaaggaaaacccccacgtgcggtacatcgagcagacccataccaagctggaacacagcgtgtgtgccaacgagatgagaaaggtgtccaagtcctccacccatccccagcacaaccctaacgaaaatgagatcctggtggctgatacctacgaccagtctcagagccctatggccaaggcccacggcaccagctcttatacccctgataagagctccttcaacctggccaccgtggtggccgagacactgggcctgggcgtgcaggaggaaagcgagacacagggcccaatgagccctctgggagatgagctgtaccactgcctggaaggcaaccacaagaaacagccttttgagtccggctccgagactcctggaacaagcgagagcgctacacctgagggcagccctaagagaaaggtgtccagcgccgagggcgctgccaaggaagagcctaaacggagaagcgccagactgagcgccaagccccccgccaaggtggaagccaagcctaagaaggccgccgctaaggacaagagcagcgataagaaagtccagaccaagggcaagcggggcgccaaaggcaaacaggccgaggtggccaaccaggagacaaaggaagatctgcctgctgagaacggcgaaaccaagaccgaggaatctccagcttctgacgaggccggagagaaggaggccaaaagcgacagcggctctgagacacctggaacaagcgagagcgccaccccggaatcctatgaacaacttgcaccacaaccgtgtgtgggagaaactttacattctagcctcccacgagacagtgaactgtttgtgcctgaagaggggagcagcgagaaggagagcgaggacgcgccaaaaacatctcctccgacgcctgggaaacatggtttggaacagactggggaggaaaaagtgatggtgactgttcctgacaaaaatccaccttgtccttgctgtggtacccgggtaaactctgtgttgaatctgattgaacatctgaaagtgtcacacgggaaaaggggggtttgttttcggtgtgcaaaatgtggaaaggaaaatagtaactatcacagtgttgtttgtcattttaagaaatgcaggggtccagagacggagaaagccccagctggggagtggatttgtgaggtatgcaacagagattttacaaccaaaattggcctgggacaacacaagagattggcacacccagcagtgagaaatcaggaaaggatcgttgcttcccaaccgaaagaaacatcaaatagaggtgctcacaaaaggtgctggacaaaggaggaggaagaattactaataagactggaggctcagttcgagggaaacaaaaatattaataagcttattgcagaacacataaccaccaaaacagctaagcagatcagtgacaaaaggcgattgctgtccagaaagccagcagaggagccacgtgaggagcctggaacgtgtcatcacaccaggagagcagctgcgagcctgagaacggagcctgagatgagtcatcacgcccaggcagaggacagagataatggacctgggagacgccctctgccaggcagggcagctgccggagggagaacaatggacgagataagacgccaccctgataagggcaacggacagcagagacccaccaagcaaaaatcagaagaacagctgcaggcttactataaaaagacactagaggaacgactttcagctggggcacttaacaccttcccccgagcattcaagcaggtaatggaaggccgggatataaagctagtaatcaatcagacagcgcaggactgcttcggatgcctggaatccataagccaaataagaacggcaacccgagataaaaaggacacggtgacccgggagaaacacccaaagaaaccttttcagaagtggatgaagaagagagcaatcaaaaaaggtaattatcttcggttccagcgtttattttatcttgatagagggaaactggctaaaatcattttagatgatattgaatgcttgtcttgtgacataccactcagtgaaatttattcggtttttaaaacaagatgggaaacaactggtagctttaaaagccttggggactttaaaacttacgggaaggctgacaacactgccttcagagaattaattacggctaaagaaattgagaaaaatgtgcaggaaatgagcaaaggctcggctcccggtccagacgggattactcttggggacgtcgtaaagatggatcccgagttttcccggaccatggagattttcaatttatggttaacaactggtaaaatcccggacatggtgagggggtgcagaaccgttttgattccaaaatcatcaaagccggatcgtttgaaagacattaataactggagacctatcacgatcggttccatcttgctgagactgttctccaggattgtaacagctaggctgagcaaagcgtgccccctgaacccaaggcaaagaggctttatcagagcggcgggatgctctgaaaacttaaaactcctgcaaactataatttggtcggccaaaagagaacacagaccactgggtgttgtattcgtggacatcgccaaggcttttgacaccgtaagccaccagcacatcattcatgctttgcagcaaagagaggtggatccccacatcgtcggtctggtgagcaatatgtacgagaacatcagtacgtatatcaccacaaagaggaacacacacacagacaaaatccagatccgggttggagtaaagcagggtgacccgatgtcgccccttttatttaacctggcaatggaccctctattatgcaagctggaagagagtggcaaaggataccaccgaggacagagcagcatcacagcgatggcatttgcagacgatctggttttgctgagcgactcctgggaaaatatgaatacaaatattagcatactggagaccttctgcaatctgaccggactcaaaacacaggggcaaaagtgccacggcttttacatcaagccgacaaagaagtcttacaccatcaatgactgcgctgcctggactatcaacggcacacccctgaacatgatcgaccccggcgaatctgagaaatacctcggcctgcagtttgacccgtggattggaatagcaaggtccggtctctccacaaaactagatttttggcttcagcggatcgatcaagcaccacttaaacctctgcagaaaactgatattctcaaaacatacaccatccctcggctgatctacatagctgaccactcagaagtgaaaagcgcactactcgaaacccttgaccagaagatccggacagcggtcaaggaatggcttcacctacctccgtgcacctgcgatgccatcctgtactcgagcacgagagacggcggtttgggcatcaccaaattggcaggactgatccccagcgtgcaggccaagagactgcatcggatcgcacagtcatctgacgatacgatgaaatgcttcatggaaaaagagaaaatggaacagctgcataagaaattgtggattcaagctggaggggacagagagaacataccctcgatttgggaagcaccaccgtcgagtgaaccaccaaacaacgtgagcacaaattcggaatgggaagcaccgacccagaaagataaatttccaaagccttgcaattggaggaaaaacgaattcaaaaaatggaccaaattggcatcccaaggccgcggaattgtaaattttgaaagagacaaaattagtaaccattggatccaatactacagacgcatacctcacaggaaactcctcactgcactacaactcagggccaacgtttaccccacgagagaatttctagccaggggtagacaagaccaatacatcaaggcgtgtaggcactgcgatgcggacaacgaatcctgcgcccacatcatcggcaactgcccagtgacacaggacgcccgaatcaagaggcacaattacatctgcgaactgcttctcgaggaggcgaagaagaaggactgggtagtgttcaaggaaccgcacataagggattccaacaaggaactgtacaaacctgacctgatatttgtgaaggatgggcgtgcacttgtcgtggatgtgacagtacggtatgaagcagccaaatcatcgctggaggaagccgctgcagagaaagtgagaaagtacaaacacctggaaacggaagtaagacatctcacgaatgcaaaggacgttacttttgtgggctttcccctaggagcgcgggggaaatggcaccaagataactttaaacttttgactgagcttggcctctccaaatcgaggcaagtgaaaatggcagagactttttccacagtagcgctcttttcatctgtggacattgtacatatgtttgccagtagggccagaaaatctatggttatgtgataataggctgccttctgcggggcttgccttctggccatgcccttcttctctcccttgcacctgtacctcttggtctttgaataaagcctgagtaggaaggaccggtaaaaaaaaaaaaaaaaaaaaaaaaaaaaaaacgttgactaaaaaaaaaaaaaaaaaaaaaaaaaaaaaaaaaaaaaaaaaaaaaaaaaaaaaaaaaaaaaaaaaaaaaa

SEQ ID NO: 11010 - DNA, 5264 bp, synthetic construct; identical to SEQ ID NO: 10962
  source 1..5264: mol_type = other DNA

SEQ ID NO: 11011 - DNA, 5264 bp, synthetic construct
  source 1..5264: mol_type = other DNA
gaaataagagagaaaagaagagtaagaagaaatataagagaattcgccaccatggcccctaagaaaaagcggaaggtgaatatcagcggctctagctgcggcagccccaacagcgccgacaccagcagcgacttcaaggacctgtggaccaagctgaaggaatgccacgaccgggaagtgcagggactccaggtgaaggtcaccaaactcaagcaagaaagaatcctggacgcccagagactggaagaattcttcaccaagaaccagcagctgagagagcagcagaaagtgctgcacgagacaatcaaggttctggaagatagactgcgggccggcctgtgcgacagatgcgccgtgaccgaggaacacatgcgcaaaaagcagcaggagttcgagaacattagacagcaaaatctgaaattgatcacagagctgatgaacgagagaaacacactgcaggaggagaacaagaagctgagcgagcagctgcaacagaagatcgagaatgatcagcaacaccaggccgctgagctggaatgtgaagaggacgtgatccccgacagcccaatcacagctttcagcttttctggcgtgaacagactgaggcggaaggaaaacccccacgtgcggtacatcgagcagacccataccaagctggaacacagcgtgtgtgccaacgagatgagaaaggtgtccaagtcctccacccatccccagcacaaccctaacgaaaatgagatcctggtggctgatacctacgaccagtctcagagccctatggccaaggcccacggcaccagctcttatacccctgataagagctccttcaacctggccaccgtggtggccgagacactgggcctgggcgtgcaggaggaaagcgagacacagggcccaatgagccctctgggagatgagctgtaccactgcctggaaggcaaccacaagaaacagccttttgagtccggctccgagactcctggaacaagcgagagcgctacacctgagggcagccctaagagaaaggtgtccagcgccgagggcgctgccaaggaagagcctaaacggagaagcgccagactgagcgccaagccccccgccaaggtggaagccaagcctaagaaggccgccgctaaggacaagagcagcgataagaaagtccagaccaagggcaagcggggcgccaaaggcaaacaggccgaggtggccaaccaggagacaaaggaagatctgcctgctgagaacggcgaaaccaagaccgaggaatctccagcttctgacgaggccggagagaaggaggccaaaagcgacagcggctctgagacacctggaacaagcgagagcgccaccccggaatcctatgaacaacttgcaccacaaccgtgtgtgggagaaactttacattctagcctcccacgagacagtgaactgtttgtgcctgaagaggggagcagcgagaaggagagcgaggacgcgccaaaaacatctcctccgacgcctgggaaacatggtttggaacagactggggaggaaaaagtgatggtgactgttcctgacaaaaatccaccttgtccttgctgtggtacccgggtaaactctgtgttgaatctgattgaacatctgaaagtgtcacacgggaaaaggggggtttgttttcggtgtgcaaaatgtggaaaggaaaatagtaactatcacagtgttgtttgtcattttaagaaatgcaggggtccagagacggagaaagccccagctggggagtggatttgtgaggtatgcaacagagattttacaaccaaaattggcctgggacaacacaagagattggcacacccagcagtgagaaatcaggaaaggatcgttgcttcccaaccgaaagaaacatcaaatagaggtgctcacaaaaggtgctggacaaaggaggaggaagaattactaataagactggaggctcagttcgagggaaacaaaaatattaataagcttattgcagaacacataaccaccaaaacagctaagcagatcagtgacaaaaggcgattgctgtccagaaagccagcagaggagccacgtgaggagcctggaacgtgtcatcacaccaggagagcagctgcgagcctgagaacggagcctgagatgagtcatcacgcccaggcagaggacagagataatggacctgggagacgccctctgccaggcagggcagctgccggagggagaacaatggacgagataagacgccaccctgataagggcaacggacagcagagacccaccaagcaaaaatcagaagaacagctgcaggcttactataaaaagacactagaggaacgactttcagctggggcacttaacaccttcccccgagcattcaagcaggtaatggaaggccgggatataaagctagtaatcaatcagacagcgcaggactgcttcggatgcctggaatccataagccaaataagaacggcaacccgagataaaaaggacacggtgacccgggagaaacacccaaagaaaccttttcagaagtggatgaagaagagagcaatcaaaaaaggtaattatcttcggttccagcgtttattttatcttgatagagggaaactggctaaaatcattttagatgatattgaatgcttgtcttgtgacataccactcagtgaaatttattcggtttttaaaacaagatgggaaacaactggtagctttaaaagccttggggactttaaaacttacgggaaggctgacaacactgccttcagagaattaattacggctaaagaaattgagaaaaatgtgcaggaaatgagcaaaggctcggctcccggtccagacgggattactcttggggacgtcgtaaagatggatcccgagttttcccggaccatggagattttcaatttatggttaacaactggtaaaatcccggacatggtgagggggtgcagaaccgttttgattccaaaatcatcaaagccggatcgtttgaaagacattaataactggagacctatcacgatcggttccatcttgctgagactgttctccaggattgtaacagctaggctgagcaaagcgtgccccctgaacccaaggcaaagaggctttatcagagcggcgggatgctctgaaaacttaaaactcctgcaaactataatttggtcggccaaaagagaacacagaccactgggtgttgtattcgtggacatcgccaaggcttttgacaccgtaagccaccagcacatcattcatgctttgcagcaaagagaggtggatccccacatcgtcggtctggtgagcaatatgtacgagaacatcagtacgtatatcaccacaaagaggaacacacacacagacaaaatccagatccgggttggagtaaagcagggtgacccgatgtcgccccttttatttaacctggcaatggaccctctattatgcaagctggaagagagtggcaaaggataccaccgaggacagagcagcatcacagcgatggcatttgcagacgatctggttttgctgagcgactcctgggaaaatatgaatacaaatattagcatactggagaccttctgcaatctgaccggactcaaaacacaggggcaaaagtgccacggcttttacatcaagccgacaaagaagtcttacaccatcaatgactgcgctgcctggactatcaacggcacacccctgaacatgatcgaccccggcgaatctgagaaatacctcggcctgcagtttgacccgtggattggaatagcaaggtccggtctctccacaaaactagatttttggcttcagcggatcgatcaagcaccacttaaacctctgcagaaaactgatattctcaaaacatacaccatccctcggctgatctacatagctgaccactcagaagtgaaaagcgcactactcgaaacccttgaccagaagatccggacagcggtcaaggaatggcttcacctacctccgtgcacctgcgatgccatcctgtactcgagcacgagagacggcggtttgggcatcaccaaattggcaggactgatccccagcgtgcaggcccgtagactgcatcggatcgcacagtcatctgacgatacgatgaaatgcttcatggaaaaagagaaaatggaacagctgcataagaaattgtggattcaagctggaggggacagagagaacataccctcgatttgggaagcaccaccgtcgagtgaaccaccaaacaacgtgagcacaaattcggaatggcaggcaccgacccagaaagataaatttccaaagccttgcaattggaggaaaaacgaattcaaaaaatggaccaaattggcatcccaaggccgcggaattgtaaattttgaaagagacaaaattagtaaccattggatccaatactacagacgcatacctcacaggaaactcctcactgcactacaactcagggccaacgtttaccccacgagagaatttctagccaggggtagacaagaccaatacatcaaggcgtgtaggcactgcgatgcggacaacgaatcctgcgcccacatcatcggcaactgcccagtgacacaggacgcccgaatcaagaggcacaattacatctgcgaactgcttctcgaggaggcgaagaagaaggactgggtagtgttcaaggaaccgcacataagggattccaacaaggaactgtacaaacctgacctgatatttgtgaaggatgggcgtgcacttgtcgtggatgtgacagtacggtatgaagcagccaaatcatcgctggaggaagccgctgcagagaaagtgagaaagtacaaacacctggaaacggaagtaagacatctcacgaatgcaaaggacgttacttttgtgggctttcccctaggagcgcgggggaaatggcaccaagataactttaaacttttgactgagcttggcctctccaaatcgaggcaagtgaaaatggcagagactttttccacagtagcgctcttttcatctgtggacattgtacatatgtttgccagtagggccagaaaatctatggttatgtgataataggctgccttctgcggggcttgccttctggccatgcccttcttctctcccttgcacctgtacctcttggtctttgaataaagcctgagtaggaaggaccggtaaaaaaaaaaaaaaaaaaaaaaaaaaaaaaacgttgactaaaaaaaaaaaaaaaaaaaaaaaaaaaaaaaaaaaaaaaaaaaaaaaaaaaaaaaaaaaaaaaaaaaaaa

SEQ ID NO: 11012 - DNA, 5264 bp, synthetic construct
  source 1..5264: mol_type = other DNA
gaaataagagagaaaagaagagtaagaagaaatataagagaattcgccaccatggcccctaagaaaaagcggaaggtgaatatcagcggctctagctgcggcagccccaacagcgccgacaccagcagcgacttcaaggacctgtggaccaagctgaaggaatgccacgaccgggaagtgcagggactccaggtgaaggtcaccaaactcaagcaagaaagaatcctggacgcccagagactggaagaattcttcaccaagaaccagcagctgagagagcagcagaaagtgctgcacgagacaatcaaggttctggaagatagactgcgggccggcctgtgcgacagatgcgccgtgaccgaggaacacatgcgcaaaaagcagcaggagttcgagaacattagacagcaaaatctgaaattgatcacagagctgatgaacgagagaaacacactgcaggaggagaacaagaagctgagcgagcagctgcaacagaagatcgagaatgatcagcaacaccaggccgctgagctggaatgtgaagaggacgtgatccccgacagcccaatcacagctttcagcttttctggcgtgaacagactgaggcggaaggaaaacccccacgtgcggtacatcgagcagacccataccaagctggaacacagcgtgtgtgccaacgagatgagaaaggtgtccaagtcctccacccatccccagcacaaccctaacgaaaatgagatcctggtggctgatacctacgaccagtctcagagccctatggccaaggcccacggcaccagctcttatacccctgataagagctccttcaacctggccaccgtggtggccgagacactgggcctgggcgtgcaggaggaaagcgagacacagggcccaatgagccctctgggagatgagctgtaccactgcctggaaggcaaccacaagaaacagccttttgagtccggctccgagactcctggaacaagcgagagcgctacacctgagggcagccctaagagaaaggtgtccagcgccgagggcgctgccaaggaagagcctaaacggagaagcgccagactgagcgccaagccccccgccaaggtggaagccaagcctaagaaggccgccgctaaggacaagagcagcgataagaaagtccagaccaagggcaagcggggcgccaaaggcaaacaggccgaggtggccaaccaggagacaaaggaagatctgcctgctgagaacggcgaaaccaagaccgaggaatctccagcttctgacgaggccggagagaaggaggccaaaagcgacagcggctctgagacacctggaacaagcgagagcgccaccccggaatcctatgaacaacttgcaccacaaccgtgtgtgggagaaactttacattctagcctcccacgagacagtgaactgtttgtgcctgaagaggggagcagcgagaaggagagcgaggacgcgccaaaaacatctcctccgacgcctgggaaacatggtttggaacagactggggaggaaaaagtgatggtgactgttcctgacaaaaatccaccttgtccttgctgtggtacccgggtaaactctgtgttgaatctgattgaacatctgaaagtgtcacacgggaaaaggggggtttgttttcggtgtgcaaaatgtggaaaggaaaatagtaactatcacagtgttgtttgtcattttaagaaatgcaggggtccagagacggagaaagccccagctggggagtggatttgtgaggtatgcaacagagattttacaaccaaaattggcctgggacaacacaagagattggcacacccagcagtgagaaatcaggaaaggatcgttgcttcccaaccgaaagaaacatcaaatagaggtgctcacaaaaggtgctggacaaaggaggaggaagaattactaataagactggaggctcagttcgagggaaacaaaaatattaataagcttattgcagaacacataaccaccaaaacagctaagcagatcagtgacaaaaggcgattgctgtccagaaagccagcagaggagccacgtgaggagcctggaacgtgtcatcacaccaggagagcagctgcgagcctgagaacggagcctgagatgagtcatcacgcccaggcagaggacagagataatggacctgggagacgccctctgccaggcagggcagctgccggagggagaacaatggacgagataagacgccaccctgataagggcaacggacagcagagacccaccaagcaaaaatcagaagaacagctgcaggcttactataaaaagacactagaggaacgactttcagctggggcacttaacaccttcccccgagcattcaagcaggtaatggaaggccgggatataaagctagtaatcaatcagacagcgcaggactgcttcggatgcctggaatccataagccaaataagaacggcaacccgagataaaaaggacacggtgacccgggagaaacacccaaagaaaccttttcagaagtggatgaagaagagagcaatcaaaaaaggtaattatcttcggttccagcgtttattttatcttgatagagggaaactggctaaaatcattttagatgatattgaatgcttgtcttgtgacataccactcagtgaaatttattcggtttttaaaacaagatgggaaacaactggtagctttaaaagccttggggactttaaaacttacgggaaggctgacaacactgccttcagagaattaattacggctaaagaaattgagaaaaatgtgcaggaaatgagcaaaggctcggctcccggtccagacgggattactcttggggacgtcgtaaagatggatcccgagttttcccggaccatggagattttcaatttatggttaacaactggtaaaatcccggacatggtgagggggtgcagaaccgttttgattccaaaatcatcaaagccggatcgtttgaaagacattaataactggagacctatcacgatcggttccatcttgctgagactgttctccaggattgtaacagctaggctgagcaaagcgtgccccctgaacccaaggcaaagaggctttatcagagcggcgggatgctctgaaaacttaaaactcctgcaaactataatttggtcggccaaaagagaacacagaccactgggtgttgtattcgtggacatcgccaaggcttttgacaccgtaagccaccagcacatcattcatgctttgcagcaaagagaggtggatccccacatcgtcggtctggtgagcaatatgtacgagaacatcagtacgtatatcaccacaaagaggaacacacacacagacaaaatccagatccgggttggagtaaagcagggtgacccgatgtcgccccttttatttaacctggcaatggaccctctattatgcaagctggaagagagtggcaaaggataccaccgaggacagagcagcatcacagcgatggcatttgcagacgatctggttttgctgagcgactcctgggaaaatatgaatacaaatattagcatactggagaccttctgcaatctgaccggactcaaaacacaggggcaaaagtgccacggcttttacatcaagccgacaaagaagtcttacaccatcaatgactgcgctgcctggactatcaacggcacacccctgaacatgatcgaccccggcgaatctgagaaatacctcggcctgcagtttgacccgtggattggaatagcaaggtccggtctctccacaaaactagatttttggcttcagcggatcgatcaagcaccacttaaacctctgcagaaaactgatattctcaaaacatacaccatccctcggctgatctacatagctgaccactcagaagtgaaaagcgcactactcgaaacccttgaccagaagatccggacagcggtcaaggaatggcttcacctacctccgtgcacctgcgatgccatcctgtactcgagcacgagagacggcggtttgggcatcaccaaattggcaggactgatccccagcgtgcaggcccgtagactgcatcggatcgcacagtcatctgacgatacgatgaaatgcttcatggaaaaagagaaaatggaacagctgcataagaaattgtggattcaagctggaggggacagagagaacataccctcgatttgggaagcaccaccgtcgagtgaaccaccaaacaacgtgagcacaaattcggaatgggaagcaccgaagcagaaagataaatttccaaagccttgcaattggaggaaaaacgaattcaaaaaatggaccaaattggcatcccaaggccgcggaattgtaaattttgaaagagacaaaattagtaaccattggatccaatactacagacgcatacctcacaggaaactcctcactgcactacaactcagggccaacgtttaccccacgagagaatttctagccaggggtagacaagaccaatacatcaaggcgtgtaggcactgcgatgcggacaacgaatcctgcgcccacatcatcggcaactgcccagtgacacaggacgcccgaatcaagaggcacaattacatctgcgaactgcttctcgaggaggcgaagaagaaggactgggtagtgttcaaggaaccgcacataagggattccaacaaggaactgtacaaacctgacctgatatttgtgaaggatgggcgtgcacttgtcgtggatgtgacagtacggtatgaagcagccaaatcatcgctggaggaagccgctgcagagaaagtgagaaagtacaaacacctggaaacggaagtaagacatctcacgaatgcaaaggacgttacttttgtgggctttcccctaggagcgcgggggaaatggcaccaagataactttaaacttttgactgagcttggcctctccaaatcgaggcaagtgaaaatggcagagactttttccacagtagcgctcttttcatctgtggacattgtacatatgtttgccagtagggccagaaaatctatggttatgtgataataggctgccttctgcggggcttgccttctggccatgcccttcttctctcccttgcacctgtacctcttggtctttgaataaagcctgagtaggaaggaccggtaaaaaaaaaaaaaaaaaaaaaaaaaaaaaaacgttgactaaaaaaaaaaaaaaaaaaaaaaaaaaaaaaaaaaaaaaaaaaaaaaaaaaaaaaaaaaaaaaaaaaaaaa

SEQ ID NO: 11013 - DNA, 5389 bp, synthetic construct
  source 1..5389: mol_type = other DNA
ggtctagttacaactgggcatcgctgcagagatcgcacctcctcgtggtcccgctggtagcccttcgaagggtgactaagtcgatctctgccccaggtacggagccgttgggactcaccagtccaacgtaactcctgcctaaattcggtgaaacaaattcctcggtaaaaagccccatggcccctaagaaaaagcggaaggtgaatatcagcggctctagctgcggcagccccaacagcgccgacaccagcagcgacttcaaggacctgtggaccaagctgaaggaatgccacgaccgggaagtgcagggactccaggtgaaggtcaccaaactcaagcaagaaagaatcctggacgcccagagactggaagaattcttcaccaagaaccagcagctgagagagcagcagaaagtgctgcacgagacaatcaaggttctggaagatagactgcgggccggcctgtgcgacagatgcgccgtgaccgaggaacacatgcgcaaaaagcagcaggagttcgagaacattagacagcaaaatctgaaattgatcacagagctgatgaacgagagaaacacactgcaggaggagaacaagaagctgagcgagcagctgcaacagaagatcgagaatgatcagcaacaccaggccgctgagctggaatgtgaagaggacgtgatccccgacagcccaatcacagctttcagcttttctggcgtgaacagactgaggcggaaggaaaacccccacgtgcggtacatcgagcagacccataccaagctggaacacagcgtgtgtgccaacgagatgagaaaggtgtccaagtcctccacccatccccagcacaaccctaacgaaaatgagatcctggtggctgatacctacgaccagtctcagagccctatggccaaggcccacggcaccagctcttatacccctgataagagctccttcaacctggccaccgtggtggccgagacactgggcctgggcgtgcaggaggaaagcgagacacagggcccaatgagccctctgggagatgagctgtaccactgcctggaaggcaaccacaagaaacagccttttgagtccggctccgagactcctggaacaagcgagagcgctacacctgagggcagccctaagagaaaggtgtccagcgccgagggcgctgccaaggaagagcctaaacggagaagcgccagactgagcgccaagccccccgccaaggtggaagccaagcctaagaaggccgccgctaaggacaagagcagcgataagaaagtccagaccaagggcaagcggggcgccaaaggcaaacaggccgaggtggccaaccaggagacaaaggaagatctgcctgctgagaacggcgaaaccaagaccgaggaatctccagcttctgacgaggccggagagaaggaggccaaaagcgacagcggctctgagacacctggaacaagcgagagcgccaccccggaatcctacgaacagctggctccccagccctgtgtaggcgagacattacacagcagcctgcccagagacagcgagctgttcgttccggaagagggctctagcgagaaggagagcgaggacgctcctaagaccagccctcctacccctggcaaacacggcctggagcaaacaggcgaggagaaggtcatggtgaccgtgcccgacaagaaccctccctgtccttgctgtggcacaagagtcaacagcgtgctgaacctcatcgagcacctgaaggtgtcccacggcaagagaggcgtgtgcttcagatgcgccaagtgcggcaaggagaacagcaactaccacagcgtcgtgtgccacttcaagaagtgcagaggccctgagaccgagaaggctcccgctggcgaatggatttgcgaggtgtgcaacagagacttcaccaccaagatcggcctgggccagcacaagcggttagctcaccctgctgtgagaaaccaggagagaatcgtggccagccagcccaaggagacaagcaacaggggcgctcacaagagatgctggaccaaggaggaagaggagctgctcatcagactggaggctcagttcgagggcaacaagaacatcaataagcttatcgccgagcacatcaccacaaagaccgccaagcagatcagcgacaagaggagactgctgtccagaaagcccgccgaggagcctagaatggaacctggtacatgtcaccacaccagaagagccgccgctagcctgagaaccgagcccgaaatgtctcaccacgctcaggccgaggacagagacaacggccctggcaggagacctcttcccggcagagctgctgctggaggcagaaccatggacgagatcaggagacaccccgataagggcaacggccagcagagacccacaaagcagaagtccgaggaacagctccaggcctactacaagaaaaccctggaggagagactgtccgcgggagctctgaacaccttccctagagccttcaaacaagtcatggagggcagagacatcaagctggtgatcaaccagaccgcccaggactgcttcggctgccttgagtctatcagccagatcaggaccgccacacgggataagaaggacaccgtcaccagagagaagcaccccaagaagcccttccagaaatggatgaagaagagggccatcaagaagggcaattacctgagattccagaggctgttctacctggacagaggcaagctggccaagatcatcctggacgacatcgagtgcctgagctgcgacatccctctgagcgagatctacagcgtgttcaagaccagatgggagaccaccggcagcttcaagtctctgggcgacttcaagacatacggcaaggccgacaacaccgccttcagagagctcatcaccgctaaggagatcgagaagaacgtgcaggagatgagcaagggcagcgctcctggccccgatggaattacactgggcgatgtggtgaagatggaccccgagttcagcagaacaatggagatcttcaacctgtggctcaccacaggcaagatccccgacatggtgagaggctgcagaaccgtgcttatccccaagagcagcaagcccgacagactgaaggatatcaacaactggagacccatcaccatcggcagcatcctgctgcggctgttcagccggattgtgaccgctagactgagcaaagcctgtcccctgaaccccagacagagaggcttcatcagagccgctggctgcagcgagaacctgaagctgctccagacaatcatctggagcgccaagagagagcacagacccctgggcgttgttttcgtggacatcgccaaggccttcgacaccgtgtcccatcagcacattatccacgccctgcagcagagggaggtcgaccctcatattgtgggcctggtgtccaacatgtacgagaacatctccacctatattacgaccaagagaaacacccacacagacaagatccagatccgggtcggcgtcaagcagggcgatcctatgtctcctctgctgttcaacctcgccatggaccctctgctctgcaagctcgaggagtctggaaagggctaccatagaggccaatcatcgatcaccgccatggccttcgccgacgacctggtgcttttaagcgacagctgggagaacatgaacaccaacatctctatcctggagacattctgcaaccttaccggcctgaaaacccagggccagaagtgtcatggcttctacatcaaacccaccaagaagagctacaccatcaacgactgcgccgcctggacaatcaacggcacccctctcaacatgatcgaccccggcgagtctgagaagtacctgggcctgcagttcgatccctggatcggcatcgctagaagcggcttgagcaccaagctggacttttggctccaacgcatagaccaggcccccctgaagcctcttcagaaactggacattttgaaaacttatacgatccccagactcatctacatcgccgaccactccgaggtcaagagcgctctgctggaaaccctggaccagaaaatcagaaccgccgtcaaggaatggctgcacctgcccccttgcacatgcgacgctatcctgtacagcagcaccagggacggcggcttaggaatcaccaagttagccggcctcatccccagcgtgcaggctaggagactccacagaatcgcccagagcagcgacgacaccatgaagtgcttcatggagaaggaaaagatggagcagctgcacaagaagctgtggatccaagcgggcggagatcgtgagaacattcccagcatctgggaggcccctcccagctcagaacctcccaataacgtgtccaccaattctgaatgggaggctcccacccagaaggataagtttcccaagccctgcaactggcggaagaacgagttcaaaaaatggacaaagctggctagccagggcaggggcatcgtgaacttcgaaagggacaagattagcaaccactggatccagtactacagaagaatcccccacagaaagctcctcaccgccctccagttacgtgcaaacgtgtacccaaccagagaattcctggccagaggcagacaggaccagtacatcaaggcctgccggcactgcgatgccgataacgagagctgtgctcacatcatcggcaactgccccgtcacccaggacgccagaatcaagagacacaactacatctgcgagttacttctggaggaagccaagaagaaggattgggttgtgttcaaggagccccacatcagagactccaacaaggagctgtacaagccagacctcatcttcgtgaaggacggcagagccctggtggtggacgtcaccgtcagatacgaggctgctaagtccagccttgaggaggctgccgccgagaaagtgcggaagtacaagcacctggaaacagaggtcagacacctcaccaacgccaaggacgttaccttcgtgggcttccccctaggtgctagaggcaaatggcaccaggacaacttcaagctgcttaccgagctgggcctctccaagagccgacaggttaagatggccgagaccttcagcaccgtcgccctgttctcttctgtggacattgtgcacatgttcgcctccagagccagaaagagcatggtgatgtgataataggctgccttctgcggggcttgccttctggccatgcccttcttctctcccttgcacctgtacctcttggtctttgaataaagcctgagtaggaaggaccggtaaaaaaaaaaaaaaaaaaaaaaaaaaaaaaacgttgactaaaaaaaaaaaaaaaaaaaaaaaaaaaaaaaaaaaaaaaaaaaaaaaaaaaaaaaaaaaaaaaaaaaaaa

SEQ ID NO: 11014 - DNA, 5614 bp, synthetic construct
  source 1..5614: mol_type = other DNA
ggtctagttacaactgggcatcgctgcagagatcgcacctcctcgtggtcccgctggtagcccttcgaagggtgactaagtcgatctctgccccaggtacggagccgttgggactcaccagtccaacgtaactcctgcctaaattcggtgaaacaaattcctcggtaaaaagccccatggcccctaagaaaaagcggaaggtgtctaccaaccccaagcctcagaaaaagaacaagcggaacaccaatagacggcctcaagacgtgaagttccccggcggcggacagatcgtgggcggagtctacctgctgcctcgcagaggcccaagactgggcgtgcgggccacaagaaagaccagcgagcggagccagcctagatccggctccgagactcctggaacaagcgagagcgctacacctgagggcagcaatatcagcggctctagctgcggcagccccaacagcgccgacaccagcagcgacttcaaggacctgtggaccaagctgaaggaatgccacgaccgggaagtgcagggactccaggtgaaggtcaccaaactcaagcaagaaagaatcctggacgcccagagactggaagaattcttcaccaagaaccagcagctgagagagcagcagaaagtgctgcacgagacaatcaaggttctggaagatagactgcgggccggcctgtgcgacagatgcgccgtgaccgaggaacacatgcgcaaaaagcagcaggagttcgagaacattagacagcaaaatctgaaattgatcacagagctgatgaacgagagaaacacactgcaggaggagaacaagaagctgagcgagcagctgcaacagaagatcgagaatgatcagcaacaccaggccgctgagctggaatgtgaagaggacgtgatccccgacagcccaatcacagctttcagcttttctggcgtgaacagactgaggcggaaggaaaacccccacgtgcggtacatcgagcagacccataccaagctggaacacagcgtgtgtgccaacgagatgagaaaggtgtccaagtcctccacccatccccagcacaaccctaacgaaaatgagatcctggtggctgatacctacgaccagtctcagagccctatggccaaggcccacggcaccagctcttatacccctgataagagctccttcaacctggccaccgtggtggccgagacactgggcctgggcgtgcaggaggaaagcgagacacagggcccaatgagccctctgggagatgagctgtaccactgcctggaaggcaaccacaagaaacagccttttgagtccggctccgagactcctggaacaagcgagagcgctacacctgagggcagccctaagagaaaggtgtccagcgccgagggcgctgccaaggaagagcctaaacggagaagcgccagactgagcgccaagccccccgccaaggtggaagccaagcctaagaaggccgccgctaaggacaagagcagcgataagaaagtccagaccaagggcaagcggggcgccaaaggcaaacaggccgaggtggccaaccaggagacaaaggaagatctgcctgctgagaacggcgaaaccaagaccgaggaatctccagcttctgacgaggccggagagaaggaggccaaaagcgacagcggctctgagacacctggaacaagcgagagcgccaccccggaatcctacgaacagctggctccccagccctgtgtaggcgagacattacacagcagcctgcccagagacagcgagctgttcgttccggaagagggctctagcgagaaggagagcgaggacgctcctaagaccagccctcctacccctggcaaacacggcctggagcaaacaggcgaggagaaggtcatggtgaccgtgcccgacaagaaccctccctgtccttgctgtggcacaagagtcaacagcgtgctgaacctcatcgagcacctgaaggtgtcccacggcaagagaggcgtgtgcttcagatgcgccaagtgcggcaaggagaacagcaactaccacagcgtcgtgtgccacttcaagaagtgcagaggccctgagaccgagaaggctcccgctggcgaatggatttgcgaggtgtgcaacagagacttcaccaccaagatcggcctgggccagcacaagcggttagctcaccctgctgtgagaaaccaggagagaatcgtggccagccagcccaaggagacaagcaacaggggcgctcacaagagatgctggaccaaggaggaagaggagctgctcatcagactggaggctcagttcgagggcaacaagaacatcaataagcttatcgccgagcacatcaccacaaagaccgccaagcagatcagcgacaagaggagactgctgtccagaaagcccgccgaggagcctagaatggaacctggtacatgtcaccacaccagaagagccgccgctagcctgagaaccgagcccgaaatgtctcaccacgctcaggccgaggacagagacaacggccctggcaggagacctcttcccggcagagctgctgctggaggcagaaccatggacgagatcaggagacaccccgataagggcaacggccagcagagacccacaaagcagaagtccgaggaacagctccaggcctactacaagaaaaccctggaggagagactgtccgcgggagctctgaacaccttccctagagccttcaaacaagtcatggagggcagagacatcaagctggtgatcaaccagaccgcccaggactgcttcggctgccttgagtctatcagccagatcaggaccgccacacgggataagaaggacaccgtcaccagagagaagcaccccaagaagcccttccagaaatggatgaagaagagggccatcaagaagggcaattacctgagattccagaggctgttctacctggacagaggcaagctggccaagatcatcctggacgacatcgagtgcctgagctgcgacatccctctgagcgagatctacagcgtgttcaagaccagatgggagaccaccggcagcttcaagtctctgggcgacttcaagacatacggcaaggccgacaacaccgccttcagagagctcatcaccgctaaggagatcgagaagaacgtgcaggagatgagcaagggcagcgctcctggccccgatggaattacactgggcgatgtggtgaagatggaccccgagttcagcagaacaatggagatcttcaacctgtggctcaccacaggcaagatccccgacatggtgagaggctgcagaaccgtgcttatccccaagagcagcaagcccgacagactgaaggatatcaacaactggagacccatcaccatcggcagcatcctgctgcggctgttcagccggattgtgaccgctagactgagcaaagcctgtcccctgaaccccagacagagaggcttcatcagagccgctggctgcagcgagaacctgaagctgctccagacaatcatctggagcgccaagagagagcacagacccctgggcgttgttttcgtggacatcgccaaggccttcgacaccgtgtcccatcagcacattatccacgccctgcagcagagggaggtcgaccctcatattgtgggcctggtgtccaacatgtacgagaacatctccacctatattacgaccaagagaaacacccacacagacaagatccagatccgggtcggcgtcaagcagggcgatcctatgtctcctctgctgttcaacctcgccatggaccctctgctctgcaagctcgaggagtctggaaagggctaccatagaggccaatcatcgatcaccgccatggccttcgccgacgacctggtgcttttaagcgacagctgggagaacatgaacaccaacatctctatcctggagacattctgcaaccttaccggcctgaaaacccagggccagaagtgtcatggcttctacatcaaacccaccaagaagagctacaccatcaacgactgcgccgcctggacaatcaacggcacccctctcaacatgatcgaccccggcgagtctgagaagtacctgggcctgcagttcgatccctggatcggcatcgctagaagcggcttgagcaccaagctggacttttggctccaacgcatagaccaggcccccctgaagcctcttcagaaactggacattttgaaaacttatacgatccccagactcatctacatcgccgaccactccgaggtcaagagcgctctgctggaaaccctggaccagaaaatcagaaccgccgtcaaggaatggctgcacctgcccccttgcacatgcgacgctatcctgtacagcagcaccagggacggcggcttaggaatcaccaagttagccggcctcatccccagcgtgcaggctaggagactccacagaatcgcccagagcagcgacgacaccatgaagtgcttcatggagaaggaaaagatggagcagctgcacaagaagctgtggatccaagcgggcggagatcgtgagaacattcccagcatctgggaggcccctcccagctcagaacctcccaataacgtgtccaccaattctgaatgggaggctcccacccagaaggataagtttcccaagccctgcaactggcggaagaacgagttcaaaaaatggacaaagctggctagccagggcaggggcatcgtgaacttcgaaagggacaagattagcaaccactggatccagtactacagaagaatcccccacagaaagctcctcaccgccctccagttacgtgcaaacgtgtacccaaccagagaattcctggccagaggcagacaggaccagtacatcaaggcctgccggcactgcgatgccgataacgagagctgtgctcacatcatcggcaactgccccgtcacccaggacgccagaatcaagagacacaactacatctgcgagttacttctggaggaagccaagaagaaggattgggttgtgttcaaggagccccacatcagagactccaacaaggagctgtacaagccagacctcatcttcgtgaaggacggcagagccctggtggtggacgtcaccgtcagatacgaggctgctaagtccagccttgaggaggctgccgccgagaaagtgcggaagtacaagcacctggaaacagaggtcagacacctcaccaacgccaaggacgttaccttcgtgggcttccccctaggtgctagaggcaaatggcaccaggacaacttcaagctgcttaccgagctgggcctctccaagagccgacaggttaagatggccgagaccttcagcaccgtcgccctgttctcttctgtggacattgtgcacatgttcgcctccagagccagaaagagcatggtgatgtgataataggctgccttctgcggggcttgccttctggccatgcccttcttctctcccttgcacctgtacctcttggtctttgaataaagcctgagtaggaaggaccggtaaaaaaaaaaaaaaaaaaaaaaaaaaaaaaacgttgactaaaaaaaaaaaaaaaaaaaaaaaaaaaaaaaaaaaaaaaaaaaaaaaaaaaaaaaaaaaaaaaaaaaaaa

SEQ ID NO: 11015 - DNA, 6655 bp, synthetic construct
  source 1..6655: mol_type = other DNA
ggtctagttacaactgggcatcgctgcagagatcgcacctcctcgtggtcccgctggtagcccttcgaagggtgactaagtcgatctctgccccaggtacggagccgttgggactcaccagtccaacgtaactcctgcctaaattcggtgaaacaaattcctcggtaaaaagccccatggcccctaagaaaaagcggaaggtgagcgccagccaggacagcagaagccgggacaacggccctgacggaatggagcctgagggagtgatcgaatccaactggaacgagatcgtggacagcttcgacgacatgaacctgagcgagagcctgctgagaggcatctacgcttacggcttcgagaagcctagcgccatccagcaaagagcaatcctgccatgcatcaagggctacgacgtcatcgcccaggcccagagcggcaccggcaaaaccgccaccttcgccatctctatcctgcagcagatcgagctggatctgaaagccacacaagcgttggtgctggcccccacaagagagctggcccagcagatccagaaggtggtgatggctctgggcgactacatgggcgcctcttgtcatgcctgcatcggcggcaccaatgtgcgggctgaagtgcagaagctccagatggaagctccccacatcattgtgggaacaccaggcagggtgttcgatatgctgaatcgccggtacctgtctcctaagtatatcaagatgttcgtgctggacgaggccgacgaaatgctgtctagaggtttcaaggaccagatctacgacatttttcagaaactgaacagcaacacccaggttgtgctgctgtcagccaccatgcctagcgatgtgctcgaggtgaccaagaagttcatgcgggaccctatcagaatcctggtgaagaaagaggagctgactctggagggcatcagacagttctacatcaacgtggaaagagaggaatggaagctggacaccctgtgcgacctgtatgagacactgaccatcacccaggccgtgatctttatcaataccagaagaaaggtcgactggctgacagagaagatgcacgcccgggacttcaccgtgtccgccatgcacggcgatatggaccaaaaggaacgggatgtgattatgagagagttccggtccggcagcagccgggtgctgatcacaacagatctgctggctagaggaatcgatgtgcagcaggtgagcctggtcatcaactacgatctgcctaccaacagagaaaattacatccacagaatcggcagaggcggaagattcggcagaaagggcgtggccataaacatggtgacagaggaagataagcggacccttagagacatcgaaaccttttacaacaccagcatcgaggaaatgcccctgaacgtggccgacctgatctccggctccgagactcctggaacaagcgagagcgctacacctgagggcagcaatatcagcggctctagctgcggcagccccaacagcgccgacaccagcagcgacttcaaggacctgtggaccaagctgaaggaatgccacgaccgggaagtgcagggactccaggtgaaggtcaccaaactcaagcaagaaagaatcctggacgcccagagactggaagaattcttcaccaagaaccagcagctgagagagcagcagaaagtgctgcacgagacaatcaaggttctggaagatagactgcgggccggcctgtgcgacagatgcgccgtgaccgaggaacacatgcgcaaaaagcagcaggagttcgagaacattagacagcaaaatctgaaattgatcacagagctgatgaacgagagaaacacactgcaggaggagaacaagaagctgagcgagcagctgcaacagaagatcgagaatgatcagcaacaccaggccgctgagctggaatgtgaagaggacgtgatccccgacagcccaatcacagctttcagcttttctggcgtgaacagactgaggcggaaggaaaacccccacgtgcggtacatcgagcagacccataccaagctggaacacagcgtgtgtgccaacgagatgagaaaggtgtccaagtcctccacccatccccagcacaaccctaacgaaaatgagatcctggtggctgatacctacgaccagtctcagagccctatggccaaggcccacggcaccagctcttatacccctgataagagctccttcaacctggccaccgtggtggccgagacactgggcctgggcgtgcaggaggaaagcgagacacagggcccaatgagccctctgggagatgagctgtaccactgcctggaaggcaaccacaagaaacagccttttgagtccggctccgagactcctggaacaagcgagagcgctacacctgagggcagccctaagagaaaggtgtccagcgccgagggcgctgccaaggaagagcctaaacggagaagcgccagactgagcgccaagccccccgccaaggtggaagccaagcctaagaaggccgccgctaaggacaagagcagcgataagaaagtccagaccaagggcaagcggggcgccaaaggcaaacaggccgaggtggccaaccaggagacaaaggaagatctgcctgctgagaacggcgaaaccaagaccgaggaatctccagcttctgacgaggccggagagaaggaggccaaaagcgacagcggctctgagacacctggaacaagcgagagcgccaccccggaatcctacgaacagctggctccccagccctgtgtaggcgagacattacacagcagcctgcccagagacagcgagctgttcgttccggaagagggctctagcgagaaggagagcgaggacgctcctaagaccagccctcctacccctggcaaacacggcctggagcaaacaggcgaggagaaggtcatggtgaccgtgcccgacaagaaccctccctgtccttgctgtggcacaagagtcaacagcgtgctgaacctcatcgagcacctgaaggtgtcccacggcaagagaggcgtgtgcttcagatgcgccaagtgcggcaaggagaacagcaactaccacagcgtcgtgtgccacttcaagaagtgcagaggccctgagaccgagaaggctcccgctggcgaatggatttgcgaggtgtgcaacagagacttcaccaccaagatcggcctgggccagcacaagcggttagctcaccctgctgtgagaaaccaggagagaatcgtggccagccagcccaaggagacaagcaacaggggcgctcacaagagatgctggaccaaggaggaagaggagctgctcatcagactggaggctcagttcgagggcaacaagaacatcaataagcttatcgccgagcacatcaccacaaagaccgccaagcagatcagcgacaagaggagactgctgtccagaaagcccgccgaggagcctagaatggaacctggtacatgtcaccacaccagaagagccgccgctagcctgagaaccgagcccgaaatgtctcaccacgctcaggccgaggacagagacaacggccctggcaggagacctcttcccggcagagctgctgctggaggcagaaccatggacgagatcaggagacaccccgataagggcaacggccagcagagacccacaaagcagaagtccgaggaacagctccaggcctactacaagaaaaccctggaggagagactgtccgcgggagctctgaacaccttccctagagccttcaaacaagtcatggagggcagagacatcaagctggtgatcaaccagaccgcccaggactgcttcggctgccttgagtctatcagccagatcaggaccgccacacgggataagaaggacaccgtcaccagagagaagcaccccaagaagcccttccagaaatggatgaagaagagggccatcaagaagggcaattacctgagattccagaggctgttctacctggacagaggcaagctggccaagatcatcctggacgacatcgagtgcctgagctgcgacatccctctgagcgagatctacagcgtgttcaagaccagatgggagaccaccggcagcttcaagtctctgggcgacttcaagacatacggcaaggccgacaacaccgccttcagagagctcatcaccgctaaggagatcgagaagaacgtgcaggagatgagcaagggcagcgctcctggccccgatggaattacactgggcgatgtggtgaagatggaccccgagttcagcagaacaatggagatcttcaacctgtggctcaccacaggcaagatccccgacatggtgagaggctgcagaaccgtgcttatccccaagagcagcaagcccgacagactgaaggatatcaacaactggagacccatcaccatcggcagcatcctgctgcggctgttcagccggattgtgaccgctagactgagcaaagcctgtcccctgaaccccagacagagaggcttcatcagagccgctggctgcagcgagaacctgaagctgctccagacaatcatctggagcgccaagagagagcacagacccctgggcgttgttttcgtggacatcgccaaggccttcgacaccgtgtcccatcagcacattatccacgccctgcagcagagggaggtcgaccctcatattgtgggcctggtgtccaacatgtacgagaacatctccacctatattacgaccaagagaaacacccacacagacaagatccagatccgggtcggcgtcaagcagggcgatcctatgtctcctctgctgttcaacctcgccatggaccctctgctctgcaagctcgaggagtctggaaagggctaccatagaggccaatcatcgatcaccgccatggccttcgccgacgacctggtgcttttaagcgacagctgggagaacatgaacaccaacatctctatcctggagacattctgcaaccttaccggcctgaaaacccagggccagaagtgtcatggcttctacatcaaacccaccaagaagagctacaccatcaacgactgcgccgcctggacaatcaacggcacccctctcaacatgatcgaccccggcgagtctgagaagtacctgggcctgcagttcgatccctggatcggcatcgctagaagcggcttgagcaccaagctggacttttggctccaacgcatagaccaggcccccctgaagcctcttcagaaactggacattttgaaaacttatacgatccccagactcatctacatcgccgaccactccgaggtcaagagcgctctgctggaaaccctggaccagaaaatcagaaccgccgtcaaggaatggctgcacctgcccccttgcacatgcgacgctatcctgtacagcagcaccagggacggcggcttaggaatcaccaagttagccggcctcatccccagcgtgcaggctaggagactccacagaatcgcccagagcagcgacgacaccatgaagtgcttcatggagaaggaaaagatggagcagctgcacaagaagctgtggatccaagcgggcggagatcgtgagaacattcccagcatctgggaggcccctcccagctcagaacctcccaataacgtgtccaccaattctgaatgggaggctcccacccagaaggataagtttcccaagccctgcaactggcggaagaacgagttcaaaaaatggacaaagctggctagccagggcaggggcatcgtgaacttcgaaagggacaagattagcaaccactggatccagtactacagaagaatcccccacagaaagctcctcaccgccctccagttacgtgcaaacgtgtacccaaccagagaattcctggccagaggcagacaggaccagtacatcaaggcctgccggcactgcgatgccgataacgagagctgtgctcacatcatcggcaactgccccgtcacccaggacgccagaatcaagagacacaactacatctgcgagttacttctggaggaagccaagaagaaggattgggttgtgttcaaggagccccacatcagagactccaacaaggagctgtacaagccagacctcatcttcgtgaaggacggcagagccctggtggtggacgtcaccgtcagatacgaggctgctaagtccagccttgaggaggctgccgccgagaaagtgcggaagtacaagcacctggaaacagaggtcagacacctcaccaacgccaaggacgttaccttcgtgggcttccccctaggtgctagaggcaaatggcaccaggacaacttcaagctgcttaccgagctgggcctctccaagagccgacaggttaagatggccgagaccttcagcaccgtcgccctgttctcttctgtggacattgtgcacatgttcgcctccagagccagaaagagcatggtgatgtgataataggctgccttctgcggggcttgccttctggccatgcccttcttctctcccttgcacctgtacctcttggtctttgaataaagcctgagtaggaaggaccggtaaaaaaaaaaaaaaaaaaaaaaaaaaaaaaacgttgactaaaaaaaaaaaaaaaaaaaaaaaaaaaaaaaaaaaaaaaaaaaaaaaaaaaaaaaaaaaaaaaaaaaaaa

SEQ ID NO: 11016 - DNA, 6184 bp, synthetic construct
  source 1..6184: mol_type = other DNA
ggtctagttacaactgggcatcgctgcagagatcgcacctcctcgtggtcccgctggtagcccttcgaagggtgactaagtcgatctctgccccaggtacggagccgttgggactcaccagtccaacgtaactcctgcctaaattcggtgaaacaaattcctcggtaaaaagccccatggcccctaagaaaaagcggaaggtgatgggaactgcactaacaccgctcctgacgaagttcgccacgcgctacgagatgggtaccacgcctgaagaagtggcgaacacgctcaagcagacctgtttcaagggccaggtcaatgattcgcagatggtcgccctgctgatcgtggcagaccagtacaagcttaaccccttcaccaaggagttgtacgcattccccgacaagaacaacggcatcgtgccggttgttggtgtggatggctgggctcggatcatcaacgagaacccacagttcgatggcatggaattctcaatggaccagcagggaaccgaatgcacctgcaagatctatcggaaggaccgcagccatgccatcagcgcgactgagtacatggccgagtgcaagcggaacacccagccttggcagtcccatccgcgccggatgcttcgccacaaggcaatgatccagtgcgcacgcctcgcgttcgggttcgccggcatatacgaccaggacgaggccgagcggatcgttgaacgagacgtcactcccgcagagcagtacgaggacgtcagcgaggcgatctgcctgatcaaggactccccaacaatggaggacttgcaggcagcattcagcaatgcctggaaagcctataagacaaagggcgcgcgcgaccagcttacggcggccaaggaccagcggaagaaagaattgctggacgcccctatagacgttgaattcgaggagaccggcgatgatcgagcagcgtccggctccgagactcctggaacaagcgagagcgctacacctgagggcagcaatatcagcggctctagctgcggcagccccaacagcgccgacaccagcagcgacttcaaggacctgtggaccaagctgaaggaatgccacgaccgggaagtgcagggactccaggtgaaggtcaccaaactcaagcaagaaagaatcctggacgcccagagactggaagaattcttcaccaagaaccagcagctgagagagcagcagaaagtgctgcacgagacaatcaaggttctggaagatagactgcgggccggcctgtgcgacagatgcgccgtgaccgaggaacacatgcgcaaaaagcagcaggagttcgagaacattagacagcaaaatctgaaattgatcacagagctgatgaacgagagaaacacactgcaggaggagaacaagaagctgagcgagcagctgcaacagaagatcgagaatgatcagcaacaccaggccgctgagctggaatgtgaagaggacgtgatccccgacagcccaatcacagctttcagcttttctggcgtgaacagactgaggcggaaggaaaacccccacgtgcggtacatcgagcagacccataccaagctggaacacagcgtgtgtgccaacgagatgagaaaggtgtccaagtcctccacccatccccagcacaaccctaacgaaaatgagatcctggtggctgatacctacgaccagtctcagagccctatggccaaggcccacggcaccagctcttatacccctgataagagctccttcaacctggccaccgtggtggccgagacactgggcctgggcgtgcaggaggaaagcgagacacagggcccaatgagccctctgggagatgagctgtaccactgcctggaaggcaaccacaagaaacagccttttgagtccggctccgagactcctggaacaagcgagagcgctacacctgagggcagccctaagagaaaggtgtccagcgccgagggcgctgccaaggaagagcctaaacggagaagcgccagactgagcgccaagccccccgccaaggtggaagccaagcctaagaaggccgccgctaaggacaagagcagcgataagaaagtccagaccaagggcaagcggggcgccaaaggcaaacaggccgaggtggccaaccaggagacaaaggaagatctgcctgctgagaacggcgaaaccaagaccgaggaatctccagcttctgacgaggccggagagaaggaggccaaaagcgacagcggctctgagacacctggaacaagcgagagcgccaccccggaatcctacgaacagctggctccccagccctgtgtaggcgagacattacacagcagcctgcccagagacagcgagctgttcgttccggaagagggctctagcgagaaggagagcgaggacgctcctaagaccagccctcctacccctggcaaacacggcctggagcaaacaggcgaggagaaggtcatggtgaccgtgcccgacaagaaccctccctgtccttgctgtggcacaagagtcaacagcgtgctgaacctcatcgagcacctgaaggtgtcccacggcaagagaggcgtgtgcttcagatgcgccaagtgcggcaaggagaacagcaactaccacagcgtcgtgtgccacttcaagaagtgcagaggccctgagaccgagaaggctcccgctggcgaatggatttgcgaggtgtgcaacagagacttcaccaccaagatcggcctgggccagcacaagcggttagctcaccctgctgtgagaaaccaggagagaatcgtggccagccagcccaaggagacaagcaacaggggcgctcacaagagatgctggaccaaggaggaagaggagctgctcatcagactggaggctcagttcgagggcaacaagaacatcaataagcttatcgccgagcacatcaccacaaagaccgccaagcagatcagcgacaagaggagactgctgtccagaaagcccgccgaggagcctagaatggaacctggtacatgtcaccacaccagaagagccgccgctagcctgagaaccgagcccgaaatgtctcaccacgctcaggccgaggacagagacaacggccctggcaggagacctcttcccggcagagctgctgctggaggcagaaccatggacgagatcaggagacaccccgataagggcaacggccagcagagacccacaaagcagaagtccgaggaacagctccaggcctactacaagaaaaccctggaggagagactgtccgcgggagctctgaacaccttccctagagccttcaaacaagtcatggagggcagagacatcaagctggtgatcaaccagaccgcccaggactgcttcggctgccttgagtctatcagccagatcaggaccgccacacgggataagaaggacaccgtcaccagagagaagcaccccaagaagcccttccagaaatggatgaagaagagggccatcaagaagggcaattacctgagattccagaggctgttctacctggacagaggcaagctggccaagatcatcctggacgacatcgagtgcctgagctgcgacatccctctgagcgagatctacagcgtgttcaagaccagatgggagaccaccggcagcttcaagtctctgggcgacttcaagacatacggcaaggccgacaacaccgccttcagagagctcatcaccgctaaggagatcgagaagaacgtgcaggagatgagcaagggcagcgctcctggccccgatggaattacactgggcgatgtggtgaagatggaccccgagttcagcagaacaatggagatcttcaacctgtggctcaccacaggcaagatccccgacatggtgagaggctgcagaaccgtgcttatccccaagagcagcaagcccgacagactgaaggatatcaacaactggagacccatcaccatcggcagcatcctgctgcggctgttcagccggattgtgaccgctagactgagcaaagcctgtcccctgaaccccagacagagaggcttcatcagagccgctggctgcagcgagaacctgaagctgctccagacaatcatctggagcgccaagagagagcacagacccctgggcgttgttttcgtggacatcgccaaggccttcgacaccgtgtcccatcagcacattatccacgccctgcagcagagggaggtcgaccctcatattgtgggcctggtgtccaacatgtacgagaacatctccacctatattacgaccaagagaaacacccacacagacaagatccagatccgggtcggcgtcaagcagggcgatcctatgtctcctctgctgttcaacctcgccatggaccctctgctctgcaagctcgaggagtctggaaagggctaccatagaggccaatcatcgatcaccgccatggccttcgccgacgacctggtgcttttaagcgacagctgggagaacatgaacaccaacatctctatcctggagacattctgcaaccttaccggcctgaaaacccagggccagaagtgtcatggcttctacatcaaacccaccaagaagagctacaccatcaacgactgcgccgcctggacaatcaacggcacccctctcaacatgatcgaccccggcgagtctgagaagtacctgggcctgcagttcgatccctggatcggcatcgctagaagcggcttgagcaccaagctggacttttggctccaacgcatagaccaggcccccctgaagcctcttcagaaactggacattttgaaaacttatacgatccccagactcatctacatcgccgaccactccgaggtcaagagcgctctgctggaaaccctggaccagaaaatcagaaccgccgtcaaggaatggctgcacctgcccccttgcacatgcgacgctatcctgtacagcagcaccagggacggcggcttaggaatcaccaagttagccggcctcatccccagcgtgcaggctaggagactccacagaatcgcccagagcagcgacgacaccatgaagtgcttcatggagaaggaaaagatggagcagctgcacaagaagctgtggatccaagcgggcggagatcgtgagaacattcccagcatctgggaggcccctcccagctcagaacctcccaataacgtgtccaccaattctgaatgggaggctcccacccagaaggataagtttcccaagccctgcaactggcggaagaacgagttcaaaaaatggacaaagctggctagccagggcaggggcatcgtgaacttcgaaagggacaagattagcaaccactggatccagtactacagaagaatcccccacagaaagctcctcaccgccctccagttacgtgcaaacgtgtacccaaccagagaattcctggccagaggcagacaggaccagtacatcaaggcctgccggcactgcgatgccgataacgagagctgtgctcacatcatcggcaactgccccgtcacccaggacgccagaatcaagagacacaactacatctgcgagttacttctggaggaagccaagaagaaggattgggttgtgttcaaggagccccacatcagagactccaacaaggagctgtacaagccagacctcatcttcgtgaaggacggcagagccctggtggtggacgtcaccgtcagatacgaggctgctaagtccagccttgaggaggctgccgccgagaaagtgcggaagtacaagcacctggaaacagaggtcagacacctcaccaacgccaaggacgttaccttcgtgggcttccccctaggtgctagaggcaaatggcaccaggacaacttcaagctgcttaccgagctgggcctctccaagagccgacaggttaagatggccgagaccttcagcaccgtcgccctgttctcttctgtggacattgtgcacatgttcgcctccagagccagaaagagcatggtgatgtgataataggctgccttctgcggggcttgccttctggccatgcccttcttctctcccttgcacctgtacctcttggtctttgaataaagcctgagtaggaaggaccggtaaaaaaaaaaaaaaaaaaaaaaaaaaaaaaacgttgactaaaaaaaaaaaaaaaaaaaaaaaaaaaaaaaaaaaaaaaaaaaaaaaaaaaaaaaaaaaaaaaaaaaaaa
